United States Patent Application Publication US 2004/0029129 A1 - sequence listing, part 16

SEQ ID NO: 41105 - DNA, 2607 bp, Vibrio cholerae
atggctcacacacctcaagccaaataccgccttgattaccaaccgccttcacacaccatcaccgatatcgatttggtgtttgatctatacgatgatgccactctggtcaccgctgtctctcaagtaaaacagcagcaggagagcaataccttaattcttgatggtgaaacgcttgaactgaaagtgctcaaagtcgatggccaggattggcaggactacagcgtaggtgaagcttcccttgaaattcgtggtttgccgagtgagtttactctcaccgtcgtgacaaaaatcaatccgcaagccaacaccgctttagaaggtctttacaaatcaggtggtgcattttgtacccagtgtgaagccgaaggctttcgccgcattacttattatttggatcgtccggatgttctggcgcgttacaccacaacggttattgccgataaagcgcaatatccttacttactgagcaatggtaacaagattgcacaaggcgagcaggaagcggggcgtcattgggtgaaatggcaagatcctcatcccaaacctgcgtatctgtttgctttggtggctggggattttgatgtgctgcgcgatcagtacgtcacacaatccggccgccaagttgcgctagaaatttttgtcgataaaggcaatttggatcgcgctggtcatgccatgacgtcactcatcaactctatgcgttgggacgagcaacgttttggccttgaatatgacctcgacatttacatgatcgtggcggtggatttcttcaatatgggcgctatggaaaacaaagggttgaatatctttaactccaagtttgtcctagccaatgagaaaaccgccaccgacaccgattacctcggaattgaagccgtgattggtcacgaatacttccataactggacgggtaaccgtgtgacatgccgtgattggttccaattaagcttgaaagagggcttaaccgtattccgcgatcaagagttctcttcagacttaggctcacgagccgtcaaccgaattggaaatgtgcgcatcattcgaggcccgcaatttgctgaagatgctagcccaatgtcgcatccaatccgtccggataaagtgattgaaatgaataacttctataccctgaccgtttatgaaaagggcagcgaagtgattcgaatgatgcacaccttgctaggtgaagaaaaattccaacgtggcatgaagctgtactttaaacgtcatgatggcaccgcagccacttgcgaagatttcgtggcagccatggaagaagcttctggcatcgacttacaacagttccgtttatggtatagccaatccggtactcctacacttaaagtcagcagtacttaccatgccgcaagccaaacttatgagttaaccgtagaacaacataccgagcccactcacgatcagaaagaaaaacaaccactgcatatcccgctggatattgaactgtatgcaccaaacggcgatgtgattgcgctacagtgtaacgggaagcctgtttctaacgtgttggatgtgaaacaagctaagcaaaccttccgctttgagcaggtcaaacagccgccaattccgtcactgctgcgtgagttttctgcgcctgtgaaattggaatacgcctacagtgatgaagagctgattttcctgatggtgcatgctcgtaacgaatttgcacgttgggatgcagggcagatgttgcttgctaaatatattcgcaccaacgtagaacgagtccaacgaggtcaacctgtcgaattggcagagtcggtgattgacgcattccgcggcgtgttactcagtgacaacctcgacgctgaatttgtagccgaaatgctctcgttaccaagccataacgaagtgtcaggctggtataagcgtgtggatgttgatgcgattgcccaggtgttaacctcactcaaaaccattttggcgaccgagctagaagatgagctcagtgcgacctaccatacgttaaaacaagatacttactcgattgaacatgcggcgattggtaaacgtacgctgcgcaacgtgtgtttgagctatcttgcctacactgcccaaggtaacgcgttggtacaaaaacagtacgctcaagcgaacaacatgaccgacaccattgcggccatgacggcggctaaccaagcgcagttggcgtgccgtgaaagcttgatgcaagactacagcgagaagtggaaacacgatggcttggtaatggataagtggttcacgctgcaaggctcaaacccatcaccacaagtgttggatgtgatccagcaagccatgcaacatgaagcgtttagcttgaaaaacccgaaccgtactcgcagtctgattggggcatttttaaacgccaatccagtcaatttccacgcgaaaactggggaaggctatcgctttgctggacacattctgcgtgaacttaacagtagtaacccacaagtggcttcacgtttgattgatccattacttaaattccgactctacgatgaacagcgccaagcactgattaaacaagagctggagcaattaaaagcgatggataacctagcgcgtgatctgtttgaaaaagtcagcaaagcgctggaagcataa

SEQ ID NO: 41106 - DNA, 1833 bp, Vibrio cholerae
atgcgcatcactaaaataggatgcattctcattaatatgacgtatttcaacgacactattagccgctcttggctgataactcaagtaaaaaaacatcgcgccaaactgttgtttgctaactttattgccgtcgtcgcgacgctaatcagtgttcctatcccactgctcatgccgttaatggtggatgaagtgctgctcaatcatccggcaaaaggtgtggaggtgatgaaccagttcctgccacaagggtggcagaccgcaacgggttacatcatgctgactttgctgatggtggtggtgatgcgtattgccagtcagttgttgaatatcctacaaagtcgtcagttcaccttggtttctaagaccatcacttacgaaatgcgtcggaagatgattgaaaagctagggcggatcagtattcgtcagtatgaaacgcgcggcagtggcgggattaacgctcacctcatcacagatattgaaaccatcgaccaatttattggctcgacactgagtaaatttttgatttctttgcttactgtgattggtaccgccattgtattgctttggttggagtggcgacttggcctgtttattctgttagtgaacccgattgttatctacttttctcgaatgctgggcagccaagttaaacatttgaaaaaacgcgaaaaccaagcgtttgagcgttttcaaaaccgcttagtggaaacgttagatggtatctatcagttgcgtgccgcaaacaaggagcgcgagttcctcaaccgcctcatcagcgatgcggacgcagtacgcgaaaacgctgacaaatacgcatggcaatctgaagctgctggtcgcctctccttcttactgtttttactcggttttgaactgtttcgtgctgtggccatgttaatggtggtgttcagtgacctcaccataggccagattttcgcggtatttggctacttgtggtttatgctaagcccggtgcaagagctgttgggtattcagttttcttggtatgccgctaaggccgctttgaaaagaatcaatagcttattagagctagaagaagagtaccgacccatcagcaaagtcaatccctttactcagctgggagaagtcgatattgagatcaacaatatccatttctcctacgatggtgaaagccaagtcctgaatgatttgtcacttcatatcccagcggggaaaaaggtggcgttagtcggagccagtggcggagggaaatcgacgctgattcagctcttaattggcgtttatcgcgcgcaaagtggcgcaatccgctttaatggacaacactgtgatgacattagctttgacgtgattcgcgatcaaattgccgttgttttacaacaacctatactgtttaatgacactttgcggcataatctgacccttggtggtcaatttagcgatgatgtcttgtggcaagcgttggacatcgcccaactgcaagatgtgatcaccaaactcgaccaagggttagagagccaaattggtcgtaatggcattcgattgtcaggcggacaaagacagcggctagcgattgcgcgtatggtgctgagtaatccaaaattcgttattttggatgaagccacttccgccttggatacggctactgaagccgcattgcaccttgcgttgtcaaagtttttgcatggtcgaactaccttgattgttgcccatcgcctctcagcggtgaaacaagcggacttaatttatgtattggaagatggacatgtcagccagtcaggaactcaccacgagttactcgaacaagaaggcttgtaccaaaccctttatgggagtgttcagtcgcagcactaa

SEQ ID NO: 41107 - DNA, 1593 bp, Vibrio cholerae
ttgatttctacagcgaatatcactcaacaatttggcgctaagccactgtttgaaaacatttcagttaagtttggcgaaggtaatcgctacggtctaatcggggcaaatggctgtggtaaatccaccttcatgaaaatcctcagtggtgagctcgaaccaagtggcggtaatgtgagctacgatccaaacgagcgcgttgccaagctgaatcaggatcagtttgcgtacgaagagttcacggtaatcgacaccgttatcatgggtcacaaagagttgtggaaggtaaaacaagagcgtgaccgtatttatgcgctgcccgaaatgaccgaagaagatggtatgcgtgttgccgatctcgaagtggaattcgccgagatggatggctacatggcagaatccaaagcgggtgaactacttctcgcggtgggtattcctcttgagcaacattacggcctgatgagcagtgtggctccgggttggaaactgcgtgtgctgctggcgcaaatcctgtttgcagatccagatatcatgctgcttgacgaaccgaccaacaacttggacatcgacaccattcgctggttggaagatacgctgaatgcgcgtaactgcaccatgatcatcatctcgcatgaccgccacttcttaaactcagtctgtacccacatggctgacttggattacggtgagctgcgtatttacccaggcaactacgacgaatacatgactgcggccactcaagcgcgtgagcgtctgttatctgataacgcgaagaagaaagcgcaaattgctgaactgcaaaccttcgtagcgcgcttctcggcgaacgcatcgaaagcaaaacaagcgacttctcgtgcaagacagattgataagatcaaactggatgaagtgaaggcatcaagccgtcagaacccattcattcgtttcgagcaatcgaaagagctattccgtaacgcccttattgttgaaaacctcagccaaggttttgatcatgacctgttcagcaacttcaacgcgatttttgaagtgggtgagcgtgttgccatcatcggtgagaacggtgtgggtaaaaccacattgctgaataccctagctggcgtacttgagccacgtagcggtatgtacaagtggtctgaaaactcgaatattggttactatgcgcaagaccacgctcacgagttcgcagaagatctgaacctgatggagtggatgggtcagtggcgtcaagaaggcgatgatgagcaagtggttcgcagcttcttgggccgtatgctgtttggccaagatgacatcaagaaatccgtgaaggtactgtcgggtggtgagcaaggtcgtatgttgcttggcaaactcatgatgcacaagccaaacatgctgctgctcgatgagccaaccaaccacatggatatggaatcgatcgagtctttgaacaacgccttagagcaatataaaggcacgctgttcttcgtatcgcatgaccgcgtattcgtagactctttggcgactcgcatcatcgaaattcgtgatggcaaaatcactgacttcaaaggcacttacgctgagttcctgaaatcacgtggcgttgaaggctaa

SEQ ID NO: 41108 - DNA, 2034 bp, Vibrio cholerae
atgaaagctaaatgggcttggtggcaaaaatggcgacaccgttttcaaaccaccgtgcgctatcggctgtggattctgacctcagcgccaatttttctcacactgctggcgctgattgcgatcaccatttactggtcactgcattacacctggaacagtgctttaattgatgtgtctgagcggttaggcgtggcgcaaaacagtgtaactctactgcaacagaaacaagccaatcacgttcgcgcgtttgcagaatcgtacgattttcgcaagcgtctgcaagagccggaaaccctcagtactttgccacgttgggtgcaaaatcaaaaaaatcgctatggcttagatttcttaagttttgagcgtgtggatagcttagagcagaagtttcgctatctcgatctcaccaagcgtgaatccttctttgatgtacttagtgccgatgagctagaaaagctcgatccggatttagctaagcaagcgcaaatcccgattcttaattctcaacagatcgaaactcggggattagtcagtcgtaccgtgattccagtgcgcaatgacttcggtgagatcataggttttttggatggtggtttactgctcaataacagcacaaccttagtcgatcaaattcgagatctcatctacccaagtcatcaagatcagcttcgcccaacgggcactttaaccctgtttttggatgacttacgcgtcagcaccaacgtgcctttagacagtaatatccatgcaggtcgcgcgataggcacacgggtgtcatccgaagtgtttaatcaagtgctcaaaggtggtcagcagtgggttaatctggcgtatgtgtatgatgcttggtacatcaccgcgtatgagccgattcgcgatcaataccacaacgaaattggcatgctgtacaccggctacttaatgtggccgtttttaaaagcttacgtgaccaatattttagaagtcgggatcatcacgcttttcctgctggtgatttcaggcctgtttgtgtaccgtggctcgcgcgatctgtttcgtcctatcgagcgcattcaccgtgtagtgaaaatggtgcaacttggtaaaaaccagcgtattggtcaaattgggcttgatgacaaacatgaactcgctcagcttgcgaagcaattcgacaacatgctggatcagttgcagcaacggaatgaagaaatcgtgcaagccgcgcatgagttagaagcaaaagtgcaatcgcgcaccgccagtttgcaagagaaaaccgcgcagcttgagcaccacattgccttgcttaaccaaacgcgcaataagttagtggtgcatgaaaaactggcggcacttggtgagctaaccgcggggattgcccatgaaatcaataaccctaccgccgtgattctcggtaataccgagttaattcgttttgagcttggtgctgatgcgagcagagtcgaagaagaaattgatgccatcttgctgcaaatcgagcggatccgaaacatcacgcgcagcttgttgcaatacagtcgccaaggcggagtgcaggacgaaatcacgtggcaacacgtcaatccgatcattgatgagagtattaccttagtcaaaactggttcgaaaaagcgcgatattgaatttgtgctggaactgaaagcgcacaattcggtggaggtgaatcgccatcaactgctgcaaattctggttaacctacagatgaacgcgattcatgccatgaacggcaaaggccgcatcacgatacgtagcgaagattgggttgaagaggggcaaaaccgcggagcggtgatccacattgaagatcaaggttgtggcattaagccagaaaacctcaaacgtattttcgatccgttttataccaccaaacgtgaggggacagggcttgggctttcggtttcacaaagtttgcttagccagtctggcggagaaattaaagtgcagtctgaattgggcgtgggtagcactttcagtatcttcctgccttccaaaaatgaagcgaaacttcgcgagaccttgctgcttcaataa

SEQ ID NO: 41109 - DNA, 1821 bp, Vibrio cholerae
atgattgcttctgcacaccagaatcctcaacgccctaacctgccactactcggtttcgctgcctattctggcaccggaaaaacgacgctgctagaagccctgctgcctaaactgacagcaactggtttgcgcattggtctgctgaaacacgcgcaccacgattttgatgtcgataagccaggcaaagacagttatcgcttacgtaaagcgggagcgtctcaaatgctgattgcgtcgcgtaaccgtcatgcgctaatgaccgaaacccccgatgccgaagcggagtttgattatctgttgactcgatttgatgctgaaaagctcgatgtgattttggttgaaggctgtaaaaatatcgcttttccaaaaattgaactgcaccgcgcggaagtcggtaagccttggctttaccctcatgataaaaacatcattgcgattgctgccgatgagacggtcgcaacggatctgccgcaaatgcacattaatgatctcgatgcgatcgctgatttcgttttggattatgtcaataagtggcgcgcgcagcagattcaaccacacacagtgtcagattccaaaaacaatgcagcggcatgctgcgacactttatcccctgctttcctttctgtagaacaaggccgcgagaagatcctctcgctcatctcacctttggcagagacagaatcggtagcgattcaagagtgctatcaacgcgtactggcgcgtgaagttttctctccgaacaatgtgcccgcctatcgcaactcagcgatggatggctatgcgctgcgcagtgatgatcttgaacgcgatagctaccgtgtagtggcggaagtgctcgccggtagtcattatccgaaaacggttgaacgcggcgaagcggtgaagattatgactggcgcaccaatgccactcggtgctgatacggtagtaatgcgtgagcaagccacgcaaaacggcgaactggtcagttttgcgggtgccaaaatcaaagcaggacaaaacgtacgccaagcaggtgaagatttggcgcaaggccaagcggtctttagcataggtcagcgtgtgctttctccagaaatgggcatgttggcgtcactgggttttgcgcacgcggacgcatttcgctcgcttaaagtcgcgattttttcgacaggcgatgaagtacaagcgcccggcggtgacattgagccaaactctatttttgattccaaccgttttactctgacaggattactcaaacagctcggctgccaagtgatcgatctcggtatcatcgaagatgacgaagcaaaaatgatgcaagtgcttgagcaagcagcaaaacaggctgatgtggtgatcacttccggtggtgtttctgtgggcgatgcggatttcatcaaatccgcgctagagaagctgggacaaattgatttttggcggatcaatatgcgtccgggacgcccactggcgtttggccagattgctggaaaacctttcttcggtctaccgggcaaccctgtcgcggtaatggtttctttcatcaactttgtggaacctgctctgcgtaaaatgcaaggtgaacaaggttggcaaccactgaaagtcaatgcgattgcgttggaagatctgcgctctcgccaaggcagaactgagttcagccgtggggtttacgcttttaatacgcaaggacaactgacagtacgtaccacgggcaaacaaggttcggggattttgcgctcaatgagtgaagcgaactgcttgattgaaattgctccggcgattgatacggtaaaagtcggtgaaagcgtgacaatcatcccacttcaaggcagaatctag

SEQ ID NO: 41110 - DNA, 1305 bp, Vibrio cholerae
atgaataaggtatggttaaccggtttgcttacagcaaccgcttctggcgttttttcagcctcaacattagcggcaaccgaaattacttggtggcatgccatgggtggtcaactgggtgaaacggtcaatcagttggcaactgactttaatgcctcacaaagcgactataagctcactcccgtttataaaggttcgtacacagaaacattgaccgcaggtattgcggcgtttcgtgctggccaagcacccaatattttgcaagtgtttgatgctggtgccgccaccattatgagcagtaaaggcgttgccaaacccgtgcaagatctgatgatcgagtcaggctatccgttcaccgcacaagattacattgctggggtacgtaacttttatgccgataacacgggaaaaatggtcggcatgccattcaacagctcaacgcctgtgctgtactacaacaaagacatgttggcttccgttaacgcgcaagcgccacaaacttatgagcagctagaacaagttgctgctaagttagccgaaaaaggtcaagcgggatttgcccaatccttaacgccgtggatcatgtttgagaacttcaaatctcgccacaacctaccgctttctgataagcaaaatggctatcaagatctctcgacgaaaatcatgtttaactctgacgatatgctgatgcatgtgaaaaaactcaaagagtggtcagataaaggttactacaagtattacggcagtgattgggatgccaaccaaacgccattcgagcgcggcgaagtggcaatgtggatgggctcttctggctcattcggtggtctacgtaaccgcgtgaaattcaatctcggtacgacctacctgccttactgggaatcggtcaccaaaaacccaacccatacctttattggtggcgccgcgctgtttgcactgcagggtcacactccagcgcaggataaaggtgtcgcagctttcttcgcttacctgaccaagcccgaaacgcaaatgaattggcataaaaccacaggttatgtgcccgtcaccaatgcagcctacgacctgaccaaacaatcgggctactaccaagaaaacccggatgcagaagtgggtgtaaagcagcttagcttgcctgatggtgaatggaccaaaggctatcgccttggttactacccacaagtgcgcgaagtcatgcatcgcgagttcgataacattttctctggccgctcaactgtcgagagcagcttgaataaagtcgaagatgaaagcgctaagttactgaatcgctttgctcgtaccgtgcaataa

SEQ ID NO: 41111 - DNA, 714 bp, Vibrio cholerae
atgatgccttcaatcatcgtcggccaccgtggggtggctggaacgtatccagaaaatacccgtgtcagtgtacaagccgctatcaaccttggtttatcttgggtggaagtggatgtgcagccgaccaaagacaatgtactggttgtgtgtcacgaccatacgattgaccgttgcagtaatggcaaaggtcgcattgatgagtacacactcgccgaactcaagcaacttgatttcggtgcttggtttgatcctcgttttgcgggcgaaaccatcatgacgctggaagagctgctggtgctcgccgccgaacacgatttaggactcaatattgaagtcaaagtcgataagcatgatgtggccagtgttgtacaacagttgaaagcgcaacttgaccagagcccgctggttgccgacaaaatcttactgtcgagctttagccacgacattattttgcaactgcaccagcattgtccgggttataaattggggattttgagtgagcgtttgactcagcgggatcgccaagtgcttaaacaggtgaatgcgtttagctgtaacctcaactaccgctggatcacagaaaaacacatccgcgatttgaaaaatggtggctaccagatttggtgttacaccctcaatcaagtggataaattccgctatttagacaaagtcgatgccattttctccgacttcccagagcgctttatcaactag

SEQ ID NO: 41112 - DNA, 1035 bp, Vibrio cholerae
ttgcggactcagtttgaaggattgttgatggcaaccataaacgatgtgtgtaaattggcgggtgtctccaaagccacggtatcacgagtgctgaatgagacaggccaagtcaaagcacaaacgcgtgaagcggtacttgccgccatgcagcagctcggttatcagcccaacagtttggcgcaggcgctcgctaccaataccacaaactcaattggcttggtgctgccgcattttgagagcagctattttggttcgattttgtttgaagccgaacaaggcgcgcagaaagctgggaaaaaactgctggttatgaacagcaaaaacagtgagcaaggcgaaaaagaagcggtcgccacattagcggcgcagcgttgtgatgcgatcttgctgtacagtcgtcatttgaatgaggtgcaattacttgaattacaacagcaacatccatcgcccttagtgatcctcaatcgccgtttacatcacccgcaattgcacagctttgggctcgatcaaacgcaaattgcccagttagcgatgcagcatttgttgaatttagggcatcgtcaaattgcctgcattacatcgccgttggtgagcgagacgggaaaaattcgttatcaggtctatcaacaagcgttacatgagcaagggatagagttgagctcgtccttggtcattgaaggggataacacgctgcttggtggttatcaggcaatgcaacaactgctgcaacaaggcatttccatgacggctgtttttgcctgtaacgatgatatggcgctcggtgcaatgcgtgccatgcatgaacatggcattcatgtacccaaacaagtttccataatcgggattgataatgaacccgcggcggcttttgctatcccgagtttatcgagcgtgagtctaccgatcggcgagttaactcagcaagcaatcagtttggctgtcgagattgctaataaaaaaccacaagatgcacagcacaggctctatcaagggagtttgatcgcccgtgaatccaccatagcgctcaaactatga

SEQ ID NO: 41113 - DNA, 1437 bp, Vibrio cholerae
atggctaagtctatttttcctaacgattttttgtggggtggtgcggtagcggcgcatcaagtggaaggcggttgggatcaaggtggtaaaggcgtgagcattgttgatgtgctgactcgtggtgcgcacgaagtgccacgccgtattaccgatggggttatggaagacgaattttacccaaaccatcaagcggtcgatttttatcatcactataaagaagatatcgcgctgtttgctgagatgggttttaaatgtttccgtacgtctattgcgtggacacggattttcccgaatggcgatgaagccgagcccaatgaagcaggattacagttttatgatgatctgtttgatgagctgttaaagcacaatattgaacctgtcattacgttgtcacattttgaaatgccactgcatctggtaaagcagtatggcagttggctcaaccgcgacttgattgatcacttcaccaaatttgcgcaagtcgtgatgacccgttaccagcataaggtgaaatactggatcacctttaatgaaatcaataaccaatgcaactggaagctgccgatctttggttattgcaactcaggtatgctttacgctgagcaagaccgcccagaacaagccatgtaccaagtgctacatcaccaatttattgccagcgcattagtggtgaaactggggcacgagatcaatccggattttaaaattggcagcatgatccatatgatgccgctgtatcctgccacctcacgtccggaagatgtgttgttggcacaagagttgatgcgtgagaaatatctgttcagtgacgtacaggttcgtggctattaccccagttatctgcgcaaagaatggcaacgcaaaggcatcgaaattgagatgcaagctggtgatgagcagatcctgcgccaaggctgcgccgattatctcgccatcagctactacatgaccaacattgtctctgcagcgccagaacaagagggcgaaaccacctctttgtttgaaaccagccgcttaaacccgtatcttcctgcgtccgattggggatggcagattgatccacaaggtttacgttatgcgctttctgagttgtatgagcgttaccaaaaaccgatttttgtggtagaaaatggcctcggcgcgctagacaccgtcgaagcggatggttcaatcaacgatgattaccgaattcgctacctctctgagcatatcgcggcagtcaaacaagcgatcgactatgacggtgttgaagtgatgggttacaccccttggggctgtatcgactgtgtatcgttcaccactggcgagtacaaaaaacgctacggctttatctatgtggataaacacgatgatggcagtggcaccatggcgcgcgctaagaaaaagagcttctactggtatcaacaagtgatcgccagtaacggtgaaaagctttaa

SEQ ID NO: 41114 - DNA, 2175 bp, Vibrio cholerae
atggagcacaataaagcgggttcaagcggtcaatgccctgtcatgcacggtggcttgacttcggcgagcatgtccaacatggactggtggcctaaagcgctaaacttagacatccttcatcagcatgacagcaaaaccaatccacttggtgctgatttcaactatcgcgaagagctgaaaaagcttgatgtagaagcgctaaaacgcgatctgaaagcgttaatgaccaatagccaagagtggtggccggccgactggggacattacggcggtttgatgattcgtatggcatggcactctgcgggtacctaccgtattgccgatggtcgtggcggcggcggtaccggtaaccaacgttttgccccactgaactcatggcctgataacgccaacttagataaagcacgccgtttgctgtggcctatcaaacaaaagtacggtaacaaaatcagctgggcggatttgatgatcctcgcggggaacatggcttatgaatcgatgggcctcaaaacctttggttttgcctttggccgcgaagacatctggcacccagaaaaagacatttactggggttctgaaaaagagtggcttgccaaatctggcggtgaaaatagccgttactctggtcagcgcgatctcgaaaacccacttgcggccgtcatgatggggcttatctacgtcaacccagaaggtgtggatggaaacccagatccactcaaaacggcgcaagacatgcgtgtcacttttgctcgcatggcaatgaatgacgaagagaccgttgctctgacggctggcggccatacggtgggtaaagcgcacggtaatggcaaagcttctaaccttggccctgatcctgaaggcgctgaactgcacgaacaaggcttaggttggaacaaccacaccagccgtgggattggtcgaaacaccgtcaccagtggtattgaaggtgcatggaccactcacccaacccgttgggataacgaatatttctacttactgctcagctatgaatggcagctcactaagagccctgcaggtgcatggcaatgggaacctgtcaacatcaaagaggaagataaaccggttgatgtggaagacccaagtattcgctacaacccaatgatgaccgatgccgatatggctctgaaaatcgatcctgaatatcgcaagatttcagagcgcttctacaaagatcccgcttacttctcagaagtgtttgcgcgagcttggtttaagctcactcaccgcgatatgggaccaaaagcgcgctactttggcccagatgttccggcagaagatttgatctggcaagaccctgttccagcaggtcgtaaagattatgatgtcaatgcggtcaaagcaaaaatcgcggcaagcggtctaagcatcagtgaaatggtcagcaccgcttgggatagcgctcgtactttccgtggttctgataaacgtgggggagccaacggggcgcgtattcgcctcgctccacaaaaagattgggaaggcaacgaacctgcgcgtcttggtaaagttctggcggtattagagaaaattgccgctgaatctggcatcagtatcgccgatacgattgttctggctggtaacgtaggtatcgaacaagcggctaaagccgcgggcgtgaatgtgaccgtaccgttcgcaccgggacgcggcgatgcgacaatcgaacaaaccgatgttgagtcctttgaagtgcttgagcctctcgcggatggcttccgtaactggcagaaaaagcattatgtggtcacaccggaagaaatgttgctcgacaaagcgcaactgctgcgcctcaccgctccagaaatgacggtgttaattggtggcatgcgtgtgcttggcactaactacggtggcagccaacacggcgtgtttaccgaccgcgtgggtgcgttgaccaacgatttcttcgttaacctcaccgacatgagttacacctggaaaccaactggtcgcaactcttacgagattgttgaacgtaagagcggcaaagtgaagtggacagccactcgtgttgatctggtgtttggttctaactccatcctacgtgcttatgcggaagtgtacgcacaggacgacaacaaagaaaaattcgtcaaagactttgttgccgcatggaccaaagtaatgaatgcggatcgatttgatctggtgtaa

SEQ ID NO: 41115 - DNA, 459 bp, Vibrio cholerae
atgtcgaatacacaccaaggcttaaaagcggtcgcgattttagagtcggccaaagggattgtgtcgctactgttggggttagggctgcaccatgttgccggcgatagcctacagttgttgttgctagatctgttacagcacttgcaccttaatcctgccagttattggccagagaaattactgcatcaagcggggcttttcacccatttcaatttgaactgggtggccgcaggcgcgctagtgtatggtgcgattcgtttgattgaagcttatggtctttggcacaacttattgtggacggagtggtttgcactgctcagcggagccatctatctgccatttgaagtgtatgagttgtttacccatcctggtgtattcagtatggcggctctgctgattaacctagttattgtgctttatatgtatcggattatccgcagtaaagtgccgcaaaggtaa

SEQ ID NO: 41116 - DNA, 1671 bp, Vibrio cholerae
atgccatacaattctgcgacagatttgttacagagagagggttatggtgtcgtgcataaccaatttatcaataacatggcgatgtactgcgagacaagacactctattttggcggctattcaggctaaccgacatgcccctgcattatgggttaaacagaaaacctacacctatcaagagatgaccgatatggcactctcattgagtgactattggcatttacagggcgtgcagcgagttgcgatcctttcggtgcgcgatctcgcggcttattctgcgatatgggcgagctatttgggcggtatgacttatattccgctcaatgcgcgagcaacaacagaacagatccaagagacgctgatcgcgacacaatgtgattccatcatggtagacgcgcagcaattgagtcgtttgtcctccttactagagacttgcattgaccgattacacatttatgcactgcctgatgtggatgtggaaccgttacgtcagcaatatcctcagcacacttttcacacagtgcaaataaccgaacaagatgtggaattactggtagtgaaataccatttagacaatgaacatgagtacgcttatatcatgcaaacctcaggttcgactggtaaacccaaacgtattgcggtcagctacagtaatttgcattgctatatcagtcaaattgacaaactatttccactcaatgcgcaagatcgagtggggcaatattctgatttgacttttgatctttcggtacatgatattttttacagtttgatctctggtgcttgtttatatgttgtgcctgaattggcgaaattaagtccagcagaatttattcatcaccatcaattaacggtatggctttctgtgcctactgttattgagttggccctacaaagacaaaccttaaccccacacagtttaccttctctgcgactgagttttttctgcggacaagccttgctgcatgatttagccgaacaatggcaacaggccacccagcagccggtgatcaatctgtatggtccaacagagtgcacgattgccgttacctatcatcgatttgtcgcccattcaggtatggcatcggtgccgattggtcgtgcttttgaagaggagtgtttagccatcatcaacgaacaaggcgagttgatgcgctttgaatctgcacccgaggggtatcgcggagaattacttctgtcgggcaaacagttagtgaagggttatctgaatgatccgctgaatacgcaaagtgcctttttccagcacgaagggcgtctttggtatcgttcaggtgacattgtcactaaatcaaatggcgtgctgattcatcttgggcgccgcgatcaccaagtgaaaattgccggacaacgggtggaattagaagagattgaaaccgttgttcgccgcgtgactcaagcgcacagcgtggcgattgtgccttggcctttaagtgagtcgggctatgccagcggcacggtggcgtttgtggatacccatacccaatggcaaccagatctgtggttgagccaatgcaaacaacaattaaatccgacttttgtgcctaagcgttggtatgccattgaacaattaccaagaaatgccaatggcaaaaccgatattaaagctttacaacaacaattagcgagtcagacatatgaaacaagccattga

SEQ ID NO: 41117 - DNA, 1551 bp, Vibrio cholerae
atgtcggaactgtcaccccagtggctccttgttagtttgtatcttggtggccttgtattgagcttatggttacctcaacagcagtggcgtatcgccaagttcgccactctcgccggcttcatcgccatgcttggaaataccctttttgcgatagggcaagcgagcatcaacctagtcccagtcgatggattaggcatcgtgatggcgatactcgtctcgctcctaggctgggtgataacccgcttcgcccatcgttatctgcaaggcgaagcgcagcaagcgcgttttgtcaccgccacgctgtttaccctaagctgcgtagccttgttggtcaccagtcagcatctgcttgtgatcgtgctggcgtggagcggaaccagcgttggcctacatcgtctcctgaccttttacccagagcgcaaagccgcacgcgtggtggcacacaaaaaattcttagtcagccgttttgccgaaatctgtttgttgttagcgctcggtttgatctatctcgatgtcggtagcttgtcgctacaagagattcacttcgcgttaaacgcgcaggattcgctgccacttagcttaacaggggctgcgttgttactcgccttcgctgctatcttaaaaaccgcccagttacctctgcacggctggctgattcaggtgatggaagcgccaacgccagtctcggcgttattgcatgcgggtgtggttaacatggggggattcgttctgctgcgcgtcgcagaactgattggacttgttccttcggcgcaatggttgctggtgatcgtcggtagcctcactgcggtgctcgctggcatggtcatgctgactcggatcagcattaaagttcgtttagcttggtcaacgtgcgcgcaaatgggctttatgctgatggaaatcggcttaggcttatatgagctcgccctgctccatttggtggcgcattcactttataaagcttatgccttcctaagttctggcgaagcggtggagcgagcacgtctgcatgattttcaagccccacaaagtgtcaatggtaaagccgtgggggctttgctcgcggtagggctcagcgcagcgcttatcctgatactgcaccatttatggcaatccttaacatccaatttgcatctacccaatgcggtggtcgcgattctcgccttaggttttgctccgctactttggcaaagtggacgttttacaccaagtggcttgagcctcggtgtgctgcgggttgccctactcacccaactctatttcgtatggcatctgctgtttgcgggtttagcacccgagctgcgccccgctagcccactcgcgctgagctttgtgatgttctgttttatcaccttgtatctgatgcaagtgctgctctgcctctaccccaaaagccgtttatcactgtggctctatccttgggtttaccatggtttttatcttgatgagacttttacgcgcctgaccttcaaatattggcccgtgcaattaactctgcctaccgctctttcatcaactcaagcgcaaccgacgacaggagaacgcgtatga

SEQ ID NO: 41118 - DNA, 2589 bp, Vibrio cholerae
ttggcccgtgcaattaactctgcctaccgctctttcatcaactcaagcgcaaccgacgacaggagaacgcgtatgaatgcgccacgttcgctctcagctttaagcaccaccgctaacccagcattatcgacacttgtcgaacaagtctgcgccttgattgctcctaactggccgctggatcgcatgattgcggtgagcccttattggaaacggattgataagccctttgcacaagccgccgccgagctcaaacaattggccgcctcccccatgaccatgacgctcagtgattaccaccttcgttggcaaaataagcaaatccaatcagcggatttgcaacaagccatcgctgaacaaaacagtgaccttagcgaatctaccttgattgccgctttacaacagcccacagcgccgagtcatccttggccattgctgtgcgacaccgtcgatagccggcgtgatcttgagcatcatcccgcatggaatgacgccatcacccatcaaatttcgcaattttgcgccgcctattttgaccatcatcaagccgattggagcccagatcagcaaaccggactctttgccacttggcgtgaggcgatgatccacgatcgcagcattacgctgctgctcaacgagacaagcgtaaaacaaaaagccaccaagcttcccgaggatgctatggccgccatcgagcaaactctagcgcaactcgctattgcccctgcgcaacaagaaacgtatttacaagccgtgttaatgcgcatcagtggctgggcatcctggtgtgcttatctcgcatggcaggcagggtttgagggtcggcacgatgagcacctgcgcgatctgttggcgattcgtctctgctgggagaacttacttgatgatggtgagcgcggtatgggctctgtgtggttacaatggcagcaatcttgggcaccgcgccaatcgtgcgaggaggatcgcgcactacgcattgcgctactgtggcaacgcagtgcggaaatcgcctatcaacgccaactttttgctgcgctgacatcagcacaagagtcggctccccaatcaagttatcccgaggtgcaagcggctttttgtatcgatgtgcgttcagaagtcattcgccgccacttagaagcgcaatcaccccatattcaaacccttggcttcgcaggcttttttggcttaccgatccgctatcagttattgggcaccgaagcaagccgcccacagttaccgggcttattagcgccgagcttgatcgtctctgacagcacagggaatgaagatcaagacgcgaaattggccttgcgtcgccgtgctcgactcaagcgacactttagctggcgcgcgtttcatcacctccccgcctccacgtttactctggtggaaaccacggggttggcgtatttaaccaagctccttaaacgcaccttatcctaccctgcattgagtgcatcggtggagcgtttcgcctttacggaacatgagtggcagagtgtcaaaccgcaattcacgcgcgatccacagacgttagcgcagcgtgctcaaatggcggccaacattctgcgagcgttggggatcgccaccgagcaagcacgcttggtgctactcgtggggcacggctcacagacgcaaaataatccgcagcgtgcagggctggattgtggagcctgctgcggtcaaagcggcgaagtcaacgctcgcacgttagcagcattgctaaatgatcaggcggtgcgccaagcgttgcctgaatatggaatttcgctgcgcgatgacgtccactttatcgcggcgctacacaacaccacgacagaagcgatgaggctttttgatcgccatgagatcccaacaagccatcgcgaggcgctagaacaacttgatcagcagctcacggccgccagccatggcgcacgtcaagaacgcgcgccaagtcttgaattgaatcacaaccaccaagcgcctccaagcaaggacaacgccctatctgcccagcagttggagcaagcgtttctgcgtcgagcccatgattgggcgcaaactcgccctgaatgggggctgaccaacaatgccgcttttatcattgcaccgcgccaacgttcaaagcaggcgaaactcgatggtcgagtgtttttgcatgaataccaaccggagcgcgatcccgaagggcaattactgacacaaattatgacagccccaatgctggtcacacactggattaacatgcagtattttgcctccaccgtcgataatcgccgcttcggcagtggcaataaaaccttgcataatgtggtaggaggaaatatcggtctttttgaaggcaacggaggcgatctgcgctgtggcttagccctgcaatcgctgcatgatggccaagggtggcgacatgaagccttacgtctcactgtggtgattgatgcgccgcgcgaacggattgagcaagtgatggcttcacaccgcgtggttgaacatttggttaagcatgaatggctctatctggcccgttttgctgatcaagggattgagatatatctccaaggcacttggcaacgcatcactcagcccagctcagattccagtgcgagataa

SEQ ID NO: 41119 - DNA, 1704 bp, Vibrio cholerae
ttgataagtaaaaatatgagaagtcatctaaaactttcgtttaaatcgattttctctattaaattcatcgttatttcccatttagtgaaaagggttatttacccttatattctcgctgggcagaaaagagcttttgatttcttcattctccgcaacgtcggtcagaatggcaggtcgcattggagagcaaccatgcatatgtcaaaaagctttttaattatttcaatgggttttgtggcggtatccgtacaggcacaaactcttacgcgagacaacggtgcgccagttggcgataaccaaaactccatcacggcaggtgagcatggcagtgtattgctgcaagatgttcatctgatccaaaaattgcagcgttttgccagagaacgtattcctgagcgggtagtgcatgccagaggaactggcgcacatggtgagtttgtcgcatccggtgattttagtgatctgacactctcagcgccgtttaccagcaaaggcaaaatcacaccggtatttgtgcgtttttcaacggtgattcactcaaaaggttcgccagaaacgctgcgcgatccgcgaggttttgcgaccaaattttataccgaacaaggcaactgggatttggtagggaacaacctgcctgtgttcttcattcgtgattcgatcaagtttccggatatggttcactcgctgaaaccatcacccgtcaccaaccttcaggatccgaatcgcttttttgattttttcagtcatgagccagggtctacacatatgttgacttgggtgtataccaacttaggtacaccggcaagctatcgaaccatggatggttttggcgttcatgcttataaatggatcaatcaaaaaggcgatgtgaactacgtgaaattccattggaaaagcttgcaaggaattgaaagtttacgccctgatgaggtcgtcaaagttcaaggacaggactttaaccatttaacgaatgatctctacacacaaattaacgcgggtaatcaccccaaatgggatctttatgtacaggtgttgacaccagaacaactgagcaaactggattacaacggcttagatgccaccaaggtatggttggatgtgccggagaagaaagtcggtacgatgaccttgaacaaagtacctgacaacttctttttggaaaccgaacagtcggcatttgcgccatcaaacctaattcctggtattgagccatcggaagaccgtctgttgcaggggcgtttatttgcgtatgccgatacacagctttatcgcttaggtgccaatttgttccaactgccaattaaccgcccgttggttgaggtgaacagccataaccaagagggcgcgagtaacagtgcacaaactgcttcagacattaactaccaacccagtcgtaagcttgaattgaaagaggaccctcaatttaaagcggtacaaacgcagttggttggaagtgttcagcaaaaagcgatcagcaatccgcgtaacttttatcaagcaggtgtgctctatcgcagcttaaatgagcaggacaaacaagaccttatcaccaacttgycgggtyacttaaacaaagtcactgacaaagagatcaaagctactatggtcagccatttctaccgagcggataaggattacggtactcgcttagctcgtgcgaccaataccgatttgaaacaggtggcaaaactggccgcgatgtaa

SEQ ID NO: 41120 - DNA, 786 bp, Vibrio cholerae
atgaaccctttactctctgcccactgttcatgctcacaagagattgctcagcaatttgcccactatcaacacatcagtggtgaaggcgagatttatcaaacctcattgatgagcgccttaatcgctggggtttatgaaggtgcaaccaccatagcgcaacttttagaacatggggactttggtctcggtacgtttaatgaactggatggcgaattgatcgcatttgatcggcaagtctttcaactgcgcgctgatggttctgcccaacccgcacaccctgagcagcaaacgcctttcgccgtttttactttttttaaagcggatattgagctgcccattaccgagcgcatgactcgtgaacaagtgcatcagttgattgaccgattagtcccaagcgacaacctattttgtgcgattcgcattgatggcacctttccgagtgtgcagacccgaactgtacctaaacagcagcggccctatcgacctatgttagaggtggttaaacagcagcccgtttttcgttttcaacagcaacatggcgtgattgccggatttcgcagcccgcaatacaccacaggtatcaacgtgcccggctaccacgaacattttattactcagcaacggacgggtggcggacacattcaagattacatcatccgttctggattcttacaaattgggcgagtttcgcgtttggtggtcgacactccggtgtctcgtgactttcttgaggcgaacctcacccctaataacatccgtactgccatcgaagcagcggaaaaataa

SEQ ID NO: 41121 - DNA, 1704 bp, Vibrio cholerae
atgcaatccaacattcacttgcgcagcggagcacaacttatcgcccaacagcttgaagctattggtgtgcgttatgtcttcggcattccgggggccaaaatcgaccgtcttttcgacgcgattgaggataccaaaatccaaatgatcccagtccgtcatgaagcgaatggcgcttttatggcgggtattatggggcgtctttcaggtcgagcgggagttaccttagccacatcgggccccggctgcggcaaccttgtaacaggcgtcgcgacagccaattctgaaggcgatccgatgatcgctattggcggcgcagtcaaacgtgactatcaacaaaagcagacccaccagagcatggatacggtgagtatttttcgttctatcaccaaatacagcgccgaaattcaacatgtcgatgccaccagcgaaatcatggctaatgcatttcgtctcgccgaatcgggtcgccaaggcgcgtgttttatcagcgtaccgcaagatgtgctggccgataaaacctcaagcgaaattattatccccagtgcttaccagcccacggctgaagccgacccagacagtttgcaggaagccgtagaacggattcaaaaagcgcagcgctgcgtcgtattactcggactgcatgccagccaccaagccactgctgaagcggtcagcgcttttttacataaaacccagttacctgtcgtgggcacctaccaagccgccggcgcagtagacatcaactactatcaccatttcgccggacgagtcggcttattcaataatcagcccggagatgtgctgcttaaagaggccgatttgatcatcaccatcggttttaatccgatcgagtacgatcctgagctatggaatagccagcgctgccctatcgttcatatcgatattgagcctgcgcagtatcaaatccactaccagccatgcctacaaattgtcggtaacattgccagtaatttggcggcactctgccgcccactacccggttttactcgcctctccccgactgcattagcgattttggaagaagtgactcagcagcgtcacgccatcaaagcctatcctttgcgctatcaaaatgcgggatttcatccgctaaccttgattaagaccatgcaagcgatcatcaaacccgataccaccctctgtctcgatatggggagtttccacatatggattgcgcgctatctgagctgttttcgtgcacggcagatgctggtatctaacggacagcagaccatgggcgttgccctaccttgggcgattgcggccagcttactcaaacccggccataaagtcgtttcagtatccggtgatggcggctttatgcaatccagcatggagctcgaaaccgcggtgcgcctcaaatgcaatatcgtacacatcatttgggtcgataacgcttacaacatggtcgagatgcaggaagtgcagaaataccatcgcgctgctggggtaaaattcggccctattgattttaaagcctacgccgaatcctttggcgctcgaggctacgccatcacgcaacccgatcagttgctccctactctgcgccaagcgatggaagtcgagggccccgccgtcgtcgcgattccagtcgattactcggataaccccaaattgatgcaagcgcgcaccgaagccaatcaagatcccgtatttcaaaccctagaaggagttttcgcatga

SEQ ID NO: 41122 - DNA, 759 bp, Vibrio cholerae
atgagaggtttaacccataaagtcgccttagtgacaggtgccgctaacggtattggactggcgattgccgaacgtttatatcaagaaggcgcaaccttagcgctggctgattggaatgaagagcagttagccattgtgattgagcagtttgattctgcgcgagtttacgcgcaaaaagtcgatgtctcggatcccgaacaggtgcaagctttagtacgtaaaacggtcgagcgtttcgggcgtctagatattctcgtcaacaacgcagggattcatattccgggcacagtgttggagtgcagcgtgcaagattggcgacgcatcgcctcggttaatatagatggagtggtctactgcgcaatgcatgcattacctgagctaataaaaacgcgcggctgcatggtgaatacggcgtccgtgtccggcttaggcggtgactggggcgcagccttctactgcgcgactaaaggtgcggtagtcaatttcactcgcgctctagcactggatcacggtgcgcaaggtgtacgcattaacgcggtatgtccaagtttggtgaaaaccaatatgaccaacggctggccacaagcgatccgcgatcaattcaatgaacgcatcgctttaggccgagccgcagaaccaaaagaaatagccgccgtcgtcgcctttttagccagtgatgatgcctcgtttgtccatggggtgaatcttcccgttgatggtggtgccaccgcctccgacgggcaacctaaaatcgtttag

SEQ ID NO: 41123 - DNA, 1434 bp, Vibrio cholerae
atgtcgcagcctgtagatagaaaaacctttttgggcatcttttttacggtttttttgccaatgtttttggcggccgttgatcaaaccttgctggctaccgcgacgcctgcgattgtgcgcgatctcggcaacttgcaactttcttcgtggattgcgattggttacatgctggcaagtgcagccagtgttccggtttacggctggttaggggatcagtatggacgtaaaccgatgttaatgattgcgctgagtatttttgccttaggttccgtcatttgtgcttttgcaatgaatatgccgtggttggtggctggtcggattgtacaaggactgggtagcggcggcttaatgagcttatcacaagccttgatcggggaattagtaccgccccgcgagcgtgcccgttttcagggctatttttcctcactttttgcggtggccagtattggggggccagtgttaggtggtgtattggtaacctacctttcttggcaatggctgttttggtttaacctgccgcttgtgggcatcgctttgtatcgactggcacgatttcaatttgtgcaaagttcgcgtaagtctgaggcttcaattgatgtggctgggcttatcctgtttcccagtatgatgactctcatcatctattggctttcggctggcgggcactattttccgtggttctcggtcaccagcataagcctagtgagtgcatttgttttaacgagcttgctgtttatcgcccagcaaaagcgagtcacggcttcctttttaccactccgtttattggcgcgtcgtgaaatacatattccgttgctctccacgttcattttcgcggcttgtttgtttgcgctgatcttctttttaccgatttttttacagctcggcttacgagttaacgcagcacaatcgggactactgcttatccccctgtcatgcggcattattggtggcgcctatacgaccggtaaagtgattgctaaaacaggagtgcccaaatttttgcctgtgtttggtatgagtttaagtagctgcgcctttgctgtgttggcgatgttttcactctctgcgcccgtggtgagtgcgattgctgccttatgtggtttaggcttaggcactgtgatgccctcaacccaagttttagttcaaacattggcaggcaaagccaatttagggcggatcaccgcgatggcttcactgagccgctcgttaggggcatcggtcggcaccgctttctttggtacattgatttactccttacttcccggtttatcgccaaacagtggtttgcaggcgattgccgcattgccacaaagtgaaattttgcatgcttttcaaattggctttgcggttgcggcgctgcttgcgttgctaggggcattgaatgcgttgcgcgctccgaaaattcagttggatgattacgcctttgactcttaa

SEQ ID NO: 41124 - DNA, 825 bp, Vibrio cholerae
ttgacagtgaggagtcaacttacccatgattcaaagactagcctagaccaccaaggaaccgtcatgctgagcaacggatacttaaaacgttatgtgcgctgctgcttgctcatcataggattatgtcccgcgctgctgtatgcacaatcctcccccaacgcagaggataaactcgtgcgtattgcatccggcgaatggccaccttttatcggcagtgatttacctaactatggttttgttggtgaaatcatcacccaagcttttaccaagcaaggttatcaagtggaattccagtttttaccatgggcaagagcttatgctgaaacccaacgcggtttgtacgatgccactgcgatctggatgcacagcgcggagcgtgaaatcgattttttctatagcttgccagtgagccaagaagagtttgttttcttttatcccgttaaaaagccatttgattggaaaaccttaagcgatttagccccttataagttaggcggcgtactggcctacagctatggtaaagagttggatgccctactcgactctggcgtactgacgatggaacgcgatggcttagcggcaaaaaatctcgaaaaactcgctaaaggccgagtcgatctggtaccagaggaaaaacatattggctactacctcatcaaccaacaaattccacatttgcaagatttgatcacccaccaccccacaccttttctcactaacagtaattatctgctgtttcccaagcaaagtgcgcgcagccaagagttattaggcgtgtttaatcattacctcgttcaaacgcaaaagaagaagaaaaaacagtag

SEQ ID NO: 41125 - DNA, 1227 bp, Vibrio cholerae
gtggggctatcttctgccgcttggtttggcgctacttctgatccgcaagcatttagcgcgggaaatgggagcagccgtatgaccctatttgagctatttaaagcagaattaaaagcactcttcaccaaccctgttgtcgtgctgaccgtttttggtggcgtggtgttttattctttcctctacccgctgccttacgccaagcagatcccccgtgaacagaccgtttctgtggtcaatctcgatcaaagtcaggccagttttcaactggagcggatggtggatgccacaccgcaagtcaaaattgttcagcgtgatcacaccattgccgatgccaaacaagctttcttagacaagaaagtggctggcatactggttatccctgagcatttctacaaagacttattgttagggaaaagcccaacgctcgcttatgcgggtgatgcttcctattttctggtttacggtacgattgttgaaggtttagcccaagcgggcggtacactcgcagcacaaaccaaagtcagtcgtttggtcatcgaaggtgaaccgatggcgtttgccgcgcagcatttctcgccaaccagtgccaacctgaaacccacttttaacccacgcatgggttatgtcgattacgtcgtacctgccgtttttgtattgatcctgcagcaaacgctgatcatggcagctggattgatggttgggacacaaaagcaaggccacggctattggagccgagtcgctcctgccaaactgttattagtgcgtagttttgtgctggttgcggtctactacttgctcagtctttattatttcggtgccagttttgatttgcacggcgtgaatactttagcaaagccaaatgatcttattagtttgctcctgccgtttttattagcctgtaattttgtcggtattgcgttaggtgcagtgactccaagacgcgaactggtcactttggtggtgttaattagctccatgccactgatttttaccgctggatttatttggccgttggaaatgatccctgcgcctttagtctggcttgcgcagtgcttcccaagcacgccggcaatccaaggctttctgggtttaaaccaaatggcggccagttggtcaaccatagcaccaaaatggacactcctttgggcacaggctttggtatggggcggtttggcgttttatcttttacgccgagttcgccagcgtaccgctaaacccccacaataa

SEQ ID NO: 41126 - DNA, 714 bp, Vibrio cholerae
atgaaaaatgtgtttggtttagggctcatcatcgccttagcaggctgcgtcaccgtcactgaaacggcgggtaacgcaacgcaaagtgacccaactgagatggcagaggcgcgcattgcccttggtttaggctatttagaaaatggcagcatgatcaaagcacgggaaaatttagaaaaagcactacagcatgcgccggattattaccgctcacaactttcaatggcgcactattatgaggctgttggtgagaatgattctgcgcggaaaatgtaccgcacggcactaagcgagcacccgaaaaacggtaatgtgctgaataacttcggtacctttttgtgtaagcaaggcgagtatgacacggccgatcaatactttcgccgtgcggtcgagcaaccttattactacttaatttcagccagttacgagaacgccggattgtgtgctctcaaagcagggaaaacggacaacgctcgtgaatatttcaaacgtgctatcgatcacgatccaaatcgtcttctgtccattttacagctgactaaaatggagatcgaagccggcgactacacacccgctcgcttacgtttaatggacttgaatcagcgttatggctatcaaaaagcctcactcaaactactgattgaattagaaaaacgcgctgggaattcagcgttagagcaaaaatatcaaaccctattaaattctctctcttaa

SEQ ID NO: 41127 - DNA, 1218 bp, Vibrio cholerae
atgattgaactgcattctccccaatatttaaaagtgacctttgccctcgccttcggctcatttttagttttctgcaatctttatcttttccaacccatgctgccttatttggcgaatcactttgcggtttcggaaacccaaattaactggttgtttgcagcttcaaccttagccttatcgctttgtctcgtgccttgggcggtcacttcggaagccgttgggcgacgcttagtgatgctgaccggcttatttgctatgcctgtgattggcttagccatgctttatgctgagcaattttggtttttagtgctcacccgcgctttaatgggggtggctttagcggcttttgcttcggttgcggtggcgtacatggtggaagagctttctccgcaagcgtttggtaaggcgattggtggctatatcgcggcaaactcattgggcggtattaccggccgcattgctggagggttactcaccgatgcccttggctggcaacatgcggtcgttgcgatggccatttttactctgctcggcgcgcttttggtcgcgtatttgctgcccattcaacagcattttaaaccgcaacgtgggctgtttttccatcacaatcgtgcgttagtcaaacatctgcaaaaccgcacactctggctagctatgttgattggcggtgttaacttcgcactgtttgttaacctctattccgtgatgggatttcgtttagtcgccgaaccctactcactgcccataggtattgcttcactgattttcgtctgttatttagctggaacactgagctcaaagctcaccgccaactggaaccggcgtttctcggcgattcccggcatgatgcttggcgcactcatcagtatggcaggcatgttgattgcgttgattgaagcgatacccgccatgctggtcggcttgattttgattagcttcggcgcctttttcacccatactttggcttacgcttgggtcagtcaaaaagccacacaagccaaagccaccgcgactgcactttacttggttcactattatattggcggtagtttaggcggtttttacctgctgtactgttggcaacacggtggttgggaaatggtcacactcggcgggttggggctttacttcatcttgtttatccttggttggcgcttaagccgacaaaataaacaaacgccacagggcagtcaggctttggccagcccttcggcctaa

SEQ ID NO: 41128 - DNA, 1206 bp, Vibrio cholerae
atgtctgcctcaaccgtgaatacccaacaaacaccgcaaatgagtttgttgctttatattgtgctcggtgcgctcggtgcgttgacaccgctggcgatcgatatgtatttgccagccatgccgaccattgcccgtgatttcggcgttaacgctggtgcggtgcaaattactctaactgcctatacggcaggctttgccattggccaattgctgcatggtccgctggccgatagctttggtcgccgtccggtgatgctgtgcggtatcttcctctttggtattgccgctatggtgagcgcgacgaccaatggtattgaagccttaacctatattcgtgccgcgcaaggttttgcgggtgcggcggcggccgtggtcattcaagcggtggtacgcgatatgtttgaccgcgaagattttgcgcgggcgatgtcgtttgtcactttagtggtgaccttggctcctttggttgcgcctatgattggcgggcacttagcgatttggtttggctggcgttctatcttctgggtgctggcgctgtttgcggcactcgttatcgcgatggtgatgtggaaaatccccgaaacgctgagccctgaaaatcgtcagccgctgcgttttcgtagcaccatgcgcaactattttgatttgtgtaaaaaccctgtagctatggggctgattttctctggcgcattttcgtttgcgggtatgttcgcgtttttgacagccggcgcgtttgtgtacatcgatatttatggtgttagcccagacggtttcggatacctgtttggccttaatattgtcgcgatgattgcgctgaccacgatcaacggccgttttgtcaaaaaaatcggctcacacaacatgctacgcttcgcactctttttacagttgatggcggggattggtctgtttgttagctgggttctggattggggattatggggaaccgtgccattcgtggtgttgtttgtcggtacaatctcaaccattggcagtaactcgatggggttgttgctgagtaaatacccgcgtatggcgggaaccgcatcatcattagcgggcacattgcgttttggtacgggctcaatcattggcgctgtcgtggcagcgttgccgggtactgaaacatggccaatgatatttgtgatggcggcttgttctgtgttatcaggtgccttttactggacgttaggaagaaaagcgtaa

SEQ ID NO: 41129 - DNA, 696 bp, Vibrio cholerae
atgcgtttagacaaattcctgtgtgatgcgctaggtacaacgcgcaaagaggccactcaacttctcaaaagtggtgaagtgaccgtcgatgatgtggtgcaaaaaagtggtgcattcaaactcaaagagacgtcgtgcgttgagtggcaaggccgtgaaattacgttgcatggtccgcgttacatcatgatgcacaaaccggatggtgtggtctgctcgcatgaggatggttttaaccaaacggcgcttaccttgcttgatgaagttaatattcaagatctgcactttgcaggccgcttggatgtcgataccacaggtttactactgatcactgatgatgggcaatggtcgcaccgagtcacgtcaccaaaacacaagtgcgagaagacctaccgcgtgtggttggctgatcccattcaagctgattacgcagagcaatttaaccgaggtattgaattgcgtggtgaacgtgagctgactttgcccgcgcaactggaggtgatcagtgaaacggaagtgctattgaccatccatgaaggcaagtatcaccaagtgaagcgtatgtttgccgctttaggtaacaaagtcatagggttacatcgtgagcgcattggtcagattaccttagatgaaacccttgaaccgggggaataccgctatttgacggaagaagaagtggcctcaatctggaaataa

SEQ ID NO: 41130 - DNA, 1389 bp, Vibrio cholerae
ttgggtatcagttgcatgccaattaaatctcgggcgttacgtcatctcagcctaaaaacccgcttgctccttgctgcggcactatggctgggcgcgatgatcttggccgccggctatttgatcccaaatctcatccatcaatatttgctggaagatgtgcaaaaccagttgcaactgtcgatggatgagatcaccgccaacttggaagccaatccacaaggacaattaaccctcaccactcgacttgcggatccccgttttacccagccttatagtggcctttactggtcagccactttaggcgatcaaacgcttcgctcacgctcgttgtgggatcgctttttgaccgaagaaacccatgttcacggtacgatttatcttggcgcgaaagaggaatcgttaattgtattaaagcgtacggtttatctgcccgaattttcacaacccatcacaatcacgataggcttagatgatgccccgctaaaagccacgctacagcgcgtgagcaaagagttgtggatgattttggctctattgttcagcgggatactcgttttaactggcgtacaagtgacgtggtcactccgcccactttcgaaaatgcagcgcgaactctcagccttgcgagatggccagcaaaatgcgttgaatggcgattacccacaagagatttcaccgctagtcaatgatctcaacgctctcctctttcattaccaagagctgcttgagcgagccagacaccatgcggggaacttatcccacgcattaaaaacaccactttctgtgctcaaaaacgaagtcactcagttgaatgatgcccagctcagaatccagttacagccttctgttgagcagatccagcagcaaattgactaccatctagggcgtgctcgtatggcgggttccgccaatattctttcggttaaaaccgcacccagtgcgcgagtcgatgctatttcacaagcatttgataaggtttacgctgaacgtggaatcaccttggtgaatgagctggattcggacttagaagtggccgttgaaccgactgacctagatgaaatgatcggtaaccttctggaaaacagctacaaatgggccaacagcttaattcgtgtacacagccaaatactgagtgacgattgggtacagatctgcgtggaagacgatggcgcaggcatcagtgcaacgaaccgcgaaaaagccctcaaacgcggagtgcgcttggatgaaaccacgcccggcactgggcttgggcttaatattgtgagtgaaatggcgcacagttatcgtggagcattggctttaggagagagtcagttaggcggcttaaaagccactctgaccttaaaacaacccactcgcgcagccaaagccgtcaaatcccattaa

SEQ ID NO: 41131 - DNA, 279 bp, Vibrio cholerae
atgaaattcgaagcagtattacgtactgatctaggtaaaggtgcgagccgccgcctacgtaacactggttacttcccagcgatcgtttacggtggtgaagcagctccagtttctatctcactgaaccacgatgacgtgatgaaccagatggacaagcctgagttttacgaagctatcgttctggttatcgacggccaagaagtgaaagtgaagcctcaagacgttcaacgccacgcgtacaagccaaaagttgagcacatggacttcatccgtatctaa

SEQ ID NO: 41132 - DNA, 774 bp, Vibrio cholerae
atgcatattattcctgtggcgtcagatcccaaaacttgttcatgtggtgtgaatgaaaattcgctagattttgattttactatggcatttcaacctatagtaaattgcagaacgaaagaaatatttggctatgaagctttagtgcgaggtttaaataacgaatcggcttattcggttatttcaagagttaatgaagataatcgctatttatttgatcaaatgtgtagagttaaagcgattgctcttgccgccaagttaggactgaccagtaaattaagtataaactttctccccaacgctatttatgtgccagagcgttgtattcgtactacgttagaggccgcgaaacgttaccagtttccgatcgaaaatattatgttcgaatttaccgaggctgagcgggtagaagatgttaatcacataaaaaggattgtcgaatactataaatctttgggttttcaaacagcaattgatgattttggttctggctattcagggttaaatttattggctgattttcaaaccaatattgtaaaagtggatatggggttgataagaaatatccatgccgatcaggttcgtcagtcgatcatgaaaaactgtttaaagctgtttagtgatttaaatattcaaccgctggctgaaggtgtggagagtcatgctgagtttgcttggttaaaagcggcaggcgttgagttaatgcaaggctattattttgcaaagcccggctttgagagcctaccaagtgtcaatcctgagttcagcgaagcgtga

SEQ ID NO: 41133 - DNA, 3441 bp, Vibrio cholerae
atgccttactggggtgggacaggtcaggagccgatagggattgagcatgattttgcctcagggatagccaaagagctcgggatcaacattgagtacaaaggctttgataccattgaagccttacttaacgccgtcagcacgggtaaagcggatatggcgatagggtttgggcaaacccttgcgcgtgaaggaaagttcctattttctaagcctttatatgagaatgtacgcgttatttggttacgcgataaagccatggaagaaaaaccctttgccagtttaaaatgggtctgtattcaaggcacatcctattgtgaaattctcaaagatcgtggttatcccaatattattatggctcgtaactacagcagctctgtggaaatgattcgtcaagggattgcggatgcgacggtgacaaattatgtgtccttaaatcactatttaagccaaaagcgtttagcattgggtaaagtgatttttgatccagacttgggcgtacaaacaaaccgtatattgatcaataacaatgagcctttgttattgtcagcaatcaataaagttattgacgctgacaaacagggactgacggagaataaattaaattcggcagatgtttatttcctaaatgatcaagcgaatttaaatattttacgaaatgaaaatgttaatccagtcgttcgctatacaattcaagacgatttatttccgatgtcatattgggatgaaaaagagaaaaaatacaaaggttatgtacatgatttattagaaagaatcagtactaagagtattcttaaattcgagtttgttcctgcctacggccgagatgtagaagatatgctgcgtcatggcaaagtggatcttatccctagttttaatatgacttatgtcgatgaccgatatttcatccatacaggcagatacacggatatccaatttggctatatagaaacaactcggccttataccaccccaattactggcattcttgatcgcacaggcaagtttaacgcttatattgcggtacaaaagaatttatctgatgtgaaagtataccgcagcatgtatgaccttgagcaagcgttagagaagggggatattacgcatgggcttcttaataaagtactgattaatcagatgttgttggatggtcatcaagacgctttcaaactctccccattgaccgaggggcaagatcttcgagccgatatgacgatgcttgtacgtaaagatgcccgaggtttacaaaacatgctgcaaaaggtgttagccaccttcagccaacaagagattgatgaaatcaaaggtgcctatgaccgcgtcacagtctattttggctatgacaaacagaaagtcctgatatatgccttaatcatattgtgtgctttattaagtatcggacttatcctcaccttatcgctcagtcgtttacgcggtaaattacgcagctccgaacaagttgccaagttatctactgagcagctacgttggttgacggaattactggacgccattccgagcatgatatttatttcggatgcaaaaggtgaggttgtgttaaccaatgcggcttatcggaaaatttatcacacctgctgtgaaaaagggtgtgttcaaccgcagcctgagtgttcatttcttgcgcttccagaccaacatgaagcggaattctcgatcattattcaagctccaaaatctaattgctctatcggcgaacactattttcatgtgacacgccgtgccatttctcacccgattaatcaacgtaagtactatttaacgctgttcaacgatattacggaattaaaagaaactgagcaggctttgcgtcaatccaatgagcaagcgttacaggcggtagaagcgcgaaatcatttcttggcagtcgtcagtcatgagttacgtaccccgattgcggcgatgctgggactgatggagattttggcttcacgtttaaaaagcagcgaaagccaactgctgttgaccaatgcgataagctcggcagagcgtttgaaattacacgttaacgatattttggatttctcaaagatagaggcgcagcagttacagctggatattgggctgtacaatttagccgatgaacttgggccgttattgcgtggatttgaagccagtgcccagctcaaagagattgagtttgatgtgatttggtcgccgaattcgttactgcttgcgaacttcgatgccttgcgttttaaccagatcgtgaccaatcttctttctaatgcgatcaaatttactgaccaaggacgagtggtttttaaaatcgacgttgcccctgagatgttaactatcgtggtcgaagataccggttgcggtatgactcaaacgcaaatcgagtcgctgtttgttccttttgcacaagctgacagcacaatcactcgtcgctttggtggaacaggcttaggtatgtcgattgtcgccaacctgattgaactgatgaatggcaagattgaggtgaagagtgagtttgagcaagggacgcaaatccaagtgaacttgcctcttgtgacgcaaacttgtgatgagtttcgtgggcaagtcgttgctatgtcttatcgctccccttatatgctgtgggcaaaagcgctgggaatgcgagtggaagagaatgaagagtgggtcgagcagagtggccacaatatttatccagatttgctgctcaataggctcagagaggtctccaatctgactcaggctcaaactgagcctgcccattctcgtttgctacaaggtcacgtattagtggccgatgatgatgcgattaaccgtttattgatcaaaaaacagctcagtgagcttggtttgagtgccaccttggtgagtgatggattgcaagctttcgaaaagctctcgcaacatcctgagcagtatgatttgttgattactgactgccatatgccacatcttgatgggtttgctttaacgcgaaaagtgaagcaagagatatccctatttaaaggcgcagttgtgggttgtactgcagaagattcgcgcctagcagcggaacaagctctgcaagcgggtatggataaggtgatttacaaaccttataccttagccaatttgcgcaaagtactcagtcgttatctcacaacacaatgggtcgcactgcctgaacaatcttggcttgacgcttaccaagaagaggaacgcgaggagatggcaatggtagtggctgagtcacttgctcaagatatcgctttactcaatcagccagactgtgatgtcaaagcactggcacatcgaatcaaaggggcagccggctcccttcaactacagcggttagccgatttggctaaaaccgttgagaaacaaaacgatccacaacaacttgtggccgataagcagcaactgatcaatgccatgcatgaagtggtcgagcaggcacaacagtggcttcatcagtatcagagcgaataa

SEQ ID NO: 41134 - DNA, 1254 bp, Vibrio cholerae
gtgaaagactctcaggaagtgacccattttagtgctgcccgttcctcaaaatggactcaacatgatacctattggttactaagcctatttggtacagcagtaggtgcagggattttatttttaccgatcaatattggcttagggggattctggccgctggtgctgatggcagtattagcctttcctatgacctatctgtcccaccgtggactggcgcgttttgtactttcatcacgtcgcccaaatgccgattttactgatgtggtcgaagagcactttggccaaaatgctggacgattgatttccctactctattttttatcgatttttcctattctgcttatctacggtgttggccttaccaacacagtcgatagtttcttggttaaccaagcggacatggtatcgccgccacgcgcactactttctggtgctttagtgtttgggcttatcgctatcatgctcagtggcgagaaaatcatgctgcgcgcttttgccatcatggtttatccgctggcggcgatccttgccctactctcgctgtatttgatcccttactggtcaatgccttcgtttgattttccgcaaaccagcgattttctgcacactgtatggctggccgtaccggtagtggtgttctcattcagccatgctgcggccatttcaagttttgccaatatccagcgtcgtcattatggtgaacaagctgatcaaaagtctgagcagattctgcgccacactagcgtggtcttaattttgtttgtgttgttgtttgtcttctcttgtgtacttgccctttcgccacaagcactgcaagaagccaaagcacaaaacatttcggtgctgacttatctggccaatgtcactgacaacccatttatcgcgacgctcgggcctctggtcgccttcatcgccatcacctcttccttcctcggccacttcttaggggcgcgtgaaagtttatctggcctactgaccaaaaacttaggggtatcactacgtttggcggaacgtctcaccatcggctttttatttgtcaccatctggatcgctgcaatcctcaacccaagcattttgggcatgatggaagcgctttctggtccagtcatcgcaatgattctattcataatgccgatgattgccgtcttcaaagtgcccgccctgcgtgaacatcaaaaacgtttcagcactttcttcgtgttactggttggattgctcgccgtttctgctctgctctacagtttacttcgctaa

SEQ ID NO: 41135 - DNA, 789 bp, Vibrio cholerae
atgagtgcgctgttagaagtcaccaatctgcacaaagactttgtcactcgctcaggctttttacgcaaacagatccaacatgcggtaaagccagtcagctttactcttgaagcaggacaaaccattggttttattggtcaaaatggctcaggaaaatctaccctcgctcgcatgttagcggggatggttgcaccgaccggtggcgagatccgcgtcaacggggagttgttagaacacaaagactactcgacgcgctgtaaattgatccggatgattttccaagacccgaatacctcgctcaatccacgtttacagatcggaacaattctggaagggccgctgaaacgaaataccagcatgacacctgaagcgcgaatgcgccgcgtaaaagatacgttgcaacgtgtcggtttactgccagagcatgcttacttctatccgcagatgctggcgactggacaaaaacagcgtgtctgcttggctcgtgcgctcatcttacagccttccatcattattgccgatgaggcgttgaacggtctggatatggcgatgcgctcgcaaatcctcaatctgtttttggaactgcaagaagagatgggcgtctcctttgtgtatgtatcccagcatatcggagtgatcaagcacatcactgacaaaatcatcgtcatgcatgaaggagacgtggtggaatcgggggaaactcacgaagtgttggcggatcctcagcatcccatcacccaacgcatgattgagagccactttaccaaggctcccacctttaagtattga

SEQ ID NO: 41136 - DNA, 906 bp, Vibrio cholerae
atgattttagtcgttggtcataaaaacccagacagtgacagtatttgtagcgcattagtggcggctgagcttttaaaagcgcgtggtttagaagcgaaggcggtacgccaaggtgaaatcaaccgtgaaacgcaacatattctgaatgtggcaggcgttgagcaaccagaattacgtaccagtgtggcgggcgaacaagtgtggttggtggattacaccgatttagcgcaagcaccggatgatctcaatcaagccgaaattcttgggattgtcgatcaccatcgtcttggtgatgtgatgacagtgaatccactggaagcgtggatttggcctgtcggttgtaccagcactattttgttcaatctgttcaaaatggaaaatgcagaaatcacacgcccactcgcgttactgatgatctctgccattttgtctgacacggttggctttgcctcaccaacctgcacgcaaaaagatcgtgatgcggtggctgagttagcggtattagcgggcattaccgatctggaaggctttatcaaagcgctactgattgcgaaaactgacattgaaggcttaagtgcggcgcagctggtcgaaaaagatcttaaagcttacccattcaatggacgtgagttggtggttggtcaggttgaactggctacgctagagcaagtcgcggatatgattgatgccttggaggcagatctgcaacgtcgttgtgatgaggaatcattggcgcttgcagcactgatgctgaccgacatcactaccgcgcaaactcgtctgctgtttaaaggagaatggtcagaaaaactggctaagcatgcaaaagacggcgtactgatgatggaaaacaccctaagtcgtaagaagcaaggttggccttggctacaaacggaactggcttga

SEQ ID NO: 41137 - DNA, 831 bp, Vibrio cholerae
atgaaaagagttgtcgtgataggtgcaggatggctaggtttgccactggcacaatggcttaagcaacaaggccatattgtgtatgcgacacgcactaccccacaggctgttcaaactcttgaagatcaaggtattgagagttttgtttgccaattagatcaacccgatggcttaagcgatgctttgcttgagcggcaatgcgataccgtcattggctgctttcctcccggttttcgtcaaggcgctggcgagcactatgccaaacattggcaaaacttggtgcagcatgccaaacaggccaatattcaaaaactggtgatgatcagttcaacctctgtgtatcccgatatcgccaaagcgatgaatgaacaagacgcctctttggcattggcactggataattccgcttttgatgcgaaagcgcgcatcttactcaaagccgaacagtatgtgatcacctcaggtatggattacaccattctgcgttgcagtggcctgatggggcctaaacgccacccatcacgctttgtcagcaaaatggcacaagtcagccgactcgcgccagccaatatgctgcatctgtatgacgcgattggtatcgctcatttttcgctagagcagctcccctactcgattatcaacgccacaacccccaacacggtcagtaaagcggagttttatcaggccgcactcgacgcagtagcaagcgacctgcctctgccaccgctgtgtgataaagaggagaaacggattgtgtgcgacaaattattggcagctggttaccgttttcatttctctcacaccttagaggctgtgcacggttatgagtaa

SEQ ID NO: 41138 - DNA, 546 bp, Vibrio cholerae
atgaaacaactgctcgactttattccactgatcatttttttcgctttatataagttttatgacatctacgtagcaacaggggcgctgatcgccgccacaacggttcaagtgattgtcacttatgctatgtacaaaaaagtggagaaaatgcagctcatcacattcgtgatggttgctctgtttggtggcatgaccttagccctgcatgacgataacttcatcaaatggaaagtgacgattgtgtatgtggtttttgcgctcggtctaaccatcagccagatcatgggtaagcctgcgatcaaagggatgctcggtaaagagctcaccttgccggatgcggtatggtcaaccattaactgggcatgggtgatgtttttcagcggctgcgctgcactcaatctttatgttgcctaccacctaccgcttgatgtctgggtcaatttcaaggtatttggtctgttggcggcaaccttagtgtttactctgctcacgggaggctacatctacaaacaccttccccatgaacccaaacagaaaaaccaataa

SEQ ID NO: 41139 - DNA, 441 bp, Vibrio cholerae
ttgtttgctgtggatccccaaatgaatcaaaccgtaaattcacctaaaggccagcttctgctgcgcacactcgcaatgcctgccgatacgaatgcaaatggcgatatttttggcggctggatcatgtctcaactcgacttagcgggcggtattctcgctaaagagatctcctgtggacgcatcgtgactgtttctgtttccagtatcacttttaaaaaacctgtcaaagtcggtgacgtggtatgttgctacggcgaatgcaccaagattggccgcacatcgatgtcgatcaatctcgaagtgtgggttaagccggtcaaagaagagggggtcggcgaacgttttcaagtgtgtgaagccacctttaactatgtggcgattgatgcaaatggccgccccagagcaataagcctcagcaatggatcacagaaatcatcttga

SEQ ID NO: 41140 - DNA, 2370 bp, Vibrio cholerae
atgcacagcgaagttacccctatccaccactacaaaaaatactgggccgagtgtttcggcacagcgccattcttaccgaccagtcgtgaagaaatggatcaattaggctgggatagctgtgatgtgattatcgtgaccggcgatgcttatgttgatcacccaagctttggtatggcaatcatcggccgcttacttgaagcacaaggtttccgagttgggatcattgcgcagccagaatggcaaactaaagacgcctttatgacgcttggcaaaccgaacctgtttttcggtgtaaccgccggtaacatggactcaatgatcaaccgctacacggcggataaaaaaattcgtcacgacgatgcgtacaccccaaacaataaaggcggcatgcgtcctgatcgctgttcattggtttactcacaacgttgtcgtgaagcctacaaagatgtgccgattgtgcttggtggtattgaagccagcctgcgtcgtgtcgcgcattacgattactggtcagacaaagttcgccgctctatcctgctggatgccaaagccgatattttgctattcggtaacgccgagcgcgcactggttgaagtagctcaccgtttagccaatggcgaatcaattaataagatggttgatattcgcggtacggctgtcaatttggctcaagtacctgaacattttaagattatcgattccacccgcattgatcagccaaacaaaccgtttgtgccaagcaatccgtatgaagtggaaacccagtgcgcgaccaaaggtgatgagaaagaagaagctcaacctatcaccattcgcccatcacgccatgatgcgaaaaccaccgcggtgcgtctgccttcatttgaaaagctggttaatgaccgtattttgtacgcgcacgccagccgtgtgttgcatttagaaaccaacccttattcaggccgtgcgctggtgcagcgtcatggtgaccgtgaactgtgggttaaccaagcaccgatcccgctcacgactgaagagatggatttcgtgtttggcctttactacgcccgtgtaccgcaccctaaatatggcgatgcgaaaattccggcgtatgacatgatcaaaacctcggtcaacatcatgcgtggctgttttggtggctgttcattctgttctatcactgagcacgaaggacgcatcatccagaaccgttcacaagagtcgatcatcaatgaactgaaagaaatccgtgacaaagtgccgggcttcaccggtgtgatttcggacttgggtggcccgacagcgaacatgtaccgcctcggctgttcagatccgaaagcggaagcgaactgtcgtcgcccaagctgtgtgttcccgggtatctgtcataagctgaataccgaccataaacacactatcgatctgtatcgtgcagcgcgtgatgtggatggcattaagaaagtagtgatcgcttctggcgtacgttacgacttggcgattgaatcacctgagtacgtgcgtgaactggtgacccaccacgtcggcggctatttgaagattgctcctgagcatacggaaaaaggcccactgagcatgatgatgaaaccaggcatgggtacttatgatcgctttaaagagttgtttgaaaaatacagcgctgaagcgggcaaaaaacagtatctgatcccttacttcattgccgctcacccggggactgaagatgaagacatggtcaacctcgcgctgtggctaaaatccaacaactaccgttgtgaccaagtacagaacttctacccatcgccaatgtgtaatgctactgcgatgtatcacgcagaagtgaacccgctgaaacgcgtgaaatacaagaaaccggaaaaggtgccagtggcgaaaggtgaagctcaacgtcgcttgcataaagccctgctgcgctaccatgatcctgccaactggccgatgattcgtgaagcactgattgcgatgggcaaacgtcatctgattggtgatcgccctgagtgtctgatcccagaaaaagattcagacctagtcaccccagcacaaagccgcaaatcaggtcgtcatggcgcgaatcgttttgcgaccaagcatacgcatagccaaccgggctttgatgcgctgcgtggtaacaaatctggcgggcaaggtcgtccgaacagcggtaataaatccaatcagggcaaacctgccggcagtaaaccgacaggcagtaagccaacggcgaacaagcctgcgggcaaccaatctgctcgcagtgaacaaaaccgaggccaacaaggtcaacggggttcagcgacaggcggtaaaccacaaggctctggtcgtcctgccagccgtggtaatactcaacgtcagccgcaacgcgcacgttaa

SEQ ID NO: 41141 - DNA, 1011 bp, Vibrio cholerae
atggctacgattaaagatgtggcgcgccttgcgggcgtgtcaaccactaccgtttctcacgtcatcaataaaactcgctttgtggcagaaaccacccaagagaaagtgatggaagccgttaagcagctgaactacgcgccaagtgccgtggcacgcagcttaaagtgcaataccactcgcacgattggtatgttagtgacgcaatctactaacctgtttttctcggaagttatcgacggtgtggaaagctactgttaccgtcaaggctatacgctgatcctatgtaacacaggcggcatctatgaaaagcaacgcgattatatccgcatgctggccgaaaaacgggttgatggcattttggtgatgtgctcagacctgacccaagagctgcaagatatgttggatgcacacaaagatattccaaaagtggttatggattggggtccagaaacgtcgcacgccgataaaatcatcgataactccgaagaaggcggctacctcgcgaccaaatatctcaccgaccgcggtcacactgagattgcatgtttgagtggtcacttcgtcaaagccgcatgccaagagcgcattcaaggtttccgtcgcgcgatggcggaggccaagttgaccgtcaatgaagattggatcttggaaggtaactttgagtgtgatactgccgttttagcggcggataaaatcattgcgatggacaagcgccccacggcggtattctgtttcaacgatacgatggcattaggtttgatgagccgtttgcaacagaaaggcatacgtattccagaagatatgtctgtcatcggttacgataatatcgagttagcagaatacttctctccaccactgaccacagtgcaccaacctaagcgtcgtgtgggtaagaacgcgtttgaaattttgctagaacgcattaaagacaaagaacacgagcgccgaattttcgaaatgcacccagagatcgtagagcgcgacacggtgaaagacttgacaaaatcctaa

SEQ ID NO: 41142 - DNA, 2631 bp, Vibrio cholerae
atgggtaaatcactcgttatcgtcgagtcgccagccaaggctaaaaccatcaataagtaccttggtaaagactttatcgtgaaatccagtgtgggacacgtgcgtgatctgcctacagcagggcaaacggccacaccgaccggtaaagcggcggcagcatcgactaagaaagcatctactactgataaagagcagcagaagcgtgaaaaagaacgcgcagcgctgatcaaaaagatgggtgtcgatccgtatcacggctggcaagccaattaccaaattctgcccggtaaagagaaagtggtggctgagctgcaaaagctcgcgaaagacgctgacagcgtttatctcgcaaccgacttggaccgcgagggagaagccatcgcttggcaccttcgtgagatcatcggtggcgatgaaaagcgatataaacgagtggtatttaacgaaatcaccaaaaacgccattcagcaggcttttaagcagcctggtgaactgaatatggatggcgttaacgctcaacaagcacgtcgtttcatggaccgcgtggtgggctttatggtctcgccactgctgtggaaaaaagtggcgcgaggcctttccgctggtcgtgtacagtctgtcgccgtgaaacttctggttgagcgtgaacgcgaaatcaaagcatttgttccggaagaattttgggacatcaatgccgataccttgaccgcagacaagcaagattttcgcctgttggtagcccaaaaagacggtttagctttcaagcccgtgaacgaaacggaagccttggcggcggttgctgcgctcaataaagcgcagtacgaagtgtgcaaacgcgaagacaaaccgaccaccagtaaaccgagtgcgcctttcattacgtcaaccctgcagcaagccgcgagtactcgccttggttatggggtgaaaaagaccatgatgctcgctcagcgtttgtatgaagcgggttacatcacctatatgcgtaccgactcaaccaacttgagtgcggaagcggtcgagaatctgcgtggttacatcaccaagcattacggtgaggcgtatttgccaagccagccaaatgtgtatggcagcaagcaaaatgcccaagaggcgcacgaagcgattcgtccttcggatgtgacggtcaccgccgacgatctggaaggaatggaagcggatgcacacaagctgtatgccctgatttggaatcagtttgtggcttgtcaaatgacacctgcgcaatacgattccacgacagtcagtgtaaaagcggcagagtacaccctgaaagcgaaaggtcgtatcctcaagtttgatggttggactcgcgtacagcgcccgttgggtaaaaacgaagatcagatcctgcctccggtgaaggtcggtgatagcctaaagctcgtcagcctagatccgaaacagcattttaccaaaccgccagcgcgttacacggaagcggcattggtgaaagagttagaaaagcgtggtattggtcgcccatcgacgtatgcatcgatcatttccaccattcaagaccgtggctatgtgaaagtcgatcagcgccgtttcttcgcggaaaaaatgggtgaaattgtcaccgatcgtcttgatgagaattttgacgacttgatgaactacgactttaccgcgcgtatggaagagaaactcgaccaaatcgccgaaggtgaagtgaactggaccgcagtactggatgagttctttgctgatttcagtcgcgacctagaaacggcggagcaagatgaaagcttaggtggcatgaagcctaatcacatcgtgatgaccaatattttgtgtccgacctgttcgcgtccgatggggatccgcacggcatcgacaggggtgtttttaggctgttctggctatggattaccgccgaaagagcgctgcaaaaccaccatcaacttaggtgacgaagaaggggtgatcaacgttctcgaagaggatgtcgaaaccgcagcactgcgtgctaagaagcgttgcccaatttgtgaaacggcgatggatgcgtatctgattgacgataagcgtaagctgcatgtttgtggtaacaatccgaactgtgaaggctttatcgttgaagaaggcgagttcaaagtcaaaggctatgaaggcccaaccgtcgagtgtgataaatgtggctcagacatggtgctgaaaaatggccgctttggtaagtacatgggttgtaccaacgatgcttgtaaaaatacgcgtaagatcctgaaaaatggcgaagttgcgccaccgaaagaagagccagtgcatttccctgaactgccttgtgaaaattcggatgcgtattttgtgctgcgtgatggtgcatctggcttgttctttgcggcgagcaatttccctaaatcgcgtgaaacgcgcgcgcctttggtggaagagttgaaacgttttgctgagcgtttgccagaaaaataccagtatctgacttctgcacccgcacatgaccctgatggcttacctgctgtggtgcgcttctctcgtaaagagaaagagcattacgtgcggaccgagacagagggtaaaccttccggttggatggcggtttaccaagagggtaaatggttggtcacggataaacgcaaaaacgcgaaataa

SEQ ID NO: 41143 - DNA, 219 bp, Vibrio cholerae
atggctaaagaagacgtaattgagatgcaaggcactgtccttgatactcttcctaacacaatgttccgtgtagagcttgaaaatggtcacgtagtgacagctcacatctctggaaaaatgcgcaaaaactacatccgcattctgactggtgacaaagtcactgtagagatgactccttacgatttgtctaaaggtcgcatcgtcttccgtgctcgttaa

SEQ ID NO: 41144 - DNA, 675 bp, Vibrio cholerae
atgtggcgagagtatatttcaaacagttgtttgatacgagtgattgaaatggcattacgcagtagtactaaggaaaaaatattggatgtagcagaagggctgtttgcggaatacggcttcaatgatacctctttgcgcacgatcaccagtaaagcgggggtgaaccttgcgtcggtcaactaccattttggtgacaaaaaaaccttagttcgagcggtactcaatcgttatctcgaagctttcatgccggagatgaaacagtcgcttgagcggcttaacgagcgggacgattacgatatggctgaagtttttgaagcgctacgtgctcccttgcgttcgttaagcgaattgcgccccaatggcaccagccgttttatgctgctgattggccggggttataccgatgtgcagggccatctccgttggtttattaccaatcgctataatgatgtgctaaccctatttaccgattccgtgcttaaggcgaaccccaacttgactcgcgaaaccttgttttggcggttgcatttcaccttaggtacctgcgtctttaccatggcgtcgagtcaagcgttggcagagattgcagaaaatgattttggaagcaaagttgatcctaagtctgtggtcgatcaactgattccatacctcgcggccggtgtggcggcgaaataa

SEQ ID NO: 41145 - DNA, 1467 bp, Vibrio cholerae
atgaggagtcttgccatgttaccgaccgattttccattttttcaccaaagcgcctttattaatgggcagtggattttaggtgagccacaggcaaggcaaacggtaaccaatccgtttgatggctccctcattggctctgttcctttattgagtgcggctcaggtgcaagaagcgattgccggtgcgcaagcggcgcaaattttatggtgccagcaacccgctgaaaataaagcaaaaattttgcgccgttggtatgagcttattgaacagcatcatgaatcattggcgaagttattaactattgaacaaggtaaaccgctggcagaagccagaggagaaattcactacgccgccagttttgttgaatggtatgccgaagaggccaaacgtgcatatggcgagctgatcccatcccataaacctgatgcgcgaattatggtttcacgtcagcctgttggcgttgttgccgcgattacgccttggaatttccccgccgccatgattacccgtaaatgtgcccctgcctttgcagctggttgcgctgtggttttaaaaccagcgccggatacgccgttcacggctttagctttggccgatcttgcgcagcaagcgggaatccctgatggtttattgcaagtggtgacgggcgatgcgattgaaatcgggcgtgtactgacggaaagcaaaacggtacgcaaactctcatttactggctcaaccggggttggcaagcttttgatggcacaatcggccaataacgtgaaaaaactctcgcttgagctgggaggaaatgcgccgtttattgtgttcgaagatgcggacattaatgccgcgattgatggtgtgatggtggcgaaatttcgtaatgctggacaaacttgcgtgtgcgctaaccggatttatgtgcatgacgcggtatatgatcaatttgctgccaagttggtggatcgggtcagcagactcaacgtcggttatggtttggatgccggtgtaaacatcggtccgctgattaatgatgccgcggttgctaaagtcacatcacatatagtggatgcccaaagcaaaggagcgaaagtgatgtttggtgcgttgcctgaagcgggcagccgtttattccagccacacgtgttaaccgaagtgaccgacgaaatgcgcgttgctgacgaagaaaccttcggccccttggccgcactgtttcgttttagctctgagcaagaagtgatcgagcgagccaatgcgaccgattcgggtttggccgcttattgttatacccaatctttgcgccgggcatggcatatgagtgaagcacttgaagcggggattgtcggcatcaacgaagggttgatttccactacgttagcgccttttggtggcatcaaagagtcgggtcttggtagagaaggggcgaaacacggccttgaagagtaccttgaagtcaaatatacccttatgggtggactagcttag

SEQ ID NO: 41146 - DNA, 879 bp, Vibrio cholerae
gtggtattttcaattgttcgtcactggtcaaattcgctggtcaactggctggcaagtaatgcggttcaacacctattccaactctttatctttttattgattctactggcggcgaagggcggagcgaaagtgactcgcactgtagtacgttctgctgtgaactcgaaaaacatccgtatctctcatttgatgcaggatttctttgtttctatgtccggcaaagtagtgtgggttatcgggattttggtcggcttatcgcagattggtctcaatctcgcgccagtattaaccggttttggtattgcaggggtgatcattggtttcgcgttgcaagatactttgtctaacttcgcagcaggcatgatgttactgatttaccgaccatttgatgtgggggattttgtgcatgcgggaggtgtggatggcaaagtgagccacatgagtttggtcaataccacgattcgtacgttcgataaccagatcattattgtgcccaatagcaaaatttggggggatgtgatcaaaaacgttacccatgaacggatccgacgagtcgatatggtgtttggcattgggtatagcgatgatttgcttaaagcagaagcagtactgaccgatatcgtaaagtcgcatcccgcagtgctaaaaacacctgagccgaatatcaaagtgcatacgcttaacacctcatcgattgactttatcgtgcgtccttgggtgaaaaccgacgattactgggatgtgtattgggatgtcactaaagaagttaagctgcgctttgaccgggaaggtatttctattcctttcccacaacaagatgtgcatttgcatctggtggatcaaaaagcctttatcccacctacacagcccacttcttag

SEQ ID NO: 41147 - DNA, 3069 bp, Vibrio cholerae
gtggtatttatggttagtaaaacaaatgaacaggcgctagaggccgcaatcgaaaaaggtttagcaggtatttgtaaagaagagttagcgctgggtgaagcgcctcttaattacaataatgatctttatcttattggctctccaagtgactttgacaagcagtacgctttagatacccgtttgttttggcaattcctcgaagatactcaagcgagtgagttagaaaaacttaagcgcaccagccctcacgattggcagagaaaaatccttgagcgtttcgatcgtatgatcaagcgccatggtgttttgcgactattgaaaaaagggctagacgttgacgatgcctttctatcgttgatgtacccggcaccactcgccagtagttctgagaaggtaaaaaaagatttttctgccaacctgtttagtgtgactcgccaggtttgttattccaatgcaaatccattggaagaaattgacatggtgctttttatcaatggtatccctctgattacccttgagcttaaaaacccatggacgggccagaacgctgtttatcatggtcaaaagcagtaccgcgatgatagagatgcaaatcagccattgttgaactttgctcgttgcttggttcacatggcggtcgataccgatgaagtctatatgacgactaagctggcaggcaaaaataccttcttcctgccgttcaacaaaggcttcaactttggcaaaggtaacccgattaatccacatgggcacaagacggcctacttgtggcaagaggtattccgcaaagaaagcatcgccaatattattcagcactttattcgtcttgatggcagcagtaaaaagcagttggacaaacgaactttgttcttccctcgatatcaccaaatggatgtcgtacgtcgcttggttgatcactgctcagttaatggtgttgggcaaacgtatttgatacagcactcagcggggtcaggtaaatctaactcaattacatgggcggcgtatcagctcatcgaaacttaccctattagcgatgatctaccaggaagtagaggaaaagaaatgcctctattcgattcggtcatcgttgttactgaccgccgattgctcgataagcagttacgcgacaatataaaagagttctctgaagtgaagaacattgttgcgcctgcgtttaaatcgtcagaactaaagtcagcattagagaatggtaagaaaatcatcattaccaccattcaaaagtttccctatattgtcgatggtattgcagacttaagtgataggcgctttgctgtcatcattgatgaagcacacagttcgcaggatgggcataaccaagataagttaaatgaagcaatggggtttgtttcggaggatgttttagacaaagcattacaaagtgcgaaaaatcgtaagatgcgctcaaatgcatcttactttgcattcaccgcaacgcccaaaaacaccactctagaaaagtttggtcagcgacaagcagacggaacttatgttccttttcatttgtactcgatgaaacaagccatcgaagaagggtttatcctcgatgttattgccaattacacgacctataagagctactacgagattgaaaaatcaatccaagataaccctgagtttgacagcaaaaaagcacagaagcgcttacgagcgtatgtagaggcaagccaagagacgatagacactaaagccgagatcatgcttgagcatttcatcaagcatgtcgttaacggcaagaagctaaaaggtaaaggcaaaggtatggtggtgactcaaaacattgagtcagccatacgttactatcgggcactaaccagacagctcaataaaatgggcaatccgtttaaagttgccattgcattctctggctcaaaagaagtcgatgggattgagtacacagaagctgacattaatggtttcccagaaggtgataccaaagattactttgatgtgaactacaagcgtaaggagccggactctccaatccctaagcacgtagaccaagatgcttaccggttgctggtagtggcgaataagtatttaacaggctttgatcagccgaaactttgtgccatgtacgtggataaaaagttggctagcgttttgtgtgtccaagctctgtcacgcttaaaccgttcagcgccaaagtacggtaagaaaacggaagatctgtttgtgttggatttcttcaactcagtggatgatatcaaaaccgcattcgaccctttctatacatccacaacgctttctgaagcgacagatgtcaatgttcttcatgagctaaaagatgatatggacgacacagatgtttatgagtggtttgaagttgaggagttcaacaagcgtttctttgaaggacgagaggctcaggacctaagcccaatcattgacatcgcagctgcgcgttttaaccacgagttagaactagagaacgagtttaaagtcgatttcaaagtgaaagccaagcagtttgtgaaaatctacggccagattgcatctatcatgccttatgaggtcgttcagtgggaaaaactgttctggttcttgaaatttttgattccgaagctttccgtcgaagacccagataaagaagcactagactcattactagattcagttgatttgagctcttatggattacaaagggttaagcttaaccattccatcgagctagatgactctgaaactgagttagatcctcaaaacccgaacccgcgcggggcttatggtcctgaagctgagaaagatccgttagatgagatcatcaaaatctttaacgaacgctggttccaaggctggagcgcaacaccagaagagcagagagttaagtttgtgaacattgctgagagcatccgaaatcacccagatttcgaagctaaataccaaaacaacgcagaccctcatacgcgagagttagcgtttgaaaagatgttgaaagaaatcatgcttcaacgtcgtaaagacgagttagagctctacaagctgtttgcccaagacccagcttttaaagcgtcttggacgcagagcatgcagcgtatggttgggatgtaa

SEQ ID NO: 41148 - DNA, 2382 bp, Vibrio cholerae
atggaccactcagtacataacaaactcgtttcatttatttggtcgattgccgacgactgtcttcgtgatgtctatgttcgtggtaaataccgcgacgttatcttgcctatggtggtgctacgccgtctggatacgcttttggagccatcaaaagaagcagtactggaagaagtcagattccaaaaagaagagatgaatgaaattgagcttgatgacgcaccattatgcgctacatcaggttatgtgttctacaacacgtccaagtggactctgcaaacgctattcagtacagcgactaacaaccaacagattctgctggctaacttcgaagattacctcaacggttttagcgaaaacgtaaaagagattgttgagtgttttaacctgaaagcccaaatccgtcacatggcagggaaagacgttctgctagatgtggttgagaaattcgtctcgccgtacatcaacttaacgccagcggttaaagaagatcctgagggtaacaaactaccagcactcagcaaccttggtatgggctatgtatttgaagaattgattcgtaagttcaacgaagagaacaacgaagaggcgggggagcactttactccgcgtgaagtgatcgagctgatgacgcaccttgttttcgatccaatcaaagataacttgccactttctatcacagtgtatgacccagcatgtggtagtggcggtatgctgacagaaacgcaaaactttgttgaagagaaatacccagcatcaaaccgtgatatctacctttacggtaaagagatcaacgatgagacttacgctatctgtaagtcagatatgatgatcaaaggtaacaacccagaaaacatccgtgtaggttcaaccctttccactgacgaattctcatctaatcgcttcgatttcatgctctctaacccgccttatggtaagagctgggcgagtgagcaaaagcacatcaaagaaggcaaagaagtcgttgatggtcgctttaaagtgaagttaaaagattactggggtgtagagagcgagcaagaagcgataccacgctcaagtgatggccagttactgttcctgatggaaatggtcaccaaaatgaagtcgccgcaagacagcccattgggttcacgcattgcgtccgttcacaatggttcaagcttgtttaccggtgatgcgggtagtggtgaaagtaatattcgtcgtttcatcatagaaaatgacatgctggatgcgattgttcagttgccaaacaacctgttctacaacacgggtattaccacgtacatctggctgctcaataacaacaaacctgaaaatcgccaaggcaaagtgcagctgattgatgctagcttactgttccgtaagttgcgtaagaacttgggtaataaaaactgcgaattttcgccagagcacattgcggaaattgtctcgacctatcttgagaatcaatctgttgaacgtgctattgatgagaaaggcgatccggtcggtattgccgcgcaagtattcaagaaccaagattttggttactacaaagtcaatattgagcgcccagatcgccgaaatgcccaattccgcgctgacttaattgagccgttacgttttgaaaactcacagcgtgaagtcatggagtacttgtacgccgaatatggcgagcaagtctatgacgcaggttttgttaaagggattgaaaaagagatcaccaagtggtgtgaagaaaatgatatcagcctaaacaaagcggcaaaaaccaagttgctggatacgaaaaactggattaaacaacgcacactggtgaatgtagcgagtcaattacacaaaaagatcggtgacgaagtttacaacgactttaaccagttcaaacaattagtagatgcagaacttacatcactcggccttaagctttcagcaccagaaaagaaagccatcttggatgcggtaagctggtatgacgaaaatgcagaaaaagtcatcaagaaagtcgccaagctaaagcaagataagttagacgaactgctagaaaactacgaatgtgaactgcaagatttgccagatttcgggtactacccaacgggcaaccacaacgagttcgtgacttatgaatcaagttcagacttgcgtgatagcgaatccgttccacttgagcaaagcatttaccaatacttccttgatgaagtaaagccgcatgtagatgaagcttggataaatcttgaatcagtcaagattggttatgagatcagctttaacaagtacttctatcgccataagccactgcgctcaatggatgaggtcgctggtgacattattgcgcttgaacaaaaagcggaaggcttaattgctgacattttgggcatctctgtggctaaggttcaggggtaa

SEQ ID NO: 41149 - DNA, 477 bp, Vibrio cholerae
atgactcatttccctcgccaccgctatctactctcgcaacgagcttatgagcatcgagtactggaagaagcagcagagatccttgaacagcgttatgtgcgcggtgaaacctttgcacgtacggaaaacaccacggaatacttacgctgtaaacttgctggatatgagcacgaaatctttgccgtactgtttttggataaccagcatcggctaattgaatttaaggagctatttcgcggtacggtcgatgccgccagtgtctacccaagagaggtattaaaggaggcactaaacgttaacgcagcagcggtgatctttgcccataaccacccctctggcgatcctgagccttcacaagccgataggcgtattactcagcgcttaaaagacgccttatcactggtagatattcgtgtgctagaccatgtggtcgttggcaaaagcagtgtgtcatttgcagaaaggggctggctatga

SEQ ID NO: 41150 - DNA, 987 bp, Vibrio cholerae
atgaaaaccactgatttattctcgactctagaaaataacattcttcgcaactcgttagattcaaccacgaaagataagttactcagtaacttatctctccttcgcaaagcatcactgaatattctgatcaccggttccacaggctctgggaaaagctccaccataaacgccctatttgacatgacggttgcccaagtcggcatcgatagtgatccgcacacggaatctgttcagtgttaccacttaaataatctcgtgctatgggacactccagggcttggagatgggatcgatgaggataaaaaacacgtacaggccattaaacagcttctcaacaaacgagatgaccatggtcagttggccattgatttagttctggtgatacttgatggcggctctcgcgatctgggaacaccattgagactcatcaatgacattgttatcccgcaattaggcgatgatgccgaaaagcggctcatcgttgcggtgaatcaagccgacgttgcattgaaaggacctgaatcatggaactacagcgacaatctaccaacggacaaggctaaggcatttctggagaaacaacaaaactcgatagcaagacgtatacataaagccacacagataaatgtgaagactctttactttgtggcgggctacagtgatggagtcaatcgccagaggccttacaatctatcaaaactgctttataccattgtcgaaatactaccaaacaataaacgagtaatgctggcaaatcgtaccatttccaatgatgcagataattggaaagataacgatgccagcgattacaataaaaaaaccaccttaagcctttgggaagccattgtagaaacaactttacaaggcgcatctattggctccgatatcggatctattttcggaaaaccaggcgagatcctaggtaaagtcgtaggctctgtcgctggtctatttttcggtggtttacgatatacatttgggttttaa

SEQ ID NO: 41151 - DNA, 1521 bp, Vibrio cholerae
atgatttatgcacaaccgggtagtgacaacgccgttatcaccttcaagagccattacgataatttcattggcggccaatgggttaaacctgtcagtggcgaatactttggtaatatttcacccgtcaatggacaggtttattgccaagtcgctcgctcaacccaagcagatattgatttggcgttagatgccgcacatcaagtgcgtgaagcatgggcaaaaaccagtgtgactgagcgctctaacctgctactgaaaattgctgatcggattgaagcaaacatagagcagcttgcggtagcggaatgctgggagaatggtaaacctgtgcgtgaaactctagcggccgacctccctctggtggttgaccatttccggtattttgcaggctgtattcgtgctcaagaaggcagcgccgctgagctcgatagccacacggccagttaccattttcctgagccaatcggagtggtgggacaaatcattccttggaatttcccaatgctgatggcagcgtggaagttagcgccagcccttgctgcaggctgctgtgtggtactcaaacctgccgagcaaacccctacttcgatcttggtgttgatcgaaaaaatcgccgatctcatcccagcaggcgtgctcaacgtggtcaacggttttggcagtgaagcaggccaagccttggccaccagtcaacgtattgccaaactggcgtttacgggctcaacccaagtgggtcaacacattctcaaatgtgcggcgcagagtttaattccatcaaccgtagagctcggtgggaagtctcctaatatctatttcccagatatttttgaccacgaagacacctatttagagaaatgtatcgaaggtactttgctgggctttttcaaccaaggcgaagtgtgtacttgcccttctcgcgttctggttcatgagtcaatttacgatcgctttgtggccaaagtcgcggagcgggcgaaaggcatcaaacaaggcaatccactggataccgctactcaagtaggggctcaagcatctcaagagcagtttgacaagatcttgagttacttagatattggccgccaggagggcgcaaaagtgctgtttggtggtggcgttgccaaacaggaaggggaactcggtcaaggctactatattcagccgaccctactgcaaggccacaacaagatgcgagtcttccaagaagagatttttggtcctgtgattgccattacctcttttaaagacgaagccgaagcgttggcattggctaacgataccgaatacggcctcggcgcaggtatttggactcgtgaccaaaacctcgcctaccgtatgggaagaaatattcaagcaggcaggatctggatcaactgttaccacgcttaccccgcgcatgcggcctttggtggctataaaaaatcgggtattgggcgtgaaacccacaaaatgatgttgaaccactaccagaacaccaaaaacttactgatcagctacgatgtgaatcctctcggtttcttctaa

SEQ ID NO: 41152 - DNA, 441 bp, Vibrio cholerae
atgatcaccgagctcaccaacatccatttaattaaaggcaatcttcaagcaaatagtaaaaatgaagtttttgcagaattggcgcaaatgttacttgagaataaccgcatcagtaacaaagaggattttttaaacgacattgaaatacgtgaaagattaagtgtcacgtcaatggacggcatcgcctacccacactcaaaaagtaaagccgttacaaaacctgccatcgctgttggtgtaaagcacgaaggcattgaatatggagatgaagaaggcatcaaaccgaccgtattcttcatgattgcctctcccgacaacggcgcagaccaccatatttatgttcttcaagaattattcggaaaatttagcgaagaatttattgaagatattcataacgcaaaaaatgaacatcagatccttaatatttcaattcaatcataa

SEQ ID NO: 41153 - DNA, 1404 bp, Vibrio cholerae
atgagtaccctaaccgctcaagctaccaataatagtagcaatttcaaaaaactcctcagtaccatgaaaggccaccttttatttggcacctcacatatgttgccatttattgttgctggcggcgtattattggcacttgcggtaatggcatccggcaaaggtgccgttcctgccgatggcttattagcggatatttccaatatcggtattaaaggtctggtgctgttcccgattattttgggtggtttcatcggttattccattgcagacaaaccagctcttgcgccagcgatgatctcttctggcatcatggcggatatgggcggcggtttccttggttgtatcgtagcgggcttcatcgccggtggtgtggtattccaacttaagaagatccctctttcggctaacatgactgcgttgggcgcttacttcatctacccacttatcggtacacttatctccgcaggcatcgttttatggggtatcggtgagccaatcaaactgttcatggcgtctatgaacgaattcctagcttctatggctggcgcttctaaagtggtgttaggtgcgattcttggtggtatgacggcattcgatatgggcggtccaatcaacaaggtcgcaacgctattcgctcaaactcaagtggatactcaaccatggctaatgggtggtgtgggcatcgcaatctgtacgcctcctctcggcatggcgctagccacgttcctgttcaagaaaaaattcaccaaacaagaacaagaagcaggtaaagcagcagcaatcatgggttctatcggtatctctgaaggcgctatcccattcgcagcaaatgacccaatgcgcgtgcttccttccatcgttgctggtggtatcgttggctgtgtgtttggcttcctgactaacgttctgcttcatgctccttggggcggtctcatcacagcaccggtatcaagcaacattccaatgtacgttgtaggtatcgcactaggctcactcaccactgcactcatcgttggcttctggaaaccagtcgcggaagaagaagtggaagacgaaatcgcagaagctgcaccaacgcaagctcaagcggctccagcagccggcgaaggcgagtacgatatcgttgctgtcacctgttgcccatctggtgtagcacacactttcatggcagccaaagcacttgagaaagcaggcgcagccgctggcagcaaaatcaaagtcgaaacgcaaggtcaaaatggcattaaaaaccgcatcactgacctagatgtcgcaaacgcgaagctagttatcctcgctcacgatatccaagtgaaagatgctcaccgctttgccaacgcgaaagtcatcgaatgctcgaccaaggaggcgatgaaaaaagccgccgaacttatccaagcttaa

SEQ ID NO: 41154 - DNA, 1866 bp, Vibrio cholerae
gtggatattacccatctgatcgaacctgaaatcatctgtttagatctaaaagccaataacaaagaagatgttctgattgagctggttgagttgctcgataacgcaggaaagttgaccgataagcagcaatttttaaacgacatttggcgacgagaagagatcggaaatacagggtttgaagaaggaatagccattccacacgccaaaagtgctgcggtggcgttgcctgcagtcgtcgtgggtattagccgccaagggatcgattacggtgcagaagatggtcagctttctgatgtgttttttatgctggcatcaccggatggagaagatcatcaccacattgaagtattggcacaaatctccagtaaattgattgaagagggatttgttgaacagctcaaagccgcagaaagtgttgagcaggcactcgccctttttattcacccacagcactcaacattaagctctacacaggtaatggattatgccgattaccagccgctaagcccaatggcacaaagattagctcgcgttaaagagcatctattatttggtacctctcacatgatgccgtttatcgtggcgggtggggtattactctcgctttcagtgatgatgtctggtcacggagcggtgccagaagagggcgtgttggcggatatcgctcaaatgggtattgccggtttaaccctatttacggtggtattgggtggttatatcgcttactcgatggcagataaacccggtttggcccccggcatgattggcacctggattgcgataaaccaatatcaaaccggctttattggcgcgatcatcgtgggtttttttgcaggctttgtggttcgtcagctgaaaagaatcgctctccccgacagcatgagttcgctgggttccatcttcatctatccgctggtggggacgtttgtaacctgtggtgctgtgatgtggttaatcggtgcaccgattgccagcagtatgctgtggctcaatcaatttttggcatcgatggccgattccggcaaagtggtgctcggagcggtattgggggcgatgactgcctttgacatgggcggcccaatcaataaagtcgccacgctgtttgcccaaactcaagtcaacacccaaccttggctaatgggtggggtggggattgccatttgtaccccaccattggggatggcgcttgcgaccttattgtcaccaagtaaattcaaacgggatgaacgtgaagccggaaaagcggcaggcatcatgggtatgattggcattagtgaaggggcgattccgtttgccgccgctgatcccgcgcgcgtactccctgcaattattgcgggtggtattgttggcaacgtgattggttttctctttcaagtgctcaatcatgccccttggggcggttggattgtgctgcccgttgtggacggcaagttagggtatattcttggcactatcgccggtgcattagccacggcactgattgctattgccctgaagaaaacggtgcatgagcaggacaatgagcaggggcagtcacttgctttttcatcggttattggagaagggcaagccgacattcttgccgtcacctcgtgcccttctggcgttgctcatacgtttttagcggctaaatcacttgaaaaagccgcctgtctggcgggagtgaaaatcaaagtagaaacacaaggcgccaacggtatcatcaatcgaatcacggccaaagatgtgcaacgagcgaagctggtgatctttgcgcacgatgtggcgattaaagaaccagaacgcttcaagcacattaaagtcattgacgtgacaacgaaagacgcgattttaaatgccgcggcattggtgcagataaagcgataa

SEQ ID NO: 41155 - DNA, 1902 bp, Vibrio cholerae
atgatcaaccaattgattaatgccgatttaattcagcttgatctgcaagcgaattccaaacaagccgtatttgaagaactgataaatattctacatgcccaagggcgaatttcagataaagcggcattcttaaaagatattcaagctcgtgaagagttaggtaataccggatttgaagatggtgtcgctattccgcatgctaaaagtgcagcggtgactcaaccagctgttgcaattggtgtcagccgagagggtatcgactatggcgcagaagatggtttgccttccaagctttttttcatgatcgcctcccccgatggcggcgataaccaccacattgaagtgctggccgaactctcttccaaactgattgaagaaggttttatcgaggcttttctcaacaccaaaaactcagagcaagcactagaattactgctgaaaaaatccgcgcctacacctcttgcaaaccaagcagaaagcaaagggctgattatcggtgttaccggttgcccggcaggtattgctcacacttaccttgcggctgaagcactggaaaaaggcgcggcggctttgggttttgagatcaaagtggaaaccaatggctcgattggggtgaaaaatagcccaagtgcggaagaaattgaacgcgctgaagcgattgtggtcgcctgtgataaacaagtcgacatggcacgctttgccggcaaacgcctcatcaaaacaaatgtgaaagcgccaattcgtgatgcacaaaagctgattaatgaagcgctaagggcgccaacttatcaagctgaaacggttaaggctcaatcggtggcaaacaaagcctcacaagctcgctcggatttgtatcgctttttgatgaatggcgtttcgcacatgatcccatttgtggtaactggcgggcttttaattgcactggctctcgcggtgggtggtgagccaactgaagcgggtatggccattccagcgggcagtatgtggaaccaaatccttgaagtgggcgtagtggcctttaccttgatgattcccatccttgccggctacatcgcctacgccattgccgatcgccctgcgctctctcccggtttgattggtggctggattgccaataacggctctttttatggtgctgacgcaggtacagggtttatcggtgccatcattgcgggtctcttggtcggttatttcgtgaagtggattacttccattaactatcacaagtttatccaacccctagtgccgatcatgatcgcgccgatcacggcatcgctgttcatcgctggtctgttcattttcgttattggcgctcccattgcgagcctgatggatggcctcactgctctactgactagcatgagttccggcaacgttattctgctcggcatcgtactcggtggcatggcaggctttgatatgggaggcccattcaacaaagtcgctttcctattctctgtaggcatgattgccagcggccaaactcaatttatgggtgcgatggcctgtgcgattcccgttgcaccacttggtatggcactcgcaacagcgatgggtcgtaagctcgaactgtttgagtcttctgagcttgaagcaggtaaagccgcaggcgcaatgggcttagtcggtatctctgaaggcgcgattccttttgcggcgcaagacccaatgtcagtcattccagccaacgtgttgggctctatggttgccgctgtcatggcattctcttttggcatcaccaacagtgtggctcacggtggccccgtagtcgccctgcttggcgcaatgaactacccactgcttgccctactttgtatggcggctggtgcgggtgtcaccgccatcacctgtgtgacgctcaaaaaaatccgctcacaaaagtttgaagccgctgcggcttaa

SEQ ID NO: 41156 - DNA, 1167 bp, Vibrio cholerae
atgaccaaccctatccaaaactacgcatggggcagtaaaaccgctttgcagcagttgtttgaactcgaaaacccaaacgatgacccccaagcagagctatggatgggcgctcatcctaatggctgctccggtatagccattaacggcaaaatcgttcaactttccgactttattgcgcaaaatccaaacttgattttgggtgaatataccgcgcggcagttcggcgaactcccttatttgtttaaaattttggcggcggaaaaagccctctccattcaggtccatccgaacaaacagcaagcggaacgaggtttcgcccaagaggaacaattaggcattgcgctcacggctgctcaacgaaattacaaagaccccaatcacaaacccgaattggtttatgcgctcaccgagtaccaagcaatgaacggctttcgtgccaatcaggaaatccttaactactttattgagttatcgatagatgagatccagcctctcgttaacgtattccaatcaaatccgacagaacaagggctcagagactttttctcagggttactctcattacagggagaagccaaaaaccgtgcgcttgaagctttgatggctcaagctaagcagattgatctgcctcttttccagctgatcgtcgaattggaaaaccaatatcccaatgacattggtttattcgctcctctgatgctcaatgtgattaccttacaaccaggtgaagcgatgtttttagacgcagaaacgccgcacgcgtatttacacggaacaggccttgagattatggccaactccgacaacgtgttgcgcgcgggtttaacaccaaaatacatggatattgatgaattggtggcatgtactcagttcaaacataagccacttgaacaactacgccttaagcctgaagtcattgaagggtgtgaacaatatccgatcccagttgccgattttaaatttgccatcatcccacctacgactcagcagactatcggcgttaagagtgcagaagttgtgctgcctctcgattcttcaatgatattgcgacatgcaaatggtgagcaatgccttgtacgaaaaggacaatctgtctttattccggcttatgctgagcagtacaccattgagtgtaatggtcgtgtggcaagagcttttagcgcctag

SEQ ID NO: 41157 - DNA, 765 bp, Vibrio cholerae
atgttcagtaacttaaagcacgttgtcatgctgatgttactggcaagtgcagcgagctatgcgctcgctgcacccgctccagtatctgacttaggtagcaacgtatccggtggttcgcggagttcagaaattgaacgtctcgaacgtctcctcgaaagccgtaatcttgtgcagttgcaaatgcaaaagcaactcgatgatatggcacttgaagtcaatgaattacggggccagattgaaaaaaacaactatgacatgcagcaaatgttgcagcgtcaaagggagttgtttgtagaacttgaccgtgtgcgtggcgagatgaagtcaccttcctccggagccggccaactaccaacaagcagcaatgatgaggctgcacaaggcaccttcagtagcgacgctaatgaacaggctgcttatcagaatgctgttgatctgatccttaaaaagcgtgactacgcaggtgcgattgccgctttccagaagtttcagactgactaccctaattcgaccttctctgctaatgctcactactggctaggccagctctattttgccaagaaagaagacaaagaagccgcgaaaagttttgcagctgttgtctcggataaaggctctaacaaacgggctgatgcattagttaagttgggcgatattgcgaaacgcaataataacgccgagcaggcacgtaaattttaccagcaagcggtggatgaatatcccgatagtgcttctgctaaaattgccaaagaaaaccttaaataa

SEQ ID NO: 41158 - DNA, 1071 bp, Vibrio cholerae
atgaaagagaataagtccagaaaaagtaatgatgctaaatcgataactatttcgctggcgatgcacggtgctttggtcgcgatattgctctggggagccgatttcaccatgtctgatcctgaaccgacaggacagatgattgaggcggttgtcattgatcctcagctcgttcgtcagcaagctcagcaaattcgtagtcagcgtgaagaggcggcgaaaaaagagcaagagcgactggataaactccgtcgtgaaagcgaacagctagagaaaaatcgacaagcagaagaagagcggatccgccagttgaaagagcaacaggctaaagaagccaaagcggctcgtgaagcggaaaagttgcgtgagcagaaagaacaagagcgcttagctgctgagcagaaagctcgcgaagaaaaagagcgtgctgcaaaagcagaggctgaacgcaaagtgaaagaagaagccgcaaaaaaagctgagcaagaacgcgtggcgaaagaagccgcagcagcaaaggcagaacagcaacgtattgaacgtgaaaaagaagccaagcttgcggaagaaaaagccaaacgtgaaaaagaagtggcagcgaaagctgagcaagaacgtttagcaaaggaaaaagcggccaaagaggcggcagataaagccaagaaagaaaaagaacgcgcggcaaaagcagaagctgaacgtaaagctcaagaagcggccttgaatgatatttttggcagcttgagtgaagaaagtcagcaaaataatgcggcacgtcagcagtttgttacttcggaagtagggcgctatggagccatctacacccagctcatccggcagaatctgttagtggaagacagttttcgaggaaagcagtgtagggtaaacctaaagcttattcctactgggactggcgcattactgggtagcttaaccgttttggatggtgacagtcgtttatgtgcagcaaccaaacgcgctgttgcccaagtgaatagttttccattgccgaaagatcaacctgacgttgtggaaaaactaaagaatattaatttaaccgtagcacctgaataa

SEQ ID NO: 41159 - DNA, 1626 bp, Vibrio cholerae
atgtcgaacgtgtcattcagccgacacaaaggagttaccatgatcgatgtcgttgatttatcgcggttgcaatttgcacttactgcgatgtatcacttcctgtttgttcccctcactctagggatggcatttttacttgctatcatggagtcactctacgtcatgaccgacaagcagatttacaaggacatgaccaaattctggggtaagctgttcgggattaactttgctctaggtgtggcaacaggccttaccatggagttccagtttggtaccaactggtcttactattctcattatgtaggtgacatttttggtgctccacttgcgattgaagcgctggtagccttcttcctagaatctacatttgttggtttattcttctttgggtgggacagactttccaaacgacaacacttagtcgtgacttggttagtcgcattaggctcaaacttctctgctctgtggattctggttgcaaacggctggatgcaaaacccagtaggctcagagtttaattttgaaaccatgcgtatggaaatggtgagctttgctgatgtggtactaaacccagttgcccaagtgaagtttgttcacaccgttgcggcaggttataccacaggcgcaatgttcattttgggtatcagtgcgtactacctactgaaaggtcgtgatgttgcttttgcacgtcgttcatttgcgattgcggcatcattcggtatggcttctgtactgtccgttatcgtactgggtgatgaatcaggctatgagcttggtgaagttcagcgcgtgaaactggcggcgattgagtctgaatggcacaccgagccagcacccgcagcgttcaccttgtttggtattccaaatcaagaagaaatgcgcaccgactacgcgatcaaaattccatttgcactagggatcattgcaacacgttcacttgacgaacaagttgtaggtctgcgtgatctgcgtgatgaacacgttgagcgaattcgtaccggtatttacgcttacgatctgctagagcgtctgcgcgctggtgaaaaaacgccggaaaacatggccgcctttgatgaagtaaaacatgatctcggttatggcctacttctgaagcgttacacggataaagtgacggatgcgacagaagagcaaatccaagcggcagcggatgattctatcccaacagtatggccactattctggtctttccgcatcatggtggcttgtggctttattatgctagtggtgtttggtgccgcctttatccaaacctgtcgtcagaagattgaacagaaaaaatgggttctcaaagccgcgctattcagtattccattgccttggattgcggtcgagacaggttggtttgtcgctgaatatggccgtcaaccttgggctgtcggtgaaattcttcccgttaacgttgccgcttctgcattgagtgcaggagagatcatcacttcaatgctggcgattttggcactgtacaccatcttcttgattgcagaagtgtacttaatggttaagttcactcgtaaaggcccaagcagcctgaaaaccggacggtaccattttgaacaaggcgcagagtctgttcaggatcaagtcaaccgccaagttgaagcataa

SEQ ID NO: 41160 - DNA, 1380 bp, Vibrio cholerae
atgttgaagatttataactcactcacaagacagaaagaggaatttaaaccaatcgttgccggcaaagtgggcatgtatgtgtgtggagtcactatttatgatctctgtcatatcggacatgggcgtacatttgtttcatttgacgtagtagctcgttatcttcgttaccttggctacgatcttacctttgtgcgtaatatcaccgacatcgatgacaagatcatcaagcgtgctgcagaaaacgcagaaacgtgcgaatcattgacagaacgcttgattcaagaaatgtatgcggatttcgatgccctgaatatcaaacgtcccgatgttgaaccacgtgcgacggcttatatcgaagagatcattgctctggttgagcgcctgattgagcgtggttttgcttatgttgctgataacggtgatgtgatgtttgaagtgagccaatacagcgagtacggtaaactttccaagcaagatcttgatcaactccaagcgggagcacgtgtggatatcgaagcggcaaaacgcagtccgctggatttcgtgctctggaaaatgtcgaaaccgggtgaaccaacatgggaatccccttggggctctggccgtccgggctggcacatcgagtgttcagcgatgaactcatcaattttgggtacccatttcgatatccacggtggtggttctgacttgcaattcccacatcatgaaaacgaaattgcgcaatcttgctgcgcccatgatacccagtacgtcaacacttggatgcacagtggtatggtgatggtagataaggagaagatgtcgaaatcactcggtaacttcttcactatccgcgatgttttgggccattatgatgcagaaacagtgcgttatttcttgatgtcaggccactacagaagccaattaaactacagtgaagagaatctcaatcaagcacgtgcttcactagagcgactctataacgcactgcgtggtttagatcgtagcgtgccagccgcggggggcgaagagtacgtgacgcgctttactgctgctatgaacgatgatttcaatacgccagaagcgtattcggtgctgtttgatatggctcgtgaaatcaaccgactcaagagtgaagatatgaccaatgcgagcgctttgggcagcttaatgcgtgagttggcagatgtgatcggtattctttaccaagagcctgaggctttcttccaaggtagtgcggaagatgaagatgcggcgcaaattgaagctttaatcaagctacgtaatgattctcgtgcgacgaaagattgggctaatgctgacttggcgcgtgataagttaaacgaaatgggaattgtgcttgaagatggacctaatggtacaacttggcgtcgtaagtaa

SEQ ID NO: 41161 - DNA, 456 bp, Vibrio cholerae
atgtcctgttattgcggaaatactcaaccttactcgcagtgttgcgaacctattcatctcaatcctcacagtgctcaagttcctgaacagctgatgcgagcacgttttagtgcccatattttaaagaatgttgagtttgtgattgaaacataccatccctcttgccaagccagtaatgagcgtgatgcgattagcgaatcggtacatagccattggcttcgccttgagatcatttcgacccaaatgggcgcaacccctaacgaaggttttgttcactttaaagcgtttcttgatcaagagggtaaagtgttttgccttgaagagcgctctcgatttctaaaagaaaataactgttggttttatattgacggtgaatttccagccgccatcaaacaaggccgtaacgacccttgtgcttgcggtagtggcaagaaatataaaaagtgctgtggataa

SEQ ID NO: 41162 - DNA, 564 bp, Vibrio cholerae
atggtgggtgggatgatggagagctacagcaaatttcatacgattctcaacgagctcaagcattctgccgcccagttcgaccgtcaacgtggtgaacatcatcgcccattatttgatgaggtgttattccattgccacggaaagctattaacaccttgtgttgaagaagctcattcaacactgcaagccttaatccgtgaaaaagagagtggacgtttgacggcattgcgcgcggaatatttatctgaacggctacttgcacaaatcgctgcactgactcgtgagctttcaactcaaaatgtgcgtcgtaacgaaccgaaaccgcacgcttattttaaaaaacccattaatgagctttatcaggagctggctcaacatcaagattgggaacggcgtttgatggatttggtgcgtgataaagccctgttgcttgagcaagcctcggcaacagaaaaagcggcggctcagcaagctctgttgcaatccgagcagcgactcaaccgctgccgtgaagcaaaaataaaaattgagaaacgaattaccactcaagagagaaaagcgtaa

SEQ ID NO: 41163 - DNA, 213 bp, Vibrio cholerae
atgtcgactccatcgattccactgaatgaagcctctgatgagatcaaactcgcggtcgatcttatctttttattagagtctcatgcgattgaaccccagatcgcgcttgctgcgcttgagatcgtcaaacgcgattttgaacaaaaactggcagacgctgcagtatcacccagcattcaaccaaaaaccatcgcccccctgtcagacgagtaa

SEQ ID NO: 41164 - DNA, 783 bp, Vibrio cholerae
atgtcaccaacaacccgtaatccaactcagggaacgagtcatatgctggatttacaaggctatgaagcctctattctgaaaggcgcgctgctgactattgaagttgccgtgctgtcacttttgctagcgatgctgctaggcatgttaggcgcactcgctaaaatggcaccctaccgctgggctcgagccattgcgacactctataccaccatcattcgcggtattccggatttagtactcatgatgctgattttctttggtgggcagattttactcaacaatggtctcagttggtttaatgagttcatcaaccaatggctgacagcccgagatccgaatcatgaatgggtagcctatctgcccgattatgtagatatcagcccttttgtcgcgggcgtgttaaccatcggcttcatttttggggcttatatggcggaaacgtttcgtggcgcgatccttgccgtggataaaggtgaactcgaggcggcgaaagcttacggcatgagtgctgccatgagctttcggcgaattttattaccgcagatgattcgccatgctattcctggttttggcaataactggctggtgctgctgaaaacgaccgctcttgtctcaatcatcggccttgaagatatggtacgcatcagttcactggcggctggctcgaccaagatgccgtttaccttttatatggcggtggccatcatctttctattttttaccagtgtgtcgaccggtttgctcaagctgctagaacgtaaattcagtattcatacgaggtaa

SEQ ID NO: 41165 - DNA, 783 bp, Vibrio cholerae
atggatatgaaaaagtggttagttgcgacagcattaattgccacaacaatcagtggggtaacgcaagccaaagaatggaaaacggtgcgttttggtattgagggcgcttatcctccgtttagctggacagaagccgatggctctttgaaagggtttgacgtggatatggccaatgcgttgtgtgcggagatgcaagtggagtgcaaaatcgtgccacaggattgggatggcattattccttcactgttagcgcgtaagtacgatgccattattgcagcgatgtcgatcactgaagagcgtaaaaagaaagtggatttcactggtaagtacgctcagatcccgaacaagtttattgctaagaaaggcgcggatttagccttcactaaagaaggtttgaagggcgtgaaaattggtgtgcagcgtgcgaccactcacgataaatacatcactgacaattatggtgacacggtcgatatcgtgcgttatggctcgtttgatgaagcgtatttagaccttgccaatggccggatcgccgcagtattaggggatgcctccgcattagaagagggcatgctcaacaaacccggtggtgatgcttatgaatttgttggcccttcactgacagaccccaaatggtttggcgaaggtatgggcatagcggtgcgcaagcaagataaagagctaaccgaaaaactcgatgcggcgattacggcactgcgtgaaaaagggatttatcaacaaatacaagctaaatacttcaagtatgacgtttacggtgaataa

SEQ ID NO: 41166 - DNA, 1272 bp, Vibrio cholerae
atggcgcaatttatcgacagaaggctaaacggcaaaaataaaagtaccgtcaaccgacaacgctttttacgccgttacaaagagcagattaaagagtcggttgcggatgccgttaaccgccgctcaatcactaataccgagtctggagaagatgtttctattccaactcgtgacattaaagagccgatgtttcatcaaggcaaaggcggcgtgcgtgaacgtgtgcatccgggcaatgaccaatttattcgtggcgataaaatcgatcgccctaaaggtggccaaggcagcggcggctcaggtgaaggtgaggccagtgccgatggtgaaggcagcgatgatttcgtattccaaatttccaaagatgaatacctcgatattctgtttgaagatttggcgctgccgaatctcaagaaaaaccaagttaacaaaatcaccgaatggaaaacccatcgcgcaggttttcaaacctcgggggttccctccaatatttcagtggtgcgttcactgcaacaatctttagcgcgccgtacggcgatgaccgctggtaaacgccgtttgatgagtgagttggaagaggaactcgaacgtattcagcgcagcgaaccaccacaaatcatggaagagatgcgcatcaagcaagagattgaggagctacgcaataaaatcgatagcgtgccctttatcgacacctttgatttgcgcttcaaaaactacgaaaagcgcccgattccctccagtcaggcggtaatgttctgtctgatggacgtgtcaggctcgatggatcaagcgaccaaggatattgcaaaacgcttttatgtactgctgtacctgttcttaactcgcacttatgaaaacgtggaagtggtatttattcgccaccatacccaagctaaagaagtgaatgagcacgacttcttctactcgcaagaaaccggcggcaccatagtgtccagtgcactcaagctgatgcatgaaatcattgaagctcgctacccactgggtgagtggaacatctatggtgcacaagcctctgatggggataactgggcagacgattcaccacgctgcaaagagttactctctaacaagctgctgccctattgccaatactatgcctatatcgaaatcacgcgtcgctcacaccaaacgttgtggcacgaatatgaaaaattacaggcctccttcgataacttcgcgatgaagaacatccgcagtgttgaagatattttccctgtgtttagggagctgttccaaaaggaaaatgcgtag

SEQ ID NO: 41167 - DNA, 1551 bp, Vibrio cholerae
atgactaccaaagccaaagccgcacctaagcgtaaagtagcgaacagtaagcgactgcccgatggcccagattggacgtttgaactgatcgagcgctaccatcaagaaatccgtcgcgtggcagagctttatcgtttggacacttacccaaaccagattgagatcatcacctcagagcagatgatggatgcctattccagcatcggcatgccaatcaactacaaccattggtcgtttggtaaaaaattcattcaaaccgagcaaacctacaaacatggtcagatggggttggcatacgaaattgtgattaactccgatccttgtatcgcctatctaatggaagaaaacaccgtaaccatgcaagcgctggtgatggcgcatgcctgttacggccacaactccttcttcaaaggcaactatctattccaaacctggacagatgccagctcgatcatcgattacctgctgtttgccaaaaactacattgctgagtgtgagcagaaatttggcgtgaacgaagtggaaaagctactcgactcttgccatgcgctaatgaattacggggttgaccgttataaacgccccgaaaaaatctcgattgccgaagaaaaagcgcgtcaagaagagcgcgaagcttatctgcaatcacaagtgaatgccttatggcgtaccgtaccgaaaaaagccgtagagcaagaaaagcagcgccgcttcccgagtgaaccacaagaaaacattctctattttattgagaaacacgcccctttgctggagccttggcaacgtgaaatcgtgcgtattgtgcgtaaagtcagccagtatttttatccacaaaagcagacgcaagtcatgaacgaaggatgggcgacgttttggcactacaccatactcaaccatctttatgatgaaggcttactcagcgacaagttcatgctggagtttttgcacagtcacaccagcgttgtggcacagccgccctacaacagccgttatttcagtggcattaacccttatgcactcggttttgccatgttccgtgatattaagcggatctgcgaagagccgaccgaggaagataaagagtggttcccagagttggccggcgcaaactggttggatgcgcttcattttgcgatgcgcaactttaaagatgagagctttatcagccaatatctgtcacctaagctgatccgcgactttaagttctttgcgatttgcgatgatgatagaaaaaatcacattgaaatcagtgctattcacgatgatctcggatatcaacaaatccgcgagaaactcgcggcgcaatacaatctcagtaatcttgaacccaacattcaagtgtatagcgttgatgttcgaggcgaccgttcgttaaccttgcagtatgtaccacacgatcgtattccgttagatccaagctacgaggaggtgctaaaacacttgcaccgtctatggggttttgaagtcaaactggaggaggtcaaagacacaggaagaagagagatcctcgcaacctgccccaaaaagaacgactcggaaagtcgaatctaa

SEQ ID NO: 41168 - DNA, 1749 bp, Vibrio cholerae
atgtcattgcactctgacgaatctaactggcagacctttaagcgtctgtggacttatatccgcttatacaaagcgggcttggtggtttcaactatagccttagttattaatgccgctgctgatacttatatgatttctttactaaaacctttattggatgaaggttttggtaatgcggaatccaacttcctgcgcattctgccgtttatgattttagggcttatgtttgtgcgtggtttaagtggatttgcctcttcttactgtttgagctgggtgtccggcaatgtggtgatgcagatgcgtcgccgtctgtttaaccattttatgcacatgccagttcgttttttcgaccaagagtcaacgggcggcttattatcgcgcatcacatacgactcagaacaagtggctggcgcaaccagccgcgcgttagtcagtattgtgcgtgaaggggcgagcattattggcttgctcaccttgatgttttggaatagctggcagctctctttggtactgattgtcgtcgcaccagtggtggcctttgcgattagctttgtttctaagcgttttcgtaagatttcgcgcaacatgcaaacggctatggggcatgtgacttcatcggcagagcagatgctcaagggccataaagtggtactgagctacggcggtcaagaggtcgaacgcaaacgctttgacaaagtcagtaacagcatgcgccagcaaaccatgaagctggtatcggcacagtcgattgcagacccagtgattcaaatgattgcctcacttgctctgtttgcggtgctctttttagccagtgtcgattcgattcgcgctgagttgactccaggtacatttactgtggtgttttcagccatgtttggcctaatgcgtcctctgaaagctctgaccagtgtaacgtcggagtttcagcgtggtatggccgcttgccagaccttgtttggtttgatggatctcgaaaccgagcgcgataatggcaaatatgaggcagagcgtgtcaacggtgaagtggatgtgaaagacgtaactttcacctaccaaggcaaagaaaaacctgcgttatcccatgtttcgttctcgattccgcaagggaaaacggtcgctctggttggccgttctggctcaggtaaatcgaccatcgcgaatctgtttactcgtttctatgatgtcgacagtggatcgatctgtcttgatgggcacgatgtgcgtgattacaagctgaccaatctgcgtcgtcactttgccttggtttcgcaaaacgtacatctgtttaacgacaccatcgccaataacatcgcttacgctgccgaaggtgaatacacccgcgagcagattgagcaagccgcacgtcaagcccatgcgatggagtttattgaaaacatgccgcaaggtttggataccgtgatcggtgagaatggcaccagtttatctggcggtcagcgtcagcgagtggcgattgctcgcgcattgctgcgcgatgcacctgtgctgatcctcgatgaagcgacgtcggcactggatactgaatcggagcgtgccattcaagcggcgttagatgagctgcagaaaaacaaaaccgtgctggtgattgcgcaccgtttatctaccatcgaacaagcagatgaaattcttgtggttgatgaaggtgaaatcattgagcgtggtcgccatgctgatctgttggcgcaagatggcgcatacgctcagctgcatcgcatccagtttggtgaatag

SEQ ID NO: 41169 - DNA, 1221 bp, Vibrio cholerae
atggttggatttatgtttcatccgatttcggcttttattggtttgcgctatttgcgcggccgctcaggggatcgttttagccgctttgtctcttatatgtcgacggcggggatcacgatcggtgtgatgtcgctagttactgttttatcggtgatgaacggttttgaggcgcagcttaagtcacgcattcttggggtgttacctcaagcggttgtcaccgaagccgcaggcaaaaccaccctcagcgcaacgcccccagattttgtcacggcattatcgactcagcgcccaccagagccgttagtgcgcagtgacgcggtggtgcaaagtgcctcgcaactggctgcgggtttgttgattggtatcgagccacaacaaaatgatccgattgagcaacacctgattgcaggtcgggtaacggctttgcaagcgggcgagtatcaactctttcttgggcatcttcttgcgcgcagtttgaatgtcaccgtgggtgataaagtgcgtttgatggtgacagaagcgagccaatttaccccgttgggccgtttgcccagtcagcgaaactttacggtagcgggaatttttaataccggttcggatgtggatgggcaactcatggtgactcatctgcgcgatgcggccaagctattgcgctatgatgcacagaccatttcaggttggcggctattttttgatgacccgtttgtggtcagtcagcttgccgaacagccattgccgcaagattggcaatggagcgactggcgtgagcagcgcggtgaactgtttcaagcggtacgtatggaaaagaacatgatggggctgatgctcggacttatcgttggggtggctgcgtttaatattatttctgcgctgatcatggtggtgatggagaagcaggctgaggtggcgattttaaaaacccaaggcatgcagtcacaacatgtgctggcgattttcatggtacaaggcgccagcagcggtgtgattggtgcgctggttggtggtttacttggcgtgctgttggcggccaatttaaatagcctgatggaagccttaggtgttgcccttttttcggtgggtggcagtttgccagtggcgattgatccgctgcagattgtcctcgttattgttcttgcgattgtattaagtctgttggcaacgctgtttccagcctatcgcgcatcttctgttcaacccgctgaggcgttacgttatgaataa

SEQ ID NO: 41170 - DNA, 3468 bp, Vibrio cholerae
atgactacacactctttactctctctgttttcggcgcaaggtgccggagacaaaaaagccatcggtaatttacacggcgcaagtttagcgctggccattgcggaactcgccaatgctcatacgagccatacgttgctcgccgtgcccgatccacaaaccgcgctcaaattgctacacgaagtggaacagtttagccacagcgaagtggcgctcttccccgattgggaaacgctgccctacgataatttttcaccccatcaggacatcatttctgatcgtatttcgcgtttgtatcagctcccaagcttaacgcgcggtatcacgattgtcccggtcagtaccttgcttcagcgccagtcaccacgtgactttttgttgcagcacaccttaattgttaaacgtggcgatcacttttcactggataaactgcgcttgcagttagaaaacagcagctatcgccatgtcgatcaggtctttggccccggtgaatacgccagtcgcgggtcgattcttgatctcttccctatgggcagtagcgacccattccggatcgatttctttgatgatgaaatcgacaccattcgcacctttgatccagacaatcagcgctcaatcgctgaaatggatgaaattcgcctgctgcccgcccatgagtttccgacgacggccgcggcgatcgaagagtttcgtaaccgctggcgacagcgttttgaagcgcgccgcgagccggaatcggtttacagccaagtctctaaaggcacttggccggcagggattgagtattggcagccactcttttttgagcacagcgagactctgtttgattacctgcccgccaacagccagcttttggtggttggcgagctggaaaaagccatcgaccagttcttaactgatgtcgattaccgctacgaccaacgcaatatcgacccactgcgcccactgctgccgcccaatgagttgtggctgcgtaaagatgagctgtttgcccactttaaaactctgccgcaagtccaactgacaagctcacctatcgagctgcgtgccggtcgaatgaatgcgcaagttcaaccactacccgtattggccgttgaacatcaaaacaaagagcctttggcggcactgcgccaatttagcgaacaatttaccggcaaaatcattttctcagtcgagtcggaaggtcgccgtgaagcgctactggagttgttacagcgcattaaactgcgcccgcaaagccaaaatgatttcagccttgcgtgccaacaaacggaaaaatactcactggtgctcggctcagcagagcgcggatttatctatggtgataatcaagttgccttgatttgtgagagcgatttactgggcgatcgggtgattcaacgtcgccgcaaaaaagatcgcaaaaacgtcaccaacagtgatgcggtaatccgcaaccttgccgagctcaaaccggggcaacccgttgtccatattgatcacgggatcggacgttacttaggcttacaaacccttgaagcgggtggcatggtcagcgaatacgtgatgctggagtaccaaaacgaagccaagctgtatgtgccggtttcgtcactgaacctgatcagccgctactccggtggcgcagaagaagccgcccaattgcataaattagggggtgaagcgtgggtcaaagcgcgccgcaaagcggcggaaaaagtgcgcgatgtcgcggcagaacttttggatgtgtatgccaagcgtgaaatcaaaccgggctttaaatttcatctcgaccgtgaacaatacgcgaccttcaaagccaccttcccgtttgaagaaaccgatgaccaagcaatggcgatcaacgccgtgctatccgacatgtgtcaagccaaagccatggatcgtttggtgtgtggtgacgtcggctttggaaaaacagaagtagcgatgcgcgccgcgtttgtcgcgaccgataacggcaagcaagtcgccgtattagttccaactacgctgctcgcccagcagcattttgaaaacttccgcgaccgctttgctaacttgccgatccgcgtcgaagtgctctcccgctttaaatcagccaaagagcaaaaacaaatcctacaagacgtagcggacggcaaagtcgacattctggtcggtacccataagttgctctctagcgaaattcgttttgcggatcttggcttgctgattgttgacgaagaacaccgtttcggagtgcgccaaaaagaaaaagtcaaagcgatgcgtgccgatgtggatattctgactctcactgccacgccaatcccacgtacactcaacatggccatgagtggtatgcgtgacctgtcgattattgccacacctccagcgcgccgtttagccatcaaaacctttgttcgtcaaagtgaagatagtgtgatccgtgaagcggtactgcgtgaaattatgcgcggtggtcaggtgtactttctgcataatcaggttgaaaccatcgataaagtggccgcagatttagaaaaactggtgcctgaagcgcggattaccgtcgctcacgggcagatgcgtgaacgtgagctggaaaaagtgatgaacgatttctaccaccagcgtttcaatttgctggtgtgtaccacgatcatcgaaaccggtatcgacgttccgaccgcgaataccatcatcatggatcgcgctgacagcttaggtttagcccagttgcaccagttacgtggccgcgtcggtcgttcgcatcaccaagcctatgcttacctgttaacgccaccgcctaaagcgattaccaaagatgcggtcaaacgcctagaggcgattgcctctttagaagatttgggggccggctttactctcgccacgcacgacctagaaattcgcggggccggtgaattgttaggcgaagagcaaagtggccagattcagtcggtcggttttactctgtatatggaaatgctcgaacaagcggtcgaagccctaaaatcaggcaaagaacctgcgctggatgatttactgcgtgagcagaccgaagtcgaaatgcgcctaccagccttgctgccggaagagtacatccccgatatcaatacgcggttatccatgtacaaacagatcgccagcgtagcgagtaaagacgaattggctgaactcaaagtcgaattgattgatcgctttggtaaattaccagacgccgcgttaaacttactcgccattgctgaactgaaactcaatgctatgcgcctaaaagtgcgtaaaattgaggcgcatgagcgtggcggatacgtagagttctatcccaatgctgacattaacccggtgtttttggttaaactgctgcaatcgcaaccaaagttactggcgatggatgggccaaccaaattgaaatttaccttgcctttggttgaacgcagtgcgcgcattcaatttgtcgctgacatgttgaagaatttccagcaaaatgtactacctgctcggtaa

SEQ ID NO: 41171 - DNA, 2883 bp, Vibrio cholerae
atgttcaaagagaacaaaaataaagtcgaaaccattattaaaacgagtgaagaggctccttcttctcgactcaatggctcacaacgtcttaaagaaagcggattgatcttagctttcttgttttcgatatttcttgccgttgctctgtttagttttaaccccgctgatccatcttggtcacaaacggcttgggggacagacattcacaatgcgggtggtttagttggcgcttggttagctgacaccctgttcttcgtttttggctctttagcctatccattgccttttattactgcatttgcagcatgggtgctgttgcgcaaacgtgatgaaggtgacgaaatcgatttcactctttggggaactcgactccttggtctaaccatagtgctattgaccagttgtggtcttgccgacatcaactttgatgacatttggtatttttcatcaggtggagtgattggcgatgtgttgaccagcttagcactgccgaccttgaacattcttggaacaacgcttgtgttgctctttttgtggggggctggcattaccttgttgactgggatctcttggctgcggattgtggaatggattggtgagcgtagcattgcggcatttgtcgggctgtttaaccgcttacgcggtgaaaaagcggagcgtgtgaaaccggcactggtaaagcctgagctgccagttgaagagctagaaccgacattttctgcgtcaatggatactgagattgatgagccagctccgagcttacgtcgcttcaatattcatatgccggaagagcgcgacgtacctgacattcattttgagccccaagtggagcctaaagtcgagttgaaaccagagccgccaaggcagcgcgaacctgctccccatttctcacgggtagccgctcaaaatacacaggtagagcctgtcagctctgcgcgcactcagcaatgggatgccacgatagaagaactggagcaacaggctcgtctagtcgatgactatgctgtcgaggatgatgcagtgccaagcgttcttacctccagcactctttcggatgttgaagattccattttgaccactgccatctcggtggatgaagaagaggagagcctctctgaaaactttaaccactcgttcaatattgaggtagaagatgaagaagttgagcccagcattgctaacttgcattggtcagatgatgaagatgagcttgaagaaacgccttcggttatggtatcgcccgcaatagagtctgattgggaagacgaggatgagcctgacgatcgcgatgtggcggcatttcaaaacatcgtttcgcaagcacaagcgaatgcggctgcgcagcaaaacccgtttttagtgcagaaggccgtaaacttgccgaaaccaacagagcctatgccaacgctagaactgctgtatcatccagaaaagcgtgaaaactttatcgatcgtgaagctttagaagagatcgcgcgtctggttgagtccaaactggctgattacaaaatccaagcgcaagtcgtggatattttcccggggcctgtgatcacccgttttgagctagatttagcgccgggtgtgaaagtgagccgaatttctagtctgtcgatggacttagcccgttcactctcggcgatggctgtgcgtgtcgtggaagttattcccggtaaaccttatgtcgggcttgagctgccaaacatgtcacgtcaaactgtgtacctatccgatgtgattgccagtcctcaatttaaagagtcgaagtcaccgacgaccgtcgtgcttggccaagatatcgccggcgatgccgtggtagcagatctgtctaagatgcctcatgtgttggtggcgggtaccactggttcaggtaagtcggttggggtcaacgtgatgatcctgagcatgttgtataaggcttccccagaagatgtccgcttcatcatgattgacccgaaaatgttagagctttccgtgtatgaaggcattcctcatctgttggcggaagtggtgaccgacatgaaagatgcctctaacgcgctgcgctggtgtgtcggagaaatggagcgtcgttataagctgatgtcggtacttggtgtacgtaatatcaaaggctttaacgataaactgcgtatggctgctgaagccggacatcctatctacgatcctctttggaaagacggagatagcatggagagtgagccgccactattagaaaaactgccttatattgtggtcgtggtcgatgaatttgctgacctgatgatggtagtcggtaaaaaagtcgaagagctgattgcgcgtttggcacaaaaagcccgtgcggcgggtattcacttgattttggctacgcagcgcccatctgtggatgtgattacgggtctgattaaagccaacatcccgacccgtgttgcttttactgtctctacgaaaaccgactctcggacgattttggatcagagtggcgcagagtcgttgctcggtatgggggatatgctctatttacctgccggttccagtcatacgattcgtgtacatggtgcatttgcctcggatgatgatgtgcatgctgtggtcaataactggaaggcaaggggcaagccgaattacatcagtgagattatccaaggcgatcacggcccagaagccttattgcccggagagcagtctgaatcagacgaagaacttgacccactgtttgatcaagtggttgagcacgttgtcgaaacgcgccgaggctcagtttctggggttcaacgccgttttaaaattggttataaccgcgcagcacgtattgtcgagcagcttgaggctcaaggcattgtgagtgcgccagggcataacggtaatcgtgatgtattggctcctgcacctatacgagattaa

SEQ ID NO: 41172 - DNA, 777 bp, Vibrio cholerae
gtgcccatgattcatccatctgctatccaacaacttttagaaccgattaaccatttcctgcaatgtcctacacccgacgaatgggttgaagaagcgcgcaaacctgaaaacctacgtgttttgttgttagaccatttactatgtgagctgaaagctggtcaatccgccatgtttctgatccgtaagtatgcggttgataaagagagtgaactttcgctattggattggtttaaaccttatgaagactttgcgtatcgcaaaattggagatatccaatcgctcaaaggcaaaagccaaatctccaaagcgatcattgccaaatcggattctccttatagccaagatttgatcgataaaatggtattgctaatcaaggaagagctacaccatttctatcaagtgttggaaattatgcaagcgcgcaatgtggagtatgagtcaattccggctagccgttatgccaaaagccttctagcccatatgaagactcatgaaccacagacattgattgataagctgatagtaggcgcttatattgaggctcgctcttgtgagcgctttgccaaactcgccccctacttagatgacgagatagcaaaattttatgtttctctgcttcgctctgaagctcgccattatcaagactacttgcaactggctgaacaaattgcgggctacgatatctctgaacgtgttgcgtattttggccgagtcgaagcggagttaatttccactcccgatagcgatttcaagtttcacagtggtattcctaaatag

SEQ ID NO: 41173 - DNA, 1671 bp, Vibrio cholerae
atgactgaatcttttgctcaactctttgaagagtttctgaacgagacccaattccaacaaggtactatcgttaaaggtactgtagtagcaatcgagaacggctacgttctggttgatgctggcctgaagtctgagtctgctatccctgctgaacaattcaagaacgctgctggcgaactagaagttcaagtaggttctcaagtagacgtagctctggacgcggttgaagatggtttcggcgaaactcaactttctcgtgagaaagcgaagcgccatgaagcttggatcgtacttgaaaaagcttacgaagaagctgcaactgttatcggtatcattaacggtaaagttaaaggcggtttcactgttgaactgaacggtatccgtgcgttcctgccaggttctctggttgacgtacgtccaatccgtgacactgctcacctagaaaacaaagagctagagttcaaagttatcaagctagaccagaagcgtaacaacgttgttgtttctcgtcgtgcagttatcgaatctgaaagcagcgtagagcgtgatgaactgcttgaaactctgcaagaaggtactgaagttaaaggtatcgttaagaacctgactgactacggtgcgttcgttgatctgggcggcgttgacggtctgctacacatcactgacatggcttggaagcgcgttaagcatccatcagaaatcgttaacgttggtgacgagatcctagttaaagtactgaagttcgatcgtgatcgtactcgcgtatctctaggtctgaaacagctaggcgaagatccatgggtagcaatcgctaagcgttacccagaaggtcacaaactgtctggccgtgtaactaacctgactgactacggctgcttcgttgaaatcgaagaaggcgttgaaggtctagtacacgtttctgaaatggactggacgaacaagaacatccacccatctaaagttgttaatgttggcgacgaagttgaggttatggttctggatatcgacgaagagcgtcgtcgtatctctctaggcctgaaacagtgtaaagctaacccatggcaatcattcgctgaagcgcaagctaaaggcgacaaagtaactggtaagatcaagtctatcactgactttggtatcttcatcggtctagaaggcggtatcgacggtctggttcacctgtctgacatctcttggaacgtaccaggagaagaagctgttcgtgaattcaagaaaggcgacgaaatctctgcagttgttctagcagtagacgctgagcgtgagcgtatttctctgggcatcaagcaaatggaaaacgatccattcaacgcttatgtttcagacaacaagaaaggtgctctggttaacggtactgtaactgcagttgacgcgaaaggcgcaaccatcgagctagaagacggcgttgaaggttacatccgcgcttctgaagtatcacgtgaccgtatcgaagatgcatcactgatcctgaacgttggtgacaaagttgaagcgaaatttactggtgttgaccgtaaaaaccgcgtaatcaacctgtctatcaaagcgaaagatgaagctgaagagcaagaagtaatggcaactctgaacaagcaagatgaagctgcgttcggtaatgctatggctgacgctttcaaagcagcgaaaggcgaataa

SEQ ID NO: 41174 - DNA, 690 bp, Vibrio cholerae
gtggagaaatacatgtcttctcatacgccagtggttaccgttgatggacctagcggtgcaggtaaaggcacattgtgcatgttgttggctaaaaaactcggttttcagctattggactctggcgcgatttatcgcgtgttggccttggcggctcttcatcatggcgttgatcttgaatcggaagacgctttggttcctcttgctacgcatcttgatgtgcagttcatcgcggaaggcgacttagtgaaagtcatcctcgaaggtgaagatgtgtcccgcgagctgcgtaaagaagaaactgggatggctgcgtcaaaagtcgcggcattacctcgggtacgtgaagcgctgctgcgccgtcaacgcgcgtttgctagtggtattggattagttgcagatggccgtgatatgggcacagtggtttttccagcggcggaagcaaaaattttccttgatgcgagtgcggaagaaagagcccgtagacgcttcaagcagttgcaactgaaggggcttgatgttaaatttgatgcccttttaagcgaaattcaggaaagagacgaccgcgacagaaatcgtgctgttgctccattacgtcctgctgaagacgcattagtgcttgattcaaccacattgactatcgatgaagtggtggaacaagcgctacaatatattgaatctaagctagtgtga

SEQ ID NO: 41175 - DNA, 2361 bp, Vibrio cholerae
atgaacttggagcgttccgagcgtatcgagatccccgtactacccctgcgcgacgtggttgtctatccacacatggtcattcctttgtttgttggccgagaaaaatcgatccagtgcctagaagcggcgatggataacaacaagcaagtgttattggtggcgcaaaagaaagcggaaaccgatgagccgaaagtcgccgacttatttgaagtcggtaccgtcgcaaccatcttacagttgctgaaattgcctgatggcacagtgaaagtactggtcgaaggtcaacagcgtgccaaaatcactcaattctatgaagaagagtatttctttgccgatgcacaatatctggtgacaccagaattggatgagcgtgagcaagaagtggtggttcgcagtgcgattaaccagtttgaaggctttatcaaactcaacaaaaaaatcccgcctgaggtactcacttcactgaacgggattgatgaggccgcacgtttagcagacacgattgccgcgcacatgccgctgaaattggtcgataaacagaaagtgcttgaactgctggatgtcagtgaacgtttagaattcttaatggggcagatggagtctgaaatcgatctgctgcaggttgagaagcgcatccgcacccgcgttaaaaagcagatggaaaagtcacagcgcgagtactatctgaatgaacagatgaaagcgattcagaaagaattaggcgagatggatgacgcgcctgacgaatttgaaacgctgaaaaagaaaatcgaagagtcgaagatgccgaaagaggcacgcgacaaagcagagcaagagctgcacaagctgaaaatgatgtcgccgatgtcagcagaagcaacggtagtgcgtagctacatcgattggatggtcaatgttccgtggactaagcgcagcaaggtgaaaaaagatctctctaaagcagaagagatcctcaatgctgaccactacggcttagagcgggtcaaagagcgtattttggaatatctcgccgtgcaaagtcgtatcaataagcttaaaggtccaatcctatgcttagtggggcctccgggtgtgggtaaaacctcactgggtcgctcgattgccgctgcgactgggcgtcagtatgtgcgtatggcgctggggggcgtgcgtgatgaagcggaaattcgtggtcaccgccgcacctacattggctctatgccgggtaagcttattcaaaagatggcgaaagtcggggtgaaaaacccactcttcttactcgatgaaatcgacaagatgtcatcggatatgcgtggtgatccggcttctgcactgctagaggtgcttgaccctgagcaaaacaactcgtttaacgatcactacctagaagtggattatgacctgtcggacgtgatgttcgttgcgacttcaaactcgatgaacattccaggcccattactagaccgtatggaagtgattcgtttatcggggtacaccgaagatgaaaaactcaatattgccaaagaccatctggtcagtaagcaagttgagcgtaacggcctcaagccaagcgagatcgtgattgaagattctgcgattgtcggcattattcgctattacactcgtgaagcgggcgtgcgtggtctggagcgcgaaatctcaaagatctgtcgtaaagccgtgaagaaaattctgctcgataaaggcgtgaaaaccgttgttgtaaaccaacaaaacttaaaagagtttttaggtgtacaacgctttgactacggtaaagcggaagagagcaaccgtattggtcaagtgaatggcctcgcgtggacggaagtgggcggtgatttactaaccatcgaaacccaatcgatgccgggtaaaggtaaacttacccaaaccggttcactgggcgatgtgatgcaagagtcgattcaagcggcgatgacggtggtgcgctctcgtgcagaaaaattgggcatcaaccctgatttctatgagaaaaaagatatccatgtccatgtcccagaaggtgcgacacctaaagatggcccaagtgcgggtatcgccatgtgtacagcgctggtttctagtttgaccggtaacccagtcaaagcggaagtcgccatgaccggtgaaatcactctgcgtggtgaagtattaccgattggtggtttgaaagagaaactgctggcagcacatcgcggtggcatcaaaacggtgctgatcccgaaagataatgagcgcgatctggaggagatcccagataacgtgatcgccgatctgcaagtacttccagtgcagtggattgacgaggtgctcaaagttgccttggagcaagacccgacaggggttagctttgagagcaaaaagagtgatgcatag

SEQ ID NO: 41176 - DNA, 1281 bp, Vibrio cholerae
atgacagacaaaagcaaagagggcggtagtagtaaactgctgtactgctctttctgtggcaaaagccagcacgaagttcgcaaactgatcgcaggtccgtccgtgtatatttgtgatgagtgcgttgatttatgcaacgacatcatccgcgaagagatcaaagatgttctgccaaaaaaggaatcagcggcgttaccgacgccaagaaagattcgtgaacatctcgacgattatgtgattggtcaagaacacgccaaaaaagtgctagccgttgcggtatataaccactacaagcgtttacgtaatggtgatacgactagcgaaggcgttgagctgggcaagagtaacattttgctgattggcccaacgggtagcggtaaaacactactggctgaaacgctggcgcgtttgctggatgtgccatttaccatggcggatgcgaccacattaaccgaagcgggttatgtgggcgaagatgtagaaaatatcattcaaaagctgctgcaaaaatgcgattacgatgttgcaaaagcggagcgtggtatcgtctatatcgatgaaattgacaaaatttctcgtaagtctgaaaacccatccatcacacgtgacgtgtcgggtgaaggggttcagcaagcgctgttaaaactgattgaaggtacagttgcttcggttccaccacaaggtggccgtaaacatcctcagcaggaattcctgcaagtcgacacctcaaaaatcctatttatctgtggtggcgcgtttgctggcctagataaagtgattgaacagcgtgttgcgacagggactggtatcggttttggcgcggatgtgcgttctaaagacaacagcaaaaccttgagcgaactgtttactcaggttgaacctgaagatttggtgaaatacggtttgatcccagagttcattggtcgtctgcctgttacggcaacgctgactgaactggatgaagcggcattgattcaaattctgtgtgaaccaaagaatgcactgaccaaacagtatgcggcgttgtttgaactggaaaacgttgatctggagtttcgtgaagatgcgctgaaagcgattgccgctaaagcgatgaagcgtaaaaccggtgcgcgtggtctacgttcaatccttgaagcagttctactggaaaccatgtatgaactgccttcaatggaagaggtcagcaaggtggtgattgacgaatctgtgatcaacggagagtccgcaccgctactgatttacagcgctaatgagagccaagccgctggtgcggagtaa

SEQ ID NO: 41177 - DNA, 999 bp, Vibrio cholerae
atgttcaagccgcttaccctaattgccgcttctatcctcgctgtcacaagctttaatgctgccgctaattgtgacccaggcgaaatcgtgatcaagttcagccatgtgaccaataccgacaaacacccgaaagggattgcggcatcactgctggaaaaacgcgtcaacgaagagatgaacggtaaagcctgtatgcaggtgttccctaactcaacgctgtacgatgatgacaaagtgttagaagccttgctcaacggcgacgtacaactggcggcaccttcgctgtctaaatttgaaaaattcaccaaaaagtaccgtatttttgacctgcctttcctttttgaagatgtggatgccgttgaccgtttccaaagttccgccaagggcgaagagctgaaaaatgccatgactcgccgtggcgtaaaaggcttggagttctggcacaacgggatgaagcagatctctgccaacaagccaattttggtgcctgcggatgccaaagggttgaaattccgtgtacaagcgtccgatgtgttggtggctcagtttgagcagatcggtgctaacccacagaaaatgtcgtttgcggaaacctacggcggtttacagaccaaagtcattgatggacaagaaaatacttggtcaaacatctacggacaaaagtactttgaagtacaagatggcaccaccgaaaccaaccacggcattctggattacctcgtggtgacctcaagtaaatggtgggatggcttacctgcagatgttcgtgatcagtttgccaagatcctcaatgaagtcacgattgagcgcaacgcagaatccaacaaagtggaagagctcaataagcagtacatcattgaagcgggcggtgtcgtacgcactctgactccagagcagcgtcagcaatgggtcgatgcactcaaaccggtatggcagaagtttgagaaagacatcggtgccgatctgattgaagccgctctggcagctaaccagaagtaa

SEQ ID NO: 41178 - DNA, 972 bp, Vibrio cholerae
ttgaaaaaattattatcgatagtactgggcctagcgttatcggcacccgtactcgccaatgaagtcagttttgaacaatatgtcgaaaggctaaagcagcaagcgcgtgaagaaggtatttccgaacgtatcctcaacgaagcgtttcgtgatgtggaatacaagcctcgttccgtcgttgcggataaaaatcagccagagaaaaagttgacgctggatgaatacatcccgcgcgctgtaccagagtggaaagtaaagcaagcgcaatctctgtatgaaaaacactacactgagctgcaacgcattggtaagcagtatggagtacaaccgagatttattgttgccttgtggggggttgaaagtaatttcggtgcgttcacgggtaactttcgggtgattgatgcgttatcgacgctggcctatgaaggccgccgtgaagagtttttccgcaaagaaaccatggccgccttgcagatcctcgaacaaggtcacattgcccctgaagccatgaaaggctcttgggcgggcgcgatggggcagtgtcaatttatgccaagctcgtttttgaattttgccgctgatggcaacggtgatggcaaaaaagacatttggggaacacgttcagacgtatttgcttctacggctaactatctcagccaatcaggctgggatgataagtacacttggggacgccaagtgaaaatccccaaagggtttgaccatgctctagaaggacgtcagcctgaaaaaggcaaaacgttacaagagtggagtaagcttggggtcactcgttatgatggtaaaccgctgccagcgctttctgatgatattaaagcgtggctcatcatgcctgatgatgaagcagggcgaatttatcttgtgtataacaactacaatgtattgatgaagtggaatcgctctcattactttgcgttggcggtcagccatctggcggatcggattgcgttctaa

SEQ ID NO: 41179 - DNA, 309 bp, Vibrio cholerae
gtggtcaataatcgaaataaaaggcttgtcatgctttgctctatttacaaaagtcctaaaaaagaaggcacttatctctatattccgaaacgggacgatttttcacaggtccctgacaccttaaaacagatgtttggtaaacctatttttgtcatgctggtcaatcttgagcagcgtcggttggcgcaagtgaatgtggagaaggtgaaacaatccatgcaggaacaaggtttctttttgcagttaccgccgccaccagaaaatttgctggaacaacataaggagcgcaaagcgcgccaaactccctga

SEQ ID NO: 41180 - DNA, 1881 bp, Vibrio cholerae
atgaacaagatggcaaacccaactacggctctcttaactgagcgccgctttttaccctatttcatcactcagtttcttggtgcctttaacgacaacatttttaaaaatgtcttgttactctttgttgcgtttgcaggccctcaagcgttacctatctcaagcaatttattcatcaatctcgctgctgggctgtttattctgccttttttcctcttctctgcgaccgcgggagtcttagcggataagctagaaaagtctcggtatattcgttgggttaaattgcttgaaatcgccatcatgctgtgtggtgcgataggttttatcactcaaagctacggaatctcactgtttttattgttcttgatgggtacacaatcggccttttttggcccagtgaaatacgcattgctaccacaacaactgaaatcggaagagctcgtccccggtaatgccttagtagaaaccggtacttttctggcgatcttattaggcaccttaggggctggactgattgcttccgctgataacgcgcactacttcgccgcggctgcggtagtgattttcgccgtgcttggttatctctctagccgcgctatcccactcgcacctgcgagtgctcctcatctcgaatttcgttggcagccaattacgcaaaccaagcagacgctccgcatagccaaacgtgatcgcgccattttccagtccattatggcgatcagttggttctggtttctcggcgcggggtaccttactcagtttcctaacttcactaaactgcacctcaacggtaatgaagccgcggtctctttcttactggcgctattttccgtcggcattgccgtcggctcactggcgtgtgacaagctttccggacaccggattgaggtcggcattgtgcccttgggcagtgtggggatcagcttcttcgggtatctgatggcgaccagcattcccgccgatctccccattttcagtacttttgcggattttgttacttactccgcgctatggccactatttgcttatttattattgattggcgtgtttggtggcgtattcatcgttccgctttacgccatgttgcagcaacgcgctaaagtcactgaacgtgcgcaagtgatcgcggctctcaatatctacaattcgctgtttatggtcggcagtgccgcacttggcattgtgtgcctcagtgtattggagatgagtattccgcagttatttgcactactggctgtgcttaacgtcttggtggctttgtatattttcctacaagtgccgatttttgccgttcgctttctggtgtggatcctcactcatacgctgtaccgagtgcgccataaaaacttgcaccatattccagagcaaggtggcgcactgctggtgtgtaaccatgtcagttatatggatgccctattgctcagtgcggtttgtccgcgcttaattcactttgtgatggaagaagagtacgccaacctgccactgctgaaacgtttcttgaaacgcgctggggtgatcccgatttctgccaacaaccgagcctctcttcgccgcgcatttgcggatattgaacactcactcaacgaagggaatttggtgtgcattttcccagaaggtcgacttaccgccgatggtgaaatgaatccgtttatgcgtggcttagatttaatcctacaccgcagccctgttcctgtggttcctctggcactcaaagggttatggggcagttatttcagccgttacaaaggccgagcttgccaaggtgtgccacgccgttttcgctcacagttagagattgaagcgggaatgccagttgccccggagcaagccaactcggcggtgatgcacgaaaaagtggcacaattgcgtggcgattggcgttaa

SEQ ID NO: 41181 - DNA, 834 bp, Vibrio cholerae
atggaaaaaaaaaccctgctgacgcattgtcctgatgcgccgggactgatctccaagatcaccaatatttgttacaagcatcaactcaacatcatccacaataatgaattcgtggataatgccagcggtcattttttcatgcgtaccgaattggaaggttatttcaatgacgcaacgctgctggccgacctcgaccatgctctacctcaaggtactaggcgtaaactgatcagttcgagccgcaaacgcatcgtcattctggtgactaaagaagcgcactgcttaggcgatattttgatgaaaaactacgatggtagtctggatgtggatattgctgcggtagtcggcaactatgacacactgcaacgtttgactgagcgttttgatattccttaccactgtgtgtcccatgaaggtttgtcgcgtgaagctcacgaacaagcactgttagatgtgattgaccaatatcagccagattatctggttctcgccaaatatatgcgtgtgctgacacctgcgtttgtggagcgttttcaccataaaatcatcaatatccaccacagtttcttgcccgcttttatcggtgcgaagccgtatcagcaagcctatgagcgcggtgtaaaaatcattggtgcaacagcgcattttgtgacgaacgatctcgatgaagggccgatcatcaagcaagacgtgattccggtcgatcatacctttagcgcgcaagatatggcgcaagctgggcgcgatgtagagaagaatgtactcagtaaggctctcaacaaagtgctgaatgatcatgtgtttgtctacggcaacaagaccgtcattttgtaa

SEQ ID NO: 41182 - DNA, 996 bp, Vibrio cholerae
atgactatcaaagtaggtattaacggttttggccgtatcggtcgtttcgttttccgtgctgcgcaagagcgcaatgacatcgaaattgtaggtatcaacgacctgatcgacgttgattacatggcatacatgctgaagtacgactcaactcacggtcgtttcaacggcactgttgaagtgaaagacggtaacctgatcgttaacggcaaaactgtacgtgtaactgcagaacgtaacccagctgacctgaaatggggcgaaatcggtgttgacgttgttgctgaagcaacaggtctgttcctaactgacgaaactgctcgtaaacacatcgaagcaggcgcgaagaaagttgttctgactggtccttcaaaagacaagactccaatgttcgtaatgggtgttaaccacaagacttacgcgggtcaagacatcgtttctaacgcttcttgtacaactaactgtctagcgcctatcgctaaagtactgaacgacaacttcggtatcgagtctggcctgatgacgactgttcacgcaacaactgcaactcaaaaaacagttgacggtccttcagcaaaagactggcgcggtggccgtggtgcttctcaaaacatcatcccatcttcaactggcgcagcgaaagcagtaggcgttgttcttccagaactgaacggcaaactgactggtatggctttccgcgtaccaactgctaacgtttctgtagttgacctgactgttaacctgcaaaaagcagcgtcttacgacgacatcaaagcagctatgaaagcagcttctgaaggcgaactggctggtatcctaggctacactgaagatgcagtagtttctactgacttcaacggtgacactcgcacttctatcttcgatgctgacgcaggtatcgcactgactgacaaattcgttaaagtagtatcttggtacgacaacgaaatcggttactcaaacaaagttcttgacctgatcgctcacatctctaagtaa

SEQ ID NO: 41183 - DNA, 1446 bp, Vibrio cholerae
atgagctcaactttgcgtagaacaaaaatcgtcgccaccttaggtccttccacagaaagccctgaaattctcgaagccattatccgagccggagccaatgtcgttcggatgaatttttcacacggcaccgcggaagaccataaaaaccgtgcgcagaaagttcgcgaaattgccgccaaactcggtcgccacgtcgccttattaggtgatttacaaggtccaaaaattcgtgtttctactttcaaagaaggcaaaattatccttaatgaaggggaacacttcattcttgatgcggaattagccaaaggggaaggtacgcaagaaagcgtggggattgattacaaaaagctaccgcaagatgtttgtaacgacgatattttgctgcttgatgatggccgtgtgcagttacaagttatgcgagttgaaggcaataaaatccacaccaaagtcttggtcggcggtcctctctccaacaataaagggattaacaaaaaaggcggcggtttgtcggcagatgctttgactgagaaagacaaaaatgacattcgacttgcggcagaaattcaagttgagtacctcgcggtgtctttccctcgcaatggtgaagacatgaaattcgcgcgccgccttgcccaagaatctgggctttatgcgcgtatggtcgccaaagttgaacgcgcagaaaccgtctcttgtgatgaaaacattgatgatattgttcgtgcctcggatgtcatcatggtcgcacggggtgatctcggggtggaaatcggtgaccccgaactcatcgccgtacagaaaaagctgatttcacgcgcgaaaaaactcaaccgtgtggtgattaccgcaacgcaaatgatggaatcgatgatcagtaaccctatgccaacccgcgccgaagtcatggatgtggcgaatgcggtgctcgatggcactgacgctgtgatgctgtcgggagaaacggctgcgggcaaatatccggttgaaaccgtcaaagcgatggctgaagtctgcattggtgcagaaaagatgattgagtcgaatgagcaaaactatcgcattaaaagtgtgttccgcacggaagaagaagcgattgctatgtcgactatctatgcagccaaccacttagaaggcgttaaagccatggtcacgctcaccgaatcaggacgcaccgcattaatgacctcaaggctcaattccgtattcccgatttttgcgatgtctgccaaccaagcaaccctcaatcgctgcgcgttattgcgcggggtgatccctttctacttcgataccaaacaagccagcggtctggaagcagccattgcagcattagatgccctcaaagagcgaaacctactcgaagaaggggatctcgtgatcattacccaaggcgatattatgggagtcgaaggctccaccaactgtatgcgcatcttacctgtctattag

SEQ ID NO: 41184 - DNA, 768 bp, Vibrio cholerae
atgtttgtagattctcattgtcatctcgacaagttggattaccaagacttacacgcggatgtcagcgatgtgctcgacaaagcgcaccaagccaaagtggaatatttactctcggttggcgttacgcttgattctttccctaagatgctcgcgatgatcgagcctttctcgcaagtgtatgcttcttgtggtgtgcatccactggatgtgcagagtgatttctcgctcgaccttttccaccaatatgcacagcatcctcgagtggttgcgattggcgaaacggggttggattatcattaccaacctgaaaccgccgatttacaaaaactgcgttttcggcagcagattgagactgcagtggctctgaataaaccgctgatcattcatactcgtaatgctcaacaagatactcttcaattactgagagaaggaaaagcgcagcagtgtggtggtgtgattcactgtttcacagaggatcttgcttttgctcaagctgcgatggagctgggattctacatctctatttcagggattgtgactttccgacaagcaaccgatcttaaagaggtcgtgaaagccttacctctggatcgtcttttgattgaaacggattcaccttatctcgccccagtaccgcatcgtggtaaagagaaccaacctgcttatgtggtcgaagtcgctgcctatattgccgctctaaaaggcgtttctttgacagaagttgcgcaaaaaacaacacaaaattttcaaaatctttttttgcgatga

SEQ ID NO: 41185 - DNA, 975 bp, Vibrio cholerae
gtgtctaatctcaattctctttacccttggttagttcccgtttggcagccttggcaagcgggattagctgcaggaaaaatctcgtcagcgacgttaattcaggcatcagaaggagtaggcgttgagagtttggttgaactcatggcccgcaccttgatgtgtacgagtagccaaagtgagccatgcggtttttgccatagttgcggtctaatgcaatcgggaaatcatcccgactttcatgttgttaagcctgaaaagatcgggaaatcgatcacggtggagcaaattcgccagatgaatcgtatcgcccaagagtcgtcccagctctccggttatcgcttgattgtgattgagcctgccgatgcgatgaatgaatcttccgccaacgcgctactgaaaacgctcgaagagcctgcaccaaactgtctatttattttggttacctctcggattaagcatcttttgccgacgatagttagccgttgccaaagattagtgctccctgcgccaaccactgcgttggtggttgagtggctaaaagggcaggggatcacgacgcctgcttacgccttacatctttgcgcagattcaccgctcaaaacccgtgcctttatgctagaagggggcgcggaaaaatatcatgagcttgaaagccaactgatgaatgcgctgagtggcgatgtgaatgcgcaacttaaatgtatcgcactcatcgatgccgatctgaccacgcatttgtattgggtttggtgtgttttgaccgatgcgcaaaaaattcactttggtgtgcagcaagactattatcccccagcaagtgccgcattagctggccgttttacctattctaaacttcatgtgcagacagcgagcttggaaaggctgatggaacaattgaaccagttcagtggattgaatacagaactgctgttgctgcaatggttatatcaatttagtgatgaggaaacatgtttgtag

SEQ ID NO: 41186 - DNA, 639 bp, Vibrio cholerae
atgaacgcaaaatttatcgtaattgaaggtcttgaaggggcgggcaaaagcacggcgattcaagtggtggtagaaaccttacagcaaaatgggattgatcacatcactcgcactcgtgaacccggcggtacgctgctggctgagaagctgcgcgcgttagtgaaagaagagcacccgggcgaagagcttcaagatattactgagttactcttggtgtatgccgcgcgagtacaactggtggaaaatgttattaaacccgcgttagcaagaggtgagtgggtggtcggtgatcgccatgatatgtcttctcaagcttatcaaggtggtggccgacaaattgcaccaagcacgatgcaaagcctcaaacagaccgcgcttggggatttcaaacccgacttaaccttatatttggatatcgaccctaagcttggtttggaacgtgctcgcggccgtggtgagttggatcgcattgaaaaaatggacatcagcttttttgagcgtgctcgtgagcgttaccttgaattagccaatagcgatgattctgtggttatgattgatgcagcacagtcgattgaacaggtcacggccgatattcgtcgtgctttacaagattggttgagtcaagttaaccgtgtctaa

SEQ ID NO: 41187 - DNA, 834 bp, Vibrio cholerae
ttgagccgtttctttttatggagtgagagcatgtactgggtcaatggtcaacggcgtaatgaagtgcctattcatgatcgatcatttcagtatggcgatggttgcttcacgactatactgaccaaagaaggtcaggtgcagcaatggtcctcacataaggcgcgattacaggcctgtcttgatatcttgcacatacccgagcccaattgggatcgggtatggcagggactgcaaagcatgatcctgccgcaggagaaagctggactgaaaatacacatcagccgaggtttgggagggcgaggttacagtcctactcaagtgagtgaaagcattgttactattagcgcctttgcttttcctgcccactatcaagcatggcgtgataagggattggctgtggggatttgtcagcagcgaatgggattaaatcctctgttggcggggcacaaacataataatcgactggagcagatcctactcaaacgcgagatggataacgcgggatgggatgatggggtctgtttagacatcaatggcaaggtgattgaaaccaccgcagctaatatattttggtgtagagatgggacgatgtttacaccttgtttaagacatgccggagtcgccggtgttgcgcgtcgacagatactcgaactcgcgcagcaacaagagattcctattgtgattgatgaatttacgctggaagacctattgagtgctgaggaagtgtttattaccaatgccttacttgaggttgctccagtcacacaaattggtcaacaacgattgacgataggtagcatgacgcgacgatttcaggagagtagtaattcgtga

SEQ ID NO: 41188 - DNA, 1245 bp, Vibrio cholerae
gtgtccaagcgtcgcgttgttgtcactggcatgggtatgttgtcaccggtaggcaacactgtagagtcatcttggaaagccttgttggccggccaaagcggcatcgtcaacattgagcacttcgacactaccaatttttctactcgtttcgcaggcctggtaaaaggttttgactgcgaacagtacatgtcaaaaaaagatgctcgcaaaatggatttgtttatccagtatggtatcgctgcgggcattcaggctttggaagattcaggcctagaagttaatgaagaaaatgctgcgcgtattggcgttgcgattggttcgggtatcggcggccttgagctgattgaaaccggacatcaagctttaatcgagaaaggcccacgtaaggttagccctttcttcgttccctcaactattgtcaacatgattgccggtaacttgtctatcatgcgtggcttacgtggtcccaatattgcgatctctaccgcctgtaccacgggcttgcacaatatcggccatgcagcacgtatgattgcttacggtgatgcggatgcgatggttgcaggtggtgcagaaaaagcgtcaacgccactgggcatggcgggttttggtgcggcgaaagcactctcaactcgtaatgatgaaccgcaaaaagcgtctcgtccttgggataaagaccgtgatggtttcgtgctcggtgacggtgccggcatcatggtgcttgaagagtacgaacacgcgaaagcgcgtggcgcgaaaatttacgcagaagtggttggcttcggtatgtcaggtgatgcttatcatatgacttcaccgagtgaagacggctctggcggtgcgctggcgatggaagcggccatgcgtgatgcaggcgtgactggtgagcagattggttatgttaatgctcacggtacatctacccctgcgggcgatgtggctgaagtgaaaggcattaaacgtgcgttgggtgaagcagggactaagcaagttctggtttcttctaccaagtccatgacgggtcacttattaggtgctgcaggttctgtcgaagcgatcatcactgtgatgtctttggtggatcaaatggttccaccgaccatcaatctggataatcctgaagaaggtttgggtgtcgatttagtaccgcatgttgcccgtaaagttgagagtatggaatacgccatgtgtaactcgtttggctttggtggtactaacggtagcttgattttcaagcgcatgtaa

SEQ ID NO: 41189 - DNA, 333 bp, Vibrio cholerae
gtggttagaccagaaacctcacgcttgcaactttccctagttcgaataaactacggaatcatcgcattaggcgaaatctgtaaaggaaaagaaaaaatgagcaacatcgaagaacgcgtaaagaaaatcattgttgaacagctaggtgtagacgaagcagaagtaaagaatgaatcttctttcgttgaagacctgggtgctgattctctggacactgttgagctggtaatggctctggaagaggaattcgatactgagattcctgatgaagaagcagagaagatcactactgttcaagctgcgatcgattacgtaaccagcaacgctcagtaa

SEQ ID NO: 41190 - DNA, 747 bp, Vibrio cholerae
atgagtcaattcatgaatctagagggcaaagttgctcttgtgactggcgcaagccgcggcattggtaaagcgattgctgaactcttagctgaacgtggtgccaaagtgattggtacggcaaccagcgaaagcggtgcgcaggcgatcagcgattacttgggtgacaacggcaaaggtatggcattgaatgtgaccaatcctgagtcgattgaagcggttctgaaagccattaccgacgagttcggcggcgtcgacattctggtgaacaatgctggtatcactcgcgataatctgctgatgcgcatgaaagaagaagagtggtcagacattatggagaccaatctgacgtcgattttccgtctgtctaaagccgttttgcgtggcatgatgaaaaaacgtcaaggtcgtatcatcaatgttggctctgttgttggcactatgggtaacgcaggtcaagccaactacgcggcagcaaaagcgggcgtaattggctttactaagtcaatggcgcgtgaagttgcatcgcgcggtgtgaccgtcaacacagttgcaccaggttttatcgaaactgatatgacaaaagcgctgaatgacgagcaacgtactgctacactagcgcaggttccagcaggtcgactgggggatcctcgtgaaattgcgtctgcggttgctttccttgcatcaccagaagcggcatacatcaccggcgagacactgcatgtcaacggcggtatgtacatgatctaa

SEQ ID NO: 41191 - DNA, 939 bp, Vibrio cholerae
atgaaggaaagatttatgagtaagtttgctatcgtatttccaggtcagggctcgcaagcagtaggtatgctggctgaccttgccgagcagtatgctgtggtaaaacaaacattcgccgaagcttcagaagtgcttggttacgatctgtgggcgctggttcaagatggccctgtggaagatctcaaccaaactttccgtactcaacctgcgttgcttgccgcctctgttgcgatttggcgtgtatggcagcaactgggtcttgagcaacctgcggttttagctggtcacagcttgggtgaatattcagcactggtatgtgcgggcgtgattgattttaaacaagcgatcaagctggttgagctgcgtggtcaattgatgcaacaagcggtgcctgccggtacgggtgcaatgtacgcgatcatcggtctagaagatgaagcgattgctaaagcctgtgctgacgcggcgcaaggtgaagtggtttctcctgtaaactttaactcaccaggccaagtggttattgctggtcaaaaagatgcggttgagcgtgcgggcgttctgtgtaaagaagcgggcgcgaaacgtgcgctgcctctgccagtttccgtaccatcacactgcgcgttgatgaagcctgctgccgatgaattggcaaaaactctagcagagcttgaattcaatgcaccacaaattccggtcatcaataacgttgatgttgtggctgaaacggatccggtaaaaattaaagatgcgttgattcgtcaactctatagcccagttcgttggactgaatgcgttgaacaaatgagcgcacaaggtgtcgaaaagctgattgaaatggggccgggtaaagtattgactggtctaacaaaacgtattgtaaaaaccctagaaggtgtcgcagtcaatgacgtggcttctttggatgcggtgaaataa

SEQ ID NO: 41192 - DNA, 951 bp, Vibrio cholerae
atgtatagcaaaattttaggtactggcagctacttgccatctcaggtgcgtactaacgcagacttagagaaaatggtagagaccagtgatgagtggattgttgctcgtactggtattcgcgagcgtcgtattgcggctgacaatgaaaccgttgccgatatggcattcttcgctgcacaaaatgccataaacatggccggtattgataaacacgacatcgatatgattattgtggcgaccaccagtgcgagccacactttcccatcagccgcttgccaagtgcaaggcaaactgggaattaaaggatgtccagcgtttgatttggccgcagcgtgttctggttttatgtacgcgctctctattgctgatcagcatgtcaaatctggcatgtgcaaacatgttttggtgattggtgcggatgcgttgtccaaaacctgtgaccccacagatcgttcgaccattatcttatttggggatggtgctggcgcggtagtggtgggcgcaagtaacgagccgggcattctttctactcacatccacgcggatggcgagtttggtgatttactgagccttgaagtgcctgttcgtggtggtgatagcgataaatggctgcacatggcggggaacgaagtgttcaaagtcgcagtaactcaactatctaaactggtagttgatacgctgaaagccaacaacatgcacaagtctgagctcgattggttggtaccacatcaagcgaactaccggattatctcagcaaccgcgaaaaaactttcgatgtcgctcgatcaggtggtgattaccttagaccgtcatggcaacacctctgcggcgactgtgcctacagcgttggatgaagccgtgcgtgatggtcgtattcagcgtgggcagatgctactgctcgaagcttttggtggtggtttcacatggggctctgctctggtgaagttctaa

SEQ ID NO: 41193 - DNA, 582 bp, Vibrio cholerae
atgcaaaattaccaactagttttagcttctacctctccatttcgccaacaaattctggcgaaattaaagctgcctttcgtcactgcaaaacctgattgcgacgaaacgccgttaatcggagaaacacccgaacacttactgatgcgcttggctgaaaacaaagcgcgtagctgctttttagcagacccgagcttagtgattgggtcagatcaagtctgcgtgatcgatgaccaaatcatcggtaaacccttaactactgaaaaagccgttgaacaacttttacgccaaagtggtcaagcgattaccttttatactggcttagcgctttttaacaaccaaactcagcaaacacaggtgctttgcgatacctttacggtacattttcgaaccttatccgagagtatggctagacgttatgtcgaggctgagcaaccactgcactgtgcaggtagctttaaaagtgagggattaggcattgccttgtttgagcgcttggaaggcgacgaccccaattcgctcatcggcttacccctgattaagctcattcagttgttagaaaatgaagggctcaatgtgatttga

SEQ ID NO: 41194 - DNA, 2685 bp, Vibrio cholerae
atgcctgttactaatctggctgaacttgatgctctggttgctcgcgttaaagcagctcaagctgaatttgctactttctctcaagaacaagtagacaaaatcttccgcgcagcctctctagcagcaaaccaagcacgtatcccgttagcacaaatggcggtagaagaatcaggtatgggtattgttgaagataaagtaatcaaaaaccactttgcttctgagtttatctacaacaagtacaaggacgaaaaaacctgtggcatcctcgaagaagatgacaacctaggtactatgactatcgctgagcctgttggcatcatctgtggtatcgtcccaacgactaacccaacctcaaccgcgatcttcaaatcactgatttctctgaagactcgtaacggtatcatcttctctccacacccacgtgcgaaaaactcaaccaacgcagcagcgaaactggttctggatgccgcaatcgcagcgggtgcaccaaaagacatcatcggttggattgaccaaccttcagttgagctgtcaaatgctctgatgaaacacgatggtatcgcactgatccttgcgacgggtggtcctgggatggtgaaagcggcttactcttctggtaaaccagccatcggtgtaggtgcaggtaacgttccagttgttatcgatgaaactgcagatatcaaacgtgcggttgcttctatcctgatgtctaaaacgttcgacaacggtgtagtgtgtgcttctgagcaagcggctatcgtagtgagcgaagtttacgacgaagtgaaagagcgtttcgcaacgcacaaagcgcacgtcctgagcaaagcggatgcagacaaagtgcgtaaagtgctgctgattgatggcgctctgaacgcgaagatcgtaggtcaacctgctgctgctatcgctgaaatggcaggcgtaaaagtacctgcagatactaaagtgctggtgggtgaaggtctgggcaaagtctcttatgacgatgaattcgctcacgagaaactgtctccaacacttggcctgttccgtgctgacaacttcgaagacgcggttgctcaagcggtgactatggttgagatcggcggtatcggtcacacctcaggtctgtacaccaaccaagacgttaacgcagaccgtatccgttactttggtgataaactgaaaactgcccgtattcttgtcaacatcccgaccactcacggtggtatcggtgatctgtacaacttcaacgttgcaccgtctctgactctgggttgtggttcttggggtggtaactcaatctctgagaacgtaggtcctaagcacctaatcaacaagaaaactgttgcgaagcgagctgaaaacatgttgtggcacaaactacctaagtctatctacttccgccgtggtagccttccaatcgccctgagcgacctagaaggtaaaaaacgcgcattcctagttactgaccgtttcctattcaacaacggttatgcagacgatgtggttgccctgctgaaagcacaaggcatggaagttcagacattcttcgaagtagaagcggatccaacactgtctgtcgtagaaaaaggcgctgcagcaatgcaaagcttccaaccagatgtgattcttgcgctaggtggtggttcaccaatggatgcggcgaagatcatgtgggtaatgtacgagcacccagatactcactttgaagaactggctatgcgctttatggacatccgtaagcgtatctacaagttccctaaaatgggtaaaaaagcagagcttgtttgtatcactaccacttcaggtacggggtcagaagttacaccattcgcggttgtgactgacgacaagactggcgctaagtacccactggcagactacgaactgacaccacaaatggcgatcgtagatgcgaaccttgtgatgaacatgcctaagtctctgaccgctttcggtggttacgatgcggtaactcacgcactcgaagcttatgtatccgttcttgcgaacgaatactcagacggtcaagcactacaagcgctgaagatgctgaaagagtacctaccttctagctacgcgaatggtgcgaaagatccaatcgctcgtgagaaagtacacaacgcagccactatcgctggtatcgcattcgcgaacgcgttcttgggtgtatgtcactcaatggcgcacaaaatcggtgctgagttccacctaccacacggtttggcgaacgctctgctgattgctaacgtagtacgttacaacgcgaacgacaacccaaccaaacaaacggcattctctcaatacgaccgtccacaagcacgtcgtcgttacgcagaagtggcggaccacttaggtctgagccaaccgggtgaccgtactgcacagaagattgagcgtctgctgacttggttggatgaactgaaagttaacctagacattccaaaatcaatccaagctgcaggtgtagcagaagcagacttccttgcaaaagtggatgagctagcggttgaagcgtttgatgaccaatgtactggtgcaaacccacgctacccactgatcgctgagctgaaagaagttctgctggcttcttactacggtaagccattcgttgaaggtcaaactttcgaaggcaccactgttatcgtaaagaaagcagatcaagaagcggcgaaagcgccaaaagcgaaaaagtaa

SEQ ID NO: 41195 - DNA, 1944 bp, Vibrio cholerae
atgacccggttatttattgcagaaaaacctagccttgcgcgagcgattgccgatgcactacccaagcctcataaaaaagaacaagggtgtattcgctgcgctaatggcgatatcgtgacttggtgcattggtcaccttctcgaacaagtcgagccagacgcttatgatgagcgatacaaaaagtggaatatggcggatttgcctatcattccagagcagtggcaactgcgcccaagaaaatcctcctctcaacagctcaccgtcgttcgtaagctactcaaagaagcaacgcagattatccatgccggtgaccccgatcgcgaagggcaactgttggtggatgaggtgatcgattattgcaaagtgccgaagagcaaaaaagaaaccgtgcagcgccttttgatcagtgatttaaacctttctgcagtcaagcgtgccttacaaggcttgcgcagtaatcgagagtttattccactctctgtttcggctttagcgcgttcacgcgctgactggctgtatggtatgaatatgtctcgagcttataccctgcttgggaaaaaagccggttatcaaggcgtgctctccgtagggcgagtacagacgccagtactgggtttagtggtgcgacgggatgaagagatcgaacattttatcccgcatgattattttactcttgatgctttaattccataccaaaatggcaccgaatacttcgacatacgtgcccgttggaaaccaagtgaggcctgcttaccttggcaagatgaagaagggcgggtcactaaccgtaaattggtggacaatgttgccagtcgcattgcgaatcagcccgcgactgtgactgaatcagagcaagatcaaaccaagcaagcggcccctttgccctattcactttcagcgctgcaaattgatgcggcaaaacggtataacttcagcgcacaacaagtgttggatctgtgccagtctctttatgaaaagcataaattgatcacttatccgcgatctgattgccgatacttaccgaaagagcatttagctcaggctcccgacgtggtagcggcaatagccaacaatgcgcaagagatggtcaccgcagtgaatgatgcggatttatcactacgctccaaagcgtggaatgacagtaaagtcgacgcgcaccacgccatcattccaacgccgaagaaagcgtcggttaatgcgctgtcagggcatgaaatgaaagtctatcaactgattgcgcgtcagtaccttatgcaattttatcctgcggcgatttatgcagaagccaaactggtttttaacatcgctggcggcatttttattgccaaagggcgtcaactgctcagtgctggatggaaagtgttgaccggtcagcaagatgagcaagaagagtgcgtggataaagtcccccctttgcctgttggcattgtgctgcagtgtcgagaaggggaaataaaacagagacaaaccgagccgccacgccattttacggaagctacattactgcaggcgatgacggggattgcccgtttcgtggccgataaagagctgaaaaaaattctgcgtgagacggatggtttaggcactgaagccacacgagctgggatcttggataccttgtttaagcgtggattactgcagcgtgataacaagctcattaaaagcacgccagctggccgaggtttgattcatgcgttacccagtgaagccacctatcccgatatgacggcacattgggaacatcaactgcaagcgatcgcggaaaaggggcaagcttatcaaccctttatgcagacactacaaggccgcctcgagcagttaattgagcaagttcaggtcgcaccggttcctgtatcattgcaagctttgccagcggtgagtaaacctgcctttaagcgcacacgccgtgcaccaaagagtaaagccagaacgtataaagcttaa

SEQ ID NO: 41196 - DNA, 765 bp, Vibrio cholerae
ttgcacatggaattacgtatggttggccgcttatcttggattacgctattcacactttttttagttgggtgcagcagtgcacctgatgactcctcccctcattcgcaggtgaacgatcctctggaaagtttcaaccggcaaatgtggacaattaactatgactacctagacccttatgtggtgcgtccggtctctctattttatgtcggttatgtacctaagcctgtacgcagtggcattgccaacttcctctctaacttagacgagcctgccagcatggtgaataacctgctgatgggcaatgggacaaaagcggtcgatcactttaatcgtttttggattaataccagctttggtttactcggtttgattgatatcgcttctgaagcaggcatcaaaaaatacgatgataaggcgttcagtgatgcggtaggccattacggtgtgggcaatggcccctatttaatggtcccaggttatggtccctatacggtacgcgaagtgaccgatgtggtggatggcatgtatttcccgcttgcctatctcaatatctgggctggggtcggcaaatgggcacttgaaggcatggaaacgcgcgctgcgttagtttcgcaagaggccttattacaagactcacctgatccttacagtttggctcgcgatgcttatctccaacggcaagctttcaaagcggagatccaagtggatgactatgaccctgaggaagaagagtatctcgatgagtatttaaatgaagggttatga

SEQ ID NO: 41197 - DNA, 669 bp, Vibrio cholerae
atgatgcctgcttttattcagtttattcatcgtgaacttttaattgcttttcgccgtcaggcggatgtgtttaaccctctgtggttttttatcatcgtgattaccctgtttccgctcagtgtgggaccagaacctgccttgttggcacgaattgcgccggggattgtttgggtggccgctttattagcggcattgctctcattggagcgtttatttcgtgatgattttcaagatggtgcattagagcaagcgatgctgacaccattaccgctctcagtggtggtactggctaaggtgacggctcattggctactgacaggcttaccgctgattttaattagcccactactggcgatcttgctttcatttgatagctcagcctggcttgcggtagtgctgactctgttgctggggactccaacactgagttttattggggcaattggggtggcactcaccgtgggtttgcaaaagggtggggtgctattgagcttattggttttgccgctcttcatccctgttttgatatttgcgacctcggcgattgatgcggcggcattgggaatgccgtataacggccagcttgcgattttagcggctatgctcatgggttcgatgactctaacgccatttgcgatcagcgcggcgttacgagtaagtgtgcattga

SEQ ID NO: 41198 - DNA, 777 bp, Vibrio cholerae
atgatcgtttggagtgtagcaaaccaaaaaggtggggtaggaaaaaccaccacaacgattacattggcaggcttattaagccagcagggtaagcgtgtcctgctggttgataccgatccacatgcctcactgactacttatttggggtacgattctgatggtgtaccagccagtttattcgacttgttccagttacgtgaatataacgaagcttctgttaaacctctgattttaaatactgatattcaaggtattgatctgatccctgcccatatgtctcttgcgacactggatcgtgtcatgggaaatcgcagtgggatggggctgattttaaagcgtgcactgctcgcgctgcgtcatgtttatgactatgtactgattgattgcccacctattttgggggtaatgatggttaatgcgttggcggccagcgatcgtattcttattcctgtgcaaaccgaatttctggcgatgaaaggtctagagcgtatggttcgcactttggcaattatgcagaaatcgcgcagccgtgagtttaaagtgactatagtgccaaccatgtacgataagagaacgcgcgcttcgttgcagacattgaatcaactgaaaaaggactatccagacaaagtttggacctctgcagtaccgattgataccaaatttcgtgatgccagtttacagcgactccccgcttcgcattttgcagaggggagccgtggcgttttcgcttataagcagcttctgcttttcttagagaggctcgctatcgatgagtag

SEQ ID NO: 41199 - DNA, 720 bp, Vibrio cholerae
atgatttcattagaacaggctaaagaactcgtgcaacttttggaacaaggacgtcaagacgacgctaatcgccttttcacctatgtctacgagtctgccaataaccctatgtttaaagagatagggatgctgacgcgagacttacacgaagcgctgaaaaactttcagattgatgagcgcttcagtgaaatcgcgacggatgaaattccagacgcacgggaaagactgcattacgttatacagaaaacggaagtcgcagcgaacaaaaccatggatgcagtggatcggtgtatgccgatagccgacaaactacatgaaagcttgctgctgattcgccctgaatggaatggcttgatgaatggtcggattgaactgatgcacttcaagtcactatgccaccggattgatgacttgctctcgcaagtagaaggcgacagcagtgaattgcgtggtgaattgactgagatcctgatggctcaagactttcaagacctgacaggacaaatcatcaaacgtgtgattaatctggtcaatgaggttgaaaaacgtttagtcgaaatactgacggtttttggcgcagcgcaaaaagaacaaaaagcagacaaggcgacagtggcatcaatagaaccagaggggccgattctcaatcctcatgaacgaattgatgctgtctcatctcaagacgaagttgacgatctgttatcgagtcttggattttag

SEQ ID NO: 41200 - DNA, 393 bp, Vibrio cholerae
gtggaggcaattttgaataaaaacatgaagatccttattgttgatgacttttcaacaatgcgccgaatcgttaaaaacctacttcgagatctggggttcaataacacgcaggaagcggacgatggcctaacggcattgcctatgctcaagaaaggtgattttgactttgtagtcacagactggaatatgcccggtatgcaaggtattgacttgcttaaaaatatccgtgccgacgaagaactgaagcacctgcctgtactaatgatcacagcagaagccaaacgtgagcaaatcatcgaagccgctcaagcaggcgtgaatggttacatcgtaaaaccatttaccgctgctacgcttaaagaaaaattagacaaaatttttgagcgtttataa

SEQ ID NO: 41201 - DNA, 1800 bp, Vibrio cholerae
gtgatatgcctcacttcaaaaatgatggcattcctcccctatttccttgaattgaagggtaaacgtgtgaatatccaagcactgatcaatgatcgagtttctcaggctattgaagccgcaggcgcaccagcaggcactccggcactggttcgccaatcagcaaaagcacaatttggtgactaccaagccaacggcattatgggcgctgccaagcagttaggtaccaatcctcgagaatttgcacaaaaagtcttggatgttctcaatcttgaaggtatcgcgagcaaaaccgaaatcgcaggtccgggttttatcaatattttcttaagcgaagagtttttggctgcgcaagccgaagcggctctggcggatgcacgccttggcgtggcacaagaagccccaaaaaccatcgtggctgactactcagcgcctaacgttgccaaagagatgcacgtaggccatctgcgttcaaccatcatcggtgatgcagtcgtacgcactctggaattcttaggccataaagtgatccgagctaaccacatcggtgactggggcactcagttcggtatgttgattgctaaccttgagcgcgtacaaaaagcatcgggtgaggtttcgatggagctttcggatcttgaagctttctatcgtgaatcgaaaaaactgtatgacgaagatgagcagtttgcagaaacagcacgtaactacgtcgtgaaactgcaaggtggcgacccattctgtctagagatgtggaagaagttggttgacgtgaccatgattcaaaaccaacgtaactacgaccgcctgaatgtctccctcactcgcgaaaacgtgatgggcgaaagcatgtacaacgacatgctgccacaaattgtcagcgacctgaaagccaaaggcttggcagtggaagatgatggcgcgcaagtggtgttcttggaggaattcaagaataaagacggcgagcctatgggcgttatcattcaaaagcgtgatggcggcttcctgtacacaacaacggatatcgcctgtgctaaataccgctatgaaacactgggcgcagatcgtgtgttgtacttcatcgactcacgtcaacatcaacacttgatgcaagcatggactatcgtacgcaaagcgggttatatcccagaaaacgtcagcttagagcaccacgcattcggcatgatgctgggtaaagatggtcgcccattcaagactcgtgcaggcggcactgtacgtttggcggatttgctggatgaagcacaagagcgtgccaaggccctgatcgaatcgaaaaatccagagttatccgcagaagaaaaagccaacatcgccaatacggttgcgatggcggccgtgaagtacgcggatctttctaaacaccgcactacagattatgtgttcgattgggacaacatgctggcatttgaaggcaataccgcgccttacatgcagtatgcttatactcgtgttgcttctgtttttgcgaaagcgggtgtggatatgaatgagctaacaggccatatccaaattactgaagagaaagagaaagccttgatcgccaaactgctgcagtttgaagaagcggtacaatcggtcgcgcgtgaaggtcaaccgcacatcatgtgtagctacctgtttgaactggctggcattttctctagcttctacgaagcttgtccaattttggtcgcagagcaagaaagcattaagcagagtcgtttgaaactcgctgcactgacagcgaaaaccatcaagcaaggtcttgctctactgggtattgacactctagagagaatgtaa

SEQ ID NO: 41202 - DNA, 231 bp, Vibrio cholerae
atgaaattgtcacaaatgcaagcaggcgagcgtggaatcatccttgcattggatggactttctgatacggtcagaaagaaactgatggtgatgggcgttctccccaataccgaagtcgtattaattcgccgagctccaatgggtgatccgcttcaagttgaagtacgcggtgtgtcgatcgcgttgcgcgaaaatattgcggcaaatattgatgtggagagagcacaatga

SEQ ID NO: 41203 - DNA, 873 bp, Vibrio cholerae
atgtcgattcttatcaataaagacactaaagtcatttgtcagggtttcaccggtggtcaaggtactttccactctgaacaggcgattgcttatggcacacaaatggttggtggtgtatcgccaggtaaaggcggtaccacgcatctaggtctaccggtatttaataccgttcgtgaagccgttgaagtgactggcgcaaccgcaactgttatctacgtaccagcaccattttgtaaagatgcgattctggaagcgatcgatgctggcatcaagcttattgtgaccatcactgaaggcattcctaccactgacatgattgatgtcaaagtgaaactggaacagactggcgttcgtatgattggccctaactgcccaggtgtgattacaccggatgagtgtaagattggcatcatgccaggacacattcacaagaaaggtaaagtgggtatcgtttctcgctctggtactttgacttatgaagcggttaaacaaaccacagacgaaggtttcggccagtctacctgtgtgggcatcggtggcgacccaattccggggtcaaacttcatcgacatcctgaagatgttccaagaagatccagcgactgaagcgattgtgatgatcggtgaaatcggcggtaccgcggaagaagaagcagctgctttcatcaaagccaacgtcacaaaacctgtcgtttcttatatcgcaggtgtaacggctcctccgggcaaacgcatgggtcatgctggtgcgatcatctctggtggtaaaggtaccgctgaagagaaatttgcagcacttgagtctgcgggcgtgaagacagtaaaaagtcttgccgatattggcaaagcgctgcgtgaagtgactggctggtaa

SEQ ID NO: 41204 - DNA, 2811 bp, Vibrio cholerae
atgcacaacggcgtgatgaaggcatggctcgagtcttcacacttggctggcgccaatgcaacttacgtagaagatctctacgaactgtatctaagtgatcccgatctggtaagtgaggagtggaaacgtgtttttgatgggttgcctgcgcacccaacgaatgtggttgaacaaccgcactcacgcgtccgtgactacttccgacgactcgctcaagagactaagcattacaatgtccaagttagtgatcctgaagtcgatgcaaaacaagtaaaagtactgcagctaattaacgcataccgtttccgcggtcatgaagctgccaagcttgaccctctcggtttatggaaccgccctgaagtggcggaactgaatccctcattccataatttgacccaagaagatatggaagagaccttcaacgtgggctcctttgcgattggcaaagacacgatgaagctgaaagatatctatcaatccctacaaaaaatctactgtggctctgtcggtgcagaatacatgcacatcaccgacactgagcagaagcgttggattcaacagcgtctcgaaccagttgtgggtacccctgtattcagtaaagaagaaaagcgtactttccttgaagagctgactgcagctgaaggtttagagcgctatcttggtgcgaaattccctggtgctaaacgtttctctctcgaagggggggatgccttagttccgatgaccaaagagatgatccgtcacgcgggtgccagtggcatgcgtgaagtggtgattgggatggcgcaccgcggtcgcttgaacatgctggtcaacgttctgggtaaaaaaccgcaagatctgtttgatgagtttgccggtaaacatggcgaaggctggggcacaggtgatgtgaaatatcaccaaggtttctccgctgactttgcgacaccgggcggtgatgttcacttagcactggctttcaacccatcgcatcttgagattgtgaaccctgttgtgatgggttcagtgcgcgcgcgtcaagaccgcctaggtgatgaagatggcagtaaagtgctacctatcactatccatggtgactctgcgattgcaggacaaggtgtggtggctgaaaccttcaacatgtctcaagcgcgtggtttctgcgtcggtggtacagtacgtatcgtggtcaataaccaagtgggcttcacgacatcaaacccacgcgatactcgctcaaccatgtactgtaccgatattgccaagatggtacaggcaccgattttccacgtgaattcagacgatcctgaagctgtagcctttgtcactcgtctagcgcttgattaccgtaatgaattcaaacgcgatgtggtgattgatctggtgtgttatcgccgtcatggtcataacgaagcggatgagccaaacgcaactcagccattgatgtaccaaaaaatcaagaagcatccaacacctcgcaagctgtatgcagatgtgttaactgagcgtggtgagtgcgatctcgaaaccgcgactcaactggtgaatgaatatcgcgatgccctagatcacggtgaagtggtggtcaaagaatggcgtccaatggcgatgcactctgtggactggtcaccgtatttaggtcacgactggcatatcccttggaatagcgaatatgcgatggagcgattgcaagatcttggtcgtcgtgtttgccaatatccggaaagccatgtgttgcatagccgtgtagaaaaaatctatcaagatcgtctctctatgatctctggcgagaagatgctggattggggtatggctgaaacgcttgcgtatgccacattgcttgatgacggtaagcgcatccgtatctcgggtcaggactctggtcgtggaaccttcttccaccgtcacgccgttctgcataaccaaaacgatgcgagtacttatattccactctcacagatccatgctggccaaggcccgtttgaagtctttgactcagtattgtcagaagaggcggtattggcattcgaatacggctatgcgacagcggagcctagcggtttgacgttgtgggaagcacagtttggtgattttgctaacggtgcgcaggtggttattgaccagtttatctcctctggtgaacagaagtggggtcgtctatgtggcctgactatgttgctgccacacggttatgaaggccaaggccctgagcactcctctgcacgtttagagcgttacttgcagctgtgtgctgagcaaaacatgcaggtggttgttccgtctacccctgctcaggtttaccacatgattcgtcgtcaagtggttcgcccaatgcgccgccctctggtggtgatgtctcctaaatcgctgctgcgtcatccactgtgtgtctccagtatggaagatcttgcccacggtactttccagccggcgattggtgaaattgatgcgctgaatccgtcgcaagtaaaacgcgttgtgttctgttctggtaaggtttattacgatctccttgaacagcgccgagccaatgaacagcaagacgtggcgattgttcgtatcgaacagttgtacccattccctctggaagaagtacaagcggccattgcaaattacaccaatgtggtggattacgtctggtgtcaggaagaaccgcaaaaccaaggtgcttggtacagtagccaacataacttccgcgctgcgattccagcgggtgctgatctgaaatacgcaggtcgtcccgcttcggcatctcctgcggtcggctatatgtcggtgcacatgaaacaacaaaaagcgttgattgaagacgctctgaccctagcgtaa

SEQ ID NO: 41205 - DNA, 1767 bp, Vibrio cholerae
gtgactattccagttcgttcttttgacgccgtagtaatcggcgcaggtggtgcaggtatgcgtgctgcactacaaatttctgagcaaggcctaacttgcgcactgctttcaaaagtgtttccaactcgttctcatacggtatccgctcaaggcggcattaccgtggctttgggtaactcacataaagatgattggcagtggcatatgtatgacacggtaaaaggttccgactatatcggcgaccaaaatgccatcgaatacatgtgtaaaaacggcccggaatccgtgattgaacttgagcgcatggggctacctttttctcgttttgagaacggcacgatttatcagcgtccttttggcggtcagtcaaaagagttcggtggtgaacaagctgctcgtacggcagcagcagcagaccgtactggtcatgctctactgcacacgctttaccaacaaaacgttaaacataaaaccaccattttctcggaatggtatgcactggatctggtgaaaaaccaagatggtgctgtgctcggttgtactgcaatctgcatggaaacaggcgaaatttgctacttcaaagccaaagcaacagtgcttgcgacaggcggtgcaggtcgtatttacgcttcaaccaccaatgcacacattaacacgggcgatggtgtcggtatggctttgcgtgctggcgtaccaatgcaagatatggaaatgtggcaattccacccaacgggtatcgcgggtgctggcgttctggttacagaaggctgtcgtggcgaaggtggctatctgctgaataaagatggtgagcgtttcatggaacgttacgcgcctaacgctaaagatctagcaggtcgcgacgtggttgcacgttcaatgatgatcgaaatccgtgaaggtcgtggttgtgatggcccatggggtccacacatcaaactgaaactggatcatttaggtcgtgatgtattggaatctcgcctaccgggtatctgtgaactatcacgtacctttgctcacgtggacccagtgaaagaacctattcctgttatcccaacctgtcactacatgatgggtggcgtaccaacacaagtgtctggtcaagcgatcaaacaagacagccatggtaaagatgttgaagtccaaggcttgtttgcttgtggtgaaatcgcttctgtatcggtacatggtgccaaccgtttaggcggcaactcactgcttgatctggtggtatttggccgcgcaacgggtctacatcttggtgaaactctgcgtgctcaagctgaggctcgccctgcgactgcatcggatatcgaagcttctctggctcgtactatgcgttgggaaaacagcaaaggtggcgaagatcctgtcgtgattcgtaaagatctgcagcgctgcatgcaaaacaacttctcggtattccgtgaaggtaaggcgatggctgaggggctggaagagctcaaagtcatccgcgaacgtttgaaaaatgcccatctggcggacaaatcaaccgaatttaacactcaacgtattgagtgtttagagttggacaacctgatggaaacggcattttcgactgcagtagcggcaaactaccgtactgaaagccgtggtgcacatgcgcgttttgactatccagagcgtgatgatgagaactggttgtgccactcaatctacaatccggaaacggaacagatgagtaagcgtgaggtcaatatgacaccggtttaccgtgacccgttcccgcctaaagtgcgtacatattaa

SEQ ID NO: 41206 - DNA, 1296 bp, Vibrio cholerae
atggttatggcggataagaaagcgacccttcacatcgaaggtaaagcgccaatcgaattgccaattatggatggatcgcttggtccacaagtgattgacgttcgtactttaggctcaaacggttactttacttttgacccgggttttcttgccactgcatcctgtgaatctcaaattacttatatcgatggcgctaagggcattctgttgcaccgcggctaccctatcgatcagttagccaataacgctgattacttggaagtgtgttacatccttctttacggtgaagcccctaatcgtaagcaatatgaagagttcaagaaaatcgttactcgtcacactatggttcatgaacagatcgcgagctttttccacggtttccgccgtgatgctcacccgatggctgtgatgtgtggtgtggtgggtgcgttagctgctttctatcatgattcactcgatatcaataacgacacccaccgagaaattgcggcttatcgtctgctttccaaaatgccgaccttggctgcgatgtgttacaaatactcagttggtcaaccgtttatctacccacgtaacgatttgagctatgcagaaaacttcctgcacatgatgtttgccacaccttgtgaggagtatgaagtgaatcctatcgtggctcgtgccatggacaagattttcactctacatgcggatcatgaacaaaacgcatcgacatcgactgtacgtctggcaggttcatcgggtgctaacccatttgcgtgtatcgcagcaggtatcgcttctctttggggccctgcacatggtggcgcaaacgaagcttgtctacgtatgcttgaagagatcggctctgttgataagattcctgaatacgtaagacgtgcaaaagacaaagatgacccattccgtctaatgggctttggtcaccgagtgtacaaaaactacgatccacgtgccactgtaatgcgtgaagcgtgtcatgaagtgctgaaagagctaagcattcaagatccactgctcgacgtcgcgatggaacttgagcgtattgcgctgtctgatgagtactttattgagaagaaactctatcctaacgtcgatttctactcaggcatcattctcaaagccattggtattcctgtgtctatgttcacggtgatctttgcgatgtctcgtactatcggttggattgctcactggaatgaaatgcacagcgatccggacaaccgtatcggtcgtccacgtcagttgtacacaggtcaaaaactgcgcgatttcacacccttgcatgaacgcagttaa

SEQ ID NO: 41207 - DNA, 774 bp, Vibrio cholerae
atgtcagcacttcttaactacaaacttgaaggcagcggtgagaccgttgttttgatccatggcttatttggtagcttggataatcttggcttgcttgcgcgcgatctgaaaaacgatcaccaagtactgagcttggatctgcgtaaccacgggctatccttccacagtgatgagcacaattacgcgttgatggcacaagacgtaaaccagttgcttgaacacctcaacctcacttcggtagtggtgatcggtcactcgatgggcggaaaagtggccatgaaattagccgatattgccgcagaaaaagtccgtcaattagtggtgctggacatgtcacctgtcgcgtatagccaacggcgtcacgacaatgtgtttgctggactcgaagcggtgttagtgcaaaagcccacgtcacgcagtgaagtgatggcaattttagcgcaacatattgagcaagaaggcgttagacaatttctcggcaaatctttaatgtcggaacagaacgtgatgacatggcgcttcaatgttgcggcactcaaagcacattatgcagagattttaggctgggatatcatcgccaaatgccggattccaaccttatttattaaaggggcagattcggattatctgaccacacaacatcagcccatggtgcaagcccagtttagccaagccaaagctcatgtgatcgcaaacacgggacactggctgcacgcggaaaaacccgctgaagttatacgtgcaatccgtaaatttattgatgtgcccgtttaa

SEQ ID NO: 41208 - DNA, 1017 bp, Vibrio cholerae
gtgatgagccaacaatttaatgttgccatttttggcgcaaccggcgctgtaggcgaaaccatgttggaagtactgcaggagcgtgagtttcctgtggatgaacttttcctgctggccagtgagcgcagtgagggaaaaacctatcgcttcaacggtaaaaccgtgcgtgtgcaaaatgtcgaagaatttgactggtcgcaagtgcatattgcgctgttttctgccggtggtgagctttctgccaagtgggctccgattgccgcagaagcgggtgttgtggtgatcgacaacacttcacacttccgttacgactacgacattcctcttgtggtacctgaagtgaacccagaggcgattgccgaatttcgtaaccgcaatattattgctaacccaaactgctcaaccattcagatgcttgtcgcgctaaagccgatttacgatgcggtggggattgaacgcattaacgtgacgacttaccaatcggtctcaggtgctgggaaagctgggattgatgagttagcaggacaaaccgctaaactgctcaatggctatccagcggaaacgaatacttttagccagcagatcgcgtttaactgtattccacaaatcgatcagtttatggacaacggttataccaaagaagagatgaagatggtgtgggaaacccagaaaatcttcaatgatccttcgatcatggtcaacccaacgtgcgtacgtgtaccggtattctacggtcatgcggaagccgtacacgtggaaactcgcgcgccaattgatgctgagcaagtgatggatatgctagagcaaaccgatggtattgaactgttccgcggtgcggatttcccaactcaagtgcgtgatgccggcggtaaagaccatgtgttggttgggcgtgtacgaaatgacattagccaccatagtggaatcaacttgtgggtagtggcggataacgtgcgtaaaggtgctgccaccaatgcggtgcaaattgcagagctgctcgtacgcgattacttctaa

SEQ ID NO: 41209 - DNA, 1164 bp, Vibrio cholerae
ttgccgcaaattcccactatgaaaattctgattgatgagaacatgccttacgctcaagcgctgtttagtcagcttggcgaagtgatcttaaaacccggccgtaccttaaccgccgatgatctgattgatgtcgatgccttaatgattcgctcagtcaccaaagtcaatgacgctctccttgctaaagcgaatcgcttgaagttcgtgggtaccgcgaccgcgggtatggaccatgttgaccaagctctgttaagagagcgtggcatcttcttcacggcggctcctggctgtaacaaagtcggtgttgcggaatacgtgtttagcgtgctcatggtgcttgcgcagcagcaagggttctcggttttcgataaaacggtaggcatcatcggtgctggccaagtgggtagctatcttgcgaagtgtctttctggcattggcatgaaagtgctgctcaatgatccgcctaagcaagcgcaaggtgatgagcgagaatttaccgagctggaaaccttacttaaacaagcggatgtgatcactctgcatacgccgattacccgcggcggtgagtggccaacccatcatctgattgatgcggcaattcttgagcaactgcgcagtgaccagattttaattaatgcggcgcgtggccctgtagtggataacgcggcgctgaaagcgcgtttacaacaaggcgatggttttaccgctgtattagacgtgtttgagtttgaaccgcaagtggatatggaattgctaccgctgctcgcatttgccactccgcatattgcaggttatggccttgaaggtaaggcgcgtggtaccaccatgattttcaatagctactgcgagtttcttggcagtgcacactgtgcaaacccagcaagcttgttacccaaagcgcctgtgcccaaagtttatctagagcgagcatgggacgaggaaacactgcgtacgctaactcaaattatttatgatgtgcgtaaagatgacgcacagtttcgccgcgagattcaccaacccggagcgtttgacttgatgcgcaaacactattgggatagacgtgaatacagcgcggtgactctagctggaggcgctgattgccatttggctcctttggctaaactcggttttcaagtagaggtatgtgatgagccaacaatttaa

SEQ ID NO: 41210 - DNA, 1086 bp, Vibrio cholerae
atggcaggaaacagtatcggacaacatttccgagtcaccacattcggagaaagtcacggtatcgcactgggatgtattgtcgatggttgcccaccggggctcaccatcagcgaagcggatttacaagtggatcttgaccgtcgtcgccccggcacatcgcgttataccacccagcgtcgcgagccggatgaagtcaaaattctctctggtgtgtttgagggcaaaaccacaggcacatcgattgggctattgatcgaaaacactgaccaacgctctaaagattattcggatattaaagacaaattccgtcccggacatgcggactacacctatcatcaaaagtacggtgtgcgagattaccgtggcggcggccgttcatcggcacgtgaaaccgccatgcgtgttgcggcgggagcgattgccaaaaaatacctgcagcaagagtttggcattgaagtgcgtgcttacttgtcgcaaatgggggaggtcgcgattgataaagtggattggaatgagattgaaaacaacgatttcttctgccctgatgtcgataaagtggctgcgtttgacgagctgatccgcgagctgaaaaaagaaggcgattcgatcggcgccaaaatccaagtggttgctactggcgttccagttggcttgggtgagcctgtgtttgatcgcttagatgcggatattgcccatgccttgatgagcatcaacgccgtgaaaggagtcgagattggtgatggctttgatgtagtgcgccaaaaaggcagccaacatcgtgacccgctcactccacaaggtttccgctctaaccattccggtggcattttaggcggtatctctagcgggcaagatattgttgctaatattgcgttgaagccaacgtccagcattaccgtgccgggtgaaacaattgatgttaacggtgagccaaccgagcttatcaccaaaggtcgtcatgacccttgtgtggggattcgcgctgtaccgattgcagaagccatgttggcgattgtgctgatggatcatctgctgcgtcatcgtggtcagaaccaaggtgtcgtaacgacaacaccgaaaatttag

SEQ ID NO: 41211 - DNA, 1131 bp, Vibrio cholerae
ttggcagaatccgacggacaagaaaggactgaagaagccacgccccgaaggttgcagcaggccaaggaaaaaggccaagttgcgcgttcgaaggagttggcttctgtctcggtattggtagtaggtgcggtttccttgatgtggtttggcgagatcttggccaaaggattgatggtggccatgcagcgcctttttgagctaagccgtgaagagattttcgatcttggtaagctgtttgacatcattggtggctcactagtcaacctgctgttgcccttgctcatgatcctgagcaccttgtttatcgctgccttaatcggtgcggcgggggtcggtgggatcagtttttccgctgaagcggcgatgcctaagctgtcgaaaatgaatccgctcagtggcttaaagcgaatgtttggtatgcaaagctgggtcgagctgctcaaatccatcttgaaagtgttgctggtgtctggcgtcgctttttatctgattgaagcttcgcaaaaggatctgttccagctcagtcttgatgtgtatccgcaaaacatctttcatgcgctggatattctgctcaactttgtgttgctgatcagttgttcgttactggtggtggtggcgattgatattccattccagatttggcagcacgctgaacaactgaaaatgaccaaacaggaagtcaaagacgagtacaaagacaccgaaggtaaaccagaggtgaaagggcgcattcgtatgttgcaacgtgaagcggcgcagcgacgtatgatggctgcactgccacaggccgatgtcatcatcactaaccctgagcacttttcggtagcactgcgttataagcaaaacaccgataaagcgccggtggtgatagctaaaggtgtcgatcatatggcactcaagatccgtgaaatcgcgcgggaatatgacattgcgattgttcctgcaccgcccttagcacgcgccttgtaccacacgaccgagctggagcagcaaattccggatggcctattcgtggccgtcgctcaagtgttggcatttgtgttccagcttaaacagtatcgccgcaaaggtggtcagcgaccgaaactcaatgaggagaatatgccgatcccaccggatatgcgttactaa

SEQ ID NO: 41212 - DNA, 1047 bp, Vibrio cholerae
atggctaaagacaataaagatggtggagaagtggtcgaatcaaccattgatatcagtgaaattcccggtgaagaaaaagcagccattttgctgctcagtttgaatgaagaagatgccgcaggcatcattcgccacctcgagcctaaacaggtacagagggtgggtagtgccatggcacgcgccaaagacttaagccaaaccaaagtgtcagcggtgcatcgtgcctttttggaagatattcaaaaatacaccaacattggtatgggcagtgaagacttcctacgtaatgctctggttgcggcgttgggggcggataaagccaacaacttggtggatcaaattctgcttggtaccggctcgaaaggtctggattcactaaaatggatggatccacgtcaagtagcgagcattattatcaacgagcacccgcagatccaaaccatcgtattgtcgtaccttgagccggatcaatcggccgagattttggcgcagtttgctcagcgtgacgctctcgatttgttgatgcgtatcgccaacttggaagaagtacagccttcagcgctggccgagttgaacgaaatcatggagaaacagttcgcgggtcaagcgggggcacaagcggccaaaattggtggcttgaaagctgctgccgacatcatgaactatctggacaacaacatcgaaagcgtattgatggaaggaatgcgcgaaaaagacgaagacttggcaactcagatccaagatttgatgtttgtgttcgagaacttagtcgaagtcgacgatcaaggcatccaaaaattgctgcgtgatgttccgcaagatgtcttgcaaaaagccctcaaaggggcagacgatacactgcgcgagaagatcttcaagaacatgtcgaaacgtgctgctgagatgatgaaagacgatttggaggcgatgccaccgatcaaagtgtccgatgtggaagcggctcagaaagagatcttgtctatcgctcgtcgtatggccgacaacggcgagatcatgctgggcggcggtgccgacgaattcttataa

SEQ ID NO: 41213 - DNA, 909 bp, Vibrio cholerae
atgtttaagtcacagaccgcaatcttgccagaagctggcccgtttgccctgtacacactactgaaagttcgtcagaaccacgcccatgttttgcaagcgcttaaggctttgcctgcgttagttgaggaaatcaatcaaaatcagccgggagccgagctgacggtttctgtcgcgttcagcaaaggtttttggagccattttgagatggcgtcgccaccagaactgattgattttcctgagctgggtgagggcgaaactcacgcgccaagcacggatgtggatgtgttgatccattgtcacgccacgcgccacgatttgctgttttatactctacgtaaagggattagcgacatagctcaagatattgaaatcgtggatgaaacctatggtttccgttatttagacgcacgtgacatgacgggctttattgatggcacagaaaacccgaaagctgagaaacgtgcggaagtcgcgttggtggctgatggcgactttgcgggaggcagttatgtgatggtacaacgctttgtgcataatttgccggcgtggaatcgtctcaacttagcggcgcaagaaaaagtgattggtcgcactaagcctgattccgtcgagctagaaaatgttcctgccgcttcgcatgtaggtcgagtggatattaaagaagaaggtaaaggattgaagattgttcgccacagtttgccgtatggcagcgtgagcggcgatcacggcctactgtttattgcgtactgtcacacgctgcataatttcaaaactatgctggaaagcatgtacggtgtcactgatggcaaaacagaccaactgctacgctttaccaaagccgtgaccggggcttatttctttgcaccgtcgcaagtgatgttgcaggaactgacactcaagaatcaataa

SEQ ID NO: 41214 - DNA, 1662 bp, Vibrio cholerae
atgaaacaaggcctcattctaaaatccgtcctcagtgcagccattattgcctctttggcaggttgtgcaactgcacccgctcagcagtgggaagcagacaaaacctacaaactcactattctgcacaccaacgaccaccatggccgtttctggcaaaaccagtatggtgaatatggcatggcagcacgtaaaacgctgattgatcaactgcgtgccgacattgaagctcaaggtggcagcgtattactgctctcgggtggtgacatcaatactggggtaccagaatcagacctacaagatgcagagcctgatttcaaaggtatgagcaaaatcggttacgacgctatggcgctgggtaaccacgaatttgataatccacttgaagtgctgtttaagcaaaaagagtgggcgaacttcccaatgctgtcggccaacatttacgataaagcgaccggtaagcgtctgtttgaaccgtaccatatctttgataagcaagggattaagattgcggttattggcttaaccaccgaagacaccgcgaaaattggtaacccagaatacatcggtggtatcgacttccgcgatccgaaagaagaagcgaagaaagtgatcgctgagctgaagaaaaaagagaagccagatcttatcatcgcagtaacgcacatgggtcactaccaaaacggtgagcatggtgtgaacgcaccgggtgatgttgctttggcgcgctacttaccagcgggtgagttggatatgattgtcggcggtcactcacaagagcctgtgtgtatggaaggccctaatctggtgaaaaagaactttaagccgggtgacgaatgtaagcctgatattcaaaacggcacttacattgttcaagcttacgagtggggtaaatacgtcggtcgtgcggattatgaattccgtaacggtgagctgaatatggtcagctataacctcattcccgttaacttgaagaagaaagttgaagtgaatggtgaaactcagcgtgtgtttgcgacttctgaaattaaagaagacagcgcaatgctagagttcctgcgcccattccaagagaaaggccaagagcaactgagcatcaagattgcccacagtaacggtaagctagaaggcgatcgtaacgtggtgcgttttgagcaaaccaacttgggccgcatgattgcaatggcgcacatgcaacgtgctaaagccgattttgcggtaatgaactctggtggcgtacgtgattctatccaagccggtgacattacgtataaagatgtactgaaagtgcagccatttggcaacatcgtcagctacgtggatatgaatggtcaggaagtgctggattatctcaatgtcgtcgctaccaagccggtcgattcaggtgcgtatgcccagttcgcagggatttcaatgacggttgcggatggcaaagtctctaacgtggtcatcggtggcaaacaactgcgtctcgatgcgacctaccgtttcactgtgccaagttttaacgcagcgggtggtgacggttatccaaaaattactgaccacccaggctatgtcaacactggctttgtggatgccgaagtactgaaagattaccttgaggcgaacagtccaatcgatgtgaaccgtttcgcgccagcgggcgagattgtttatcgttaa

SEQ ID NO: 41215 - DNA, 852 bp, Vibrio cholerae
atggaacacaaaattgtccatgtcggtgatattccggttgccaacgataagccgtttaccctatttgcagggatgaacgtactggaatcgcgtgatttggcgatgcaaatttgcgagcactacgtgaaagtgaccgacaagctcggtatcccttatgtgttcaaagcatcgtttgataaagcgaaccgcagttcagtgcactcttaccgtggcccaggcttggaagaagggatgaaaattttccaagagctgaaagagacctttggcgtgaagatcatcactgatgtccacacagaagcgcaagcgcagcctgtggcggatgtggtggatgtgattcaactgcctgcctttttggcccgtcaaaccgacttggttgaagcgatggcgaaaaccggcgcggtcattaacgtgaaaaaaccgcagttcatgagcccgggtcaagttggcaacatcgttgagaagtttgctgagtgtggcaatgacaaagtgatcttatgtgagcgcggctcttgccacggctacgataacctcgtcgtcgatatgctcggctttggtgtgatgaagcaagcctctaacggcagtccaatcatttttgatgtgactcactcactgcaaatgcgtgatccatcaggtgcggcatcgggcggtcgtcgtgagcagaccgttgaactggcgaaagccggtttggcgacggggattgcgggtctgtttattgaagcgcaccccaatccagataaagcgcgttgcgatggcccatcggcattacctctcgacaaattagagccattccttgcgcaaatgaaagcgctggatgatttgatcaaaagctttgcgcacatcgatattcgataa

SEQ ID NO: 41216 - DNA, 384 bp, Vibrio cholerae
atgtacgaaggattaaaacattttcacctgttcactatcggcgtcagcgtagtcatgctgtcgattcgctatgtgctcatgatgatgaattcagcacacctagagcgtaagtttttcaaaattttcccgcatgtgaatgacacgttattgctgctttccggtatcggtttgatattcatcactggattcattccatttaccgctgccgcgccgtggatgacagaaaaatttacctgcgtgctggcgtacatcgcgctaggcttttttgcactgaaattaggtcgtaataaattgctgcgtagctttgcgttttttggcgcgttgggctggttggcgatggctggaaaaatcgcggtcgccaaagcgccgattctgtttggttaa

SEQ ID NO: 41217 - DNA, 861 bp, Vibrio cholerae
atgtcagttaccattgaagcggcattaaaagcggcaaccgagcaactgcagcaaagcggcagtgattcgccagccctagatgccgcagtactcctttgccatgtactggctaagcctcgttcttacttgttgacttggcctgataaaatcttggagaagcctactttggcttctctcgagctgctccttgctcgccgcagagcgggagagccgatggcctacatccttggtgagcgcgaattttggtcgctgccgctgaaagtctctccttcgacacttattccacgtccggatacggaacgtttggttgaattagcgctggataaagcggcgttgattgatggcgaactgctggatcttggcaccggaactggggcgattgcgttggctttggcttcggaattgcccacgcggcaagtcacggggattgatttacgtccggaggcggcagagttagcaagagaaaacgcgactcgcttggcgatccacaatgcgcagttttttcagggcagttggtttagcccattagcagacggtacgaagtttgctttgatcgtctccaacccgccttatatcgaagaaaatgatccgcatttgagtctgggcgatgtgcgttttgagccgaaaagcgcgctggttgccgcagaaaatggtttggcggacattcgccacatcagcacgcacgcgccgcattttttgctcgatggcggctggcttttgtttgagcatggttacgatcaaggcgttgcggtgcgcacgattttgcgtgatttaggctatcaaaacatcattaccgagcaagattatgccggtcatgatcgagttacactgggacaatataaaacggaaagagaagcataa

SEQ ID NO: 41218 - DNA, 1089 bp, Vibrio cholerae
atgaaagcgtcgattttaagcaagcttgaatcccttgttgagcgctatgaagaggttcagcacctccttggcgacccaacagttatcggtgatcaaaataaattccgtgctctatccaaagagtattcgcaactggaagagatcactcagtgtttccaagcttaccaacaagcgaaggaagatctggttgctgccgaagagatggcacaagaagatgatgcagaaatgcgtgaaatggcacaggacgagatcaaagcggcgaaagcggcaattgagcgcctgaccgatgaactgcaaattctgttgctgccaaaagatccaaacgatgatcgcaactgtttcttagaaattcgcgcgggtgcgggtggtgacgaagcgggtatttttgccggcgatttgttccgtatgtacagccgttttgcggagaaaaaaggctggcgcatcgaagtgatgtcatcgagtgaagcggaacacggcggctacaaagagatgatcgcgaaagtgaacggtgacggtgcttacggtacgctcaagtttgaatctggcggccaccgagtgcaacgtgttccggctacggaagcgcaagggcgtatccacacgtccgcttgtaccgttgcggtgatgcctgaaattcctgaagcggaaattccagaaatcaaagccagcgatctgaaaattgatacgttccgctcttctggcgcgggtggtcagcacgttaacaccaccgattcggctatccgtatcactcacttaccgactggtattgtggtcgagtgtcaggatgagcgttcgcaacataagaacaaagctaaagcgatgtcagtattggctgcacgtattgctcaagctgaagagtcaaaacgcgctgcggaaatttccgatacacgccgcaaccttctgggttcaggcgatcgtagtgaccgcattcgcacttataactacccgcaaggtcgagtgtccgatcaccgtatcaatttgacggtatatcgcctgaccgaagtgatggaaggggatatgcaatccttgattgaccctgtgattcacgagcatcaagcggatcaattggcggcactggcggatcaaaactaa

SEQ ID NO: 41219 - DNA, 1260 bp, Vibrio cholerae
atgtctttgcttgccattggaatcaatcacaatacggcgtcggtagaattgcgggaaaaagtggcgttcggtccagagaagctctctttggcgctgaatcagctttccaccagttcacacgttaaaggaggcgtgatcctctcaacgtgtaaccgcaccgaaatttattgtgatgtgagatcagcaagtaaaaacaaagtcatcgaatggttgtcccagtttcaccaagtcagcttggatgagttaaaacccagcctatacgttcatgaagagcaagccgccattcgtcatttgatgcgtgtcgcctgtggtttggactctctagtgttgggcgagccgcagatattaggacaagttaagcaagcttacgcagaggcgagagagaatcacgccgtcaatccggcgacggaaaagctgtttcaaaaggctttttcggtcgcgaaacgggtaagaacagaaaccgaaatcggcggcagcgcggtttcggtcgcttatgccgcttgcactttagcaaaacacatttttgaatcgctggccgacgctacggtactgttggtcggggctggtgaaaccattgaactggtagcaaaacatttggccggacaccactgtaaacggatgatagtggcgaaccgcacgcgagagcgagctttgagcttagcgcagcagtttggcgccgacgtcatcgcattaaatgagatcccagactatttagcgcaagcggatattgtgatcagctcgaccgctagccctttgcccatcataggtaaaggcatggtcgaaagtgcactaaaggcccgtcgccatcagcctatgttgttggtggatattgccgtgccacgcgatattgagccgcaggtcggtaagcttaacgatgcttatctctattcggtcgatgacttgcagtcgattgtcgatagcaatatcgagcagcgcaaagtggaagcgattcaggcagaagcgattgtcagtgaagagagcgccaccttcatgagttggatgcgctcactgcaagcggtggacagtattcgtgattatcgtaagcaagccaatgaagcgcgtgaagagctactcaataaaagtttgcaagcattggcagcgggtggcgatcctgaaaagctgctcatagaattaagcaacaaactgaccaacaaactaattcacaccccaacccgagcgctacaaaccgcggcggaacaaggggaaccggctaaactggccgtgatcagacaaagtttaggtcttgacgatctgaactaa

SEQ ID NO: 41220 - DNA, 945 bp, Vibrio cholerae
gtgcctgatatgaagctatttgctggtaacgcaatacccgaactagcccaacgtattgcagatcgcctgtacatttcccttggtgatgctactgtttctcgtttctctgatggtgaagtagcagtacaaatcaacgaaaatgtgcgtggtagcgatgtatttatcattcaatccacctgtgccccaaccaatgacaacctgatggaactggtggtaatgattgacgcaatgcgccgtgcttctgcaggccgtattacggcagttatcccttacttcggctatgcccgccaagaccgccgtgtgcgctcggctcgtgtacctatcactgcaaaagttgttgcagacttcctttctaacgttggtgttgaccgcgttctgactatcgacctccacgcagagcagatccaaggcttcttcgatgttccagtagacaacattttcggtacccctgtcctgctggaagatatgaaagcacgtaacttggaagatcctgttgtcgtatcgccagaccttggtggtgtggtgcgtgctcgcgcaaccgcgaaagcactgggtgacatcgatatcgcgatcgtagataagcgtcgtccacgcgcgaacgtttcagaagtcatgaacctgatcggtgatgttgaaggccgtgactgtgtgattgtcgatgacatgatcgacactggtggcacactgtgtaaagccgcggaagcgctgaaagagcgtggtgcgaaacgcgtatttgcttacgccactcacgcggtattctcaggcaatgcagcgaaaaacatcaaaaactctgtgttggatcaagtgattgtgactgactctatcaccctatcaaaagagatggcggcgacaggaaaagtgactcagttgactctatcaagcatgctggctgaagcgattcgtcgtatcagcaacgaagagtccatctctgcgatgtttaactaa

SEQ ID NO: 41221 - DNA, 1152 bp, Vibrio cholerae
atggcctcaccaaagcacaaaatcgtttacacactttcaaagctgaataaggttacagtcatgggttttaaatgtggcatcgtcggtttgccaaacgtaggtaaatcaactctttttaatgcgctgaccaaagcgggcatcgaagcagctaacttcccgttttgtactatcgaaccaaatacaggcgttgtgcctgtaccagatccgcgtctggatgccttagccgcgattgtcaaacctgaacgcattctgccaacgacgatggagtttgtggacattgcaggtctagtggcgggcgcatcaaaaggagaaggtctaggtaacaaattcctcgctaacatccgtgaaactgatgcaattggtcacgtagtacgctgctttgaaaacgaaaacatcattcacgtggcgggtaaagtgtcaccgctggaagacatcgaaatcatcaatcttgaattagcgctggctgacttagacagctgcgagcgcgcgattctgcgtcaaagcaaacgcgctaaaggtggcgataaagaagccaaatttgaactcgcggtacttgaaaagctgcaacctgttctgagcgaaggccaatcggctcgttccgtcaacctaaccaaagaagaattactggccgtcggttatttaaacctgctgacgctaaaacccaccatgtacattgcgaacgtcaatgaaaatggttttgaaaacaacccatatctggatgcggtggttgagttcgcagccaaagaaaatgcttctgtggtagcggtttgtgcagcgatcgaggcggaactgtctgaacttgaagaagaagaacgcgatgagttcttagccgacctcggtattgaagagccaggcctcaaccgcgtgattcgctcaggttatgacctactcaatctgcaaacttacttcaccgcaggcgtgaaagaagtgcgcgcatggaccattcctgtcggtgcgaccgcaccacaagccgcgggtaagatccacacagacttcgagcgtggttttattcgtgctgaagtgatcggttacaatgactacatccaattcaatggtgagtcaggtgccaaagatgccggtaaatggcgcttggaaggtaaagagtacatcgtaaaagatggcgatgtaatccacttccgcttcaacgtttaa

SEQ ID NO: 41222 - DNA, 708 bp, Vibrio cholerae
atggccggagtcaataatgttggtcaaagcggcttgtcctatattgatcagcttaaagctcttcaagagcagaaaaagccggatgaaaccacagggcagaaatccctgaaacaagaagactttctttctttgctgaccaagcagttagcacagcaagatccgttcaaacccgtgagtaacgatcagatgattgcgcagatggcttcatttgcgaccgttgatggcattggcaagatgaacactcagtttgagagtctcaactcatcaatgacctctaaccaagcgctgcaagcgtcatcactggtagggcgtgacgtgctagtgccgggggcggcaggaatgaaaaagcctgatggcggtatggcggcaatggtgaaactgccgcagtcgatcgataacttgttcatccgtattgagaatgaagctggtcaattggtacgaacctttgacgtcggtgccaaatcttctggtgataaccgcgttgaatgggatggaaaagatcagaacggtaatccgttgccgggtggcaaatacaaagtgaaagcgtctggcttgctggatggagagagtaaagagtttgaagtctccacgtatgcgaacgtcaacagcgttttgttaggcaaaggcgatggtaacgtactactcaatctggctggttttgatgcaccagttcgacttgctgaagtacttgaagtaggcaaagcgtga

SEQ ID NO: 41223 - DNA, 1530 bp, Vibrio cholerae
ttgccgaaaatcgtgcgtagcatcgcgttaactcgggtgttagaataccgcccaaaatttcgcatgctgagctctcagcaaaagaatctcacaaaggtaattcaaatgacggttaaaactcgttttgcgcctagtccaactgggtatctgcacgttggtggtgcgcgtacagcactctattcttggttatatgctaaaagccaaggtggtgaatttgttctgcgtattgaagacaccgacctagaacgctctactcaggcggcggtggatgccattattgaaggcatgacgtggttaggtttggaatgggatgaaggcccatactaccaaaccaaacgttttgatcgttacaaccaagtgattgatcagctattggcagaaggcaaagcctacaagtgctatgcgccgaaagagctgctggatgaaatccgtgctgagcaagaagccaacaaagagatgcctcgctacgatgcgaatcatccaaaaatcaaagcggtcaatgatgcggcaaaagaaggtgagccttgctgtatccgtttccgtaacccgaaagaggggagcgtcgtttttgatgaccaaatccgtggccgcatcgaaatccgtaacgaccaactggatgatctgatcatccgtcgtactgatggcactccaacctataacttctgtgtagtcgtggatgatgtcgatatgggtatcagccatgtgattcgtggtgaagaccacatcaacaacacgccacgccagatcaacatttacaaagccatgggcgcgaccatcccaacctttgcgcactgtgcaatgatcttgggtgatgatggtgccaagctatctaagcgccatggcgcggtttctgtaatgcaataccgtgatgatggttacctcccagaagcgctgctgaactacttagtgcgtttaggttggggacatggcgaccaagagatcttctcacgcgatgaaatgatcaacttattcagccttaacgcaatttcaaaatcagcgtcagcgtttaacactgacaaactgctgtggttgaacaaccactacatcaagacttcagagcctgagtatgtggcgaaacaccttgagtggcatttcgagaaccaaggcattaacaaagcgaccggccctgctttagcggaagtggtgaagttggtgggtgagcgttgcaataccttggttgagcttgcgcagcaatcacgttacttctacgaagattttgctgagtttgatgctgatgccgcgaagaaacacctgcgtggtgtggcaaaagagccactgatgctagctctgagcaagattgaagcgctgacagaatggaataccgaagcactgcatcacgtgatcgcacaagtgtgtgaagagcttgagattggcatgggtaaaatcggtatgccactgcgtgttgctgtgactggcggtggccaatcgccttctgtggatgcggtgatgaacttgattggtcaagaacgtgtaattgcacgtatcaaaatggcactagagtacatcgaaactcgcgaagcgaatgcatag

SEQ ID NO: 41224 - DNA, 2748 bp, Vibrio cholerae
gtggacattccgcaaggaggagtgatcatgaaccattttgctttagcgctgcgtggcctgaactgcatgggctgtgcgcgaaaattggagcgccaactcaatcaagatctcaccgttgagatcgaaacgctgacgccaacctcgattgaactgcatacccatgccaccttaaatgaggtgctcaccagtattgaatcgctgggttatcaaggcggtactgagcaaacttatcagctacaaggtttaaattgtggtcgctgtgtgaataaactgaccacgcacctcagcgcgcaggcagagattgccaaactgcacgtcagtaaagagcggctttcactggttacaaccttaaccgctgagcaagtaaaagcgctagtggcggaagtgggctatcaggctatagaagcagaacaagaatcaacattcgcgccagcagcctccattgatgagaaggaaaccgacacgcctgacgctgagaactcctcgaacacagaagccactgaggcgtctagccaaacactctctctgcttattaaggggatgacctgcgccagttgtgtcgcatcggtggaaaaagccctgctttctgttgagggagtgcagagtgcacaagtcaacctcacagagcaaagtgccttggtgagaggcattttcgccaatccgcaaccactgcttaacgccattcaaagttctggctaccaagcggagatcttggatgacccagcacagcagcaagccaaacaacaagcgcaattagaagccttacaaaaagagcataaacagagtgctttattaggtatcgctctgggtacgcctttaatgctgtggggcgtgtttggcggcaacatgatgatccgcaatagtagtgatcaaatggtctgggggggaatcggcaccatctgtttcgcactgctactcaccgccggacgccacttctttatgaatgcgtggcaagcactgactcatggcagagcgacaatggacaccctagtcgcactgggcactggcgctgcttggttttactccatgctcgtggtagcttggccgcaaacgttccctgatgcagcgcgtcatgtgtacttcgaagcaacggcaatgatcattggtttgatttcattgggtcattacattgaaaccaaagccaaaagcaatactaatcgctcactgcaagccttgcttaacttacaaccacagcaagcaacgttggtgactgaacaaggcgatcaatccatcgccgtcgctgatattcaactgggtatgtcactgcgcatcaaacccggagagcaagtgcctgtcgatggtgtggtcagtactggtcactcttatctggatgagtccatgctcacgggcgaacccattcctgtactcaaagaagccggcgcgaaagtcgcagcgggcacattgaaccaagatggcagcttagtgatcaccgctactggcattggtgcgcaaaccatgctggcgcggattatccagatggtaagacaagcgcaaagcagtaaaccggcgatggctcgtttagccgatcagatttcctctgttttcgtgcccgttgttgttgtcattgccatcttgtctgccgcactttggtatctgtatggccccgatcctaaagccagttacatgttggtcgttgcgaccactgtattaatcatcgcctgcccttgtgctttggggcttgccactccgctctcgattaccgtaggtatcggcaaagcagcagagatggggattttaattcgcgatgccaacgtactgcagaccgcaagtcaggtagataccgtggtgtttgataaaacggggacgctgaccttaggcaaaccgagtattcaatcactgcatgtgttgcagggtgatgaaaaccaattactggctctagcatacgcccttgagcagcaatcagaacacccactggctaaagcgatctgtgattacgcgaaacaacgcaatattagtccagtagagatcagccaattcactaaccaacgtggacgtggactcttagccgattaccaaaatcaaaccgtgctggttggctctctcgcttttatgcaagaacaaggcattgatttgtcgatggctgaatcgactctagaaaaatttgcagcacaagcgtggacgccggtggcggtggcttatcgtggcatgttgcaaggcgtgttagcgattgccgacccgatcaagcccacctcagcgcaagcggtacgtaagctcaatgagcttggaattcataccgtgatgctgactggcgatcacacttcggttgccaatgcgattgccaaagagctcggtatctcgcaagtgatagcgcaagtgctgcccgaccaaaaagcgcagcacattcaagctttgcaacaacaaggccgtaaagtcgccatgattggcgatgggattaatgatgccccagctttagcgctggctgacattggtattgccatgggcagtggcagtgatgtagccattgagagcgcacagatgacccttttgaactcatcaccaaccagtgtggtgagcgcgattgagctgtcaaaagccacactgcgcaatatgaagcaaaacctgtttggcgcatttatttacaacacgctgggcattcctatcgcagcgggtgtgctttacccagcgtttggatttttactcagcccagttgtcgccggagcggcgatggcgctctcctcgatcaccgtggtcagcaatgccaatcgcctgcgctggagcaaaatttctttcgatcaacattctcaatga

SEQ ID NO: 41225 - DNA, 897 bp, Vibrio cholerae
ttgccgaacctaaaggagttcacgcattccatgctcacacgattcgcttgctgtcttttatggctatttatccaacctcttcacgcagaacccttgtactggtcagcaaccaaaggttcgacacaactcatcctcttaggctctctgcatgtgggcagcgatcagctttatccattgcctgaccaactcgcacaaaagctaaaacaaagcgcaggcttagtcgtggagacggatatccgtcaccaatccaacatcactttgcctgcaacgacgttgagtagtgagcaggttttaagcgatgaacaactgtttgtattggatgggattgcgcagcaactgaggttggatgcccagcagatccgccaacagcccccatggtcagccagccttatcctgcaaatgcgccaatttttagagatggggtatcaagccgatcgaggcatcgacctttatttcatgcaacaagctgagcagcatcaactgcctatactcagtctagaaaccttacaatttcaagtggatctgttagcgcacttacccaactcagggcaggaattactggtgagtttgatcgatgaatgggaaaacaatacccaactcaccgagtgcatgattgaaagctggaaaaaaggagatgagaagaatttgctacaaatgctcacactcaccggtatgtccgctgaattggaagcccacatgctcactgagcgtaatcgggattgggcagagaagctcactcaccctcaattcttaccacaacaaggcaaaccttatctggtcgtcgtcggcactttgcatttaattggcaagcagagcttgctcagtattcttgagcaaaaaggctttagcatccagcagcttaaccaaagccaaacggcaagctgctcatttttataa

SEQ ID NO: 41226 - DNA, 627 bp, Vibrio cholerae
atgaaaattgttgaagttaagcaccctcttgtaaaacacaaacttggcctgatgcgtgaaggcgatatcagcactaagcgttttcgtgagcttgcaactgaagtggcgagtctactgacttatgaagcgacttctgactttgaaaccgaaaaagtcacgatcgaaggctggaatggtcctgtgcaagtggatcaaattaaaggtaagaaagtgacggttgtgcctatcttgcgtgcaggtcttggcatgatggatggtgtacttgagcatatcccaagtgcgcgtatcagcgtggtcgggatttaccgtgatgaagaaactcttgaaccggttccttacttcaataagttagccactaatattgaagagcgtattgccatggtggttgacccaatgctggcaattggcggctcgatgattgcgacaattgacttgttgaaagagaaaggctgtaaccagattaaagtgctggtgttggtggctgctccggaagggattgccgctttagaaaaagcgcacccagatgttgagctttacacggcggcgattgatgagaagctgaacgacaaaggctacatcgtaccgggtcttggtgatgccggtgataagatttttggtactaagtaa

SEQ ID NO: 41227 - DNA, 1323 bp, Vibrio cholerae
atggacgatctctatctccactttgtgcagcaattagctcgctatccttttcgcaaaatccttctcgcactgagcggcggcgtggattcgcaagttctgcttgcccttctggcgcgtggacgcgatgagtttggttgggatgtgaccgcggttcatgttcatcatgggttgagcccgaatgccgatcagtgggcgcagtattgccagcgctgttgccgtgaagtcggcatggcctgtcaaatcgaatatgtacagctggatgtggcaagtggtgaaagtattgagaaactggcgcgagaggcgcgttatcgagtccttgctccgcatgtgaatgcgcagacactgttgttacttgggcagcatgctgacgatcaactggaaacttttttactcgcattaaagcgcggcagtggcccaaaagggctggccgcaatggctgcttatgccccgtttgccgagggacatttgctccgccctctattaaccgtctcacgtcaacacattgaagcctatgccaagcagcacaaactcacttgggttatcgatgaaagtaatgcagatatccgctacgagcgcaattttctacgccatcaggtgacacctgtacttaccgagcgctggccgagcattcgccaagctgtgcaacgtagtgctgagctgtgtgcagaacaagaagcgctgctgcaagagtttttagctgaagcattaaaaaaggcgatcactgctgagggcggattgtcgatcgccgttctggctgagggcagtgagggaatgcgtcgacaactgatccgagcttggtttgcgcaccataggctaccgatgcccagtcgtcagcacacggagcgtatttggtgtgaggtggcgctggcgagtgaggacgccaatccaaaattaaagttgaaccatattgaggtgcgccgttttcagcactgtctgtacctcgtgccaccagaaaaagatctttcaggctggcgcagtgcattagtgcctgaacaacgtttgccgttgccgcaaggtctaggtcatcttcagttgaccagcaaggcaggtggaaatatcaagctgcccgatgaccccagccaattatgggttagctttgagccgcaagggctagaggcttgtcctgttgggcgggtgggttcgcgcaaactcaaaaaactgtttcaagaatatggtgtgccgagttggcggcggcggcaaacacccatcctcatgtaccaaaatagagtggtctgtgtcgcggatttattcgtagatcgtgattggagtgggcaagattgtgagttggtttggttcaaatctcatgattctgtgccaaaataa

SEQ ID NO: 41228 - DNA, 960 bp, Vibrio cholerae
atgagcctcaattttcttgattttgaaaaaccgattgtcgaactggaaacgaaaattcaggcgctgcgtgatgtgtctcgtcacagcacaagcgcatccgtagatctggataaagagctagaacagcttgagaagaagagccttgagctgaaaaagaagattttcagtgacttaggtgcatggcaagtcgcgcaattggcgcgtcatccgcaacgtccttatacgctggattatctcaaacacatctttactgagtttgatgaactggcgggcgatcgcgcctatgccgatgacaaggcgatcgtgggcggtattgcacgccttgaaggtcgttcggtcatggtgattggtcaccaaaaaggtcgtgaaacccgtgaaaaggtcaaacgtaactttggtatgccaaagcctgaaggctaccgcaaagcgctgcgtttgatggaaatggctgagcgtttcaatatgcctatcatcactttcattgataccgcgggcgcatacccaggtgtgggtgctgaagagcgcggtcagtcggaagcgatcgccaaaaaccttaaagtgatgtcaggcctgaaggtgccagtcatatgtaacgtggtgggcgaaggtggctctggtggtgcgttggcgattggtgtcggtgactatgtgaacatgctgcaatactcaacctactcagtgatttcaccagaaggttgtgcgtcgattctgtggcgtgattctgataaagcgccacaagcggcagaagcgatgggtctgattgctccacgtttgaaagagctggagttgattgacgaaatcattgaagagccactgggcggtgcgcatcgtgatcacaaacagactgcagagaatgtaaaagccacgctactgcgtcagttggccgatctggatgcactggatcacgaaaacttgctggagcgccgctatcaacgtttgatgaactacggttactgttga

SEQ ID NO: 41229 - DNA, 3495 bp, Vibrio cholerae
ttggatactccttgcatgtcagacccaaagttcatccacttacgtatacacagtgatttctctatggtggatggtttgtccaaagtcccgccattggtgaaaaaagtggcggcaatgggcatgcccgcaatggccttgaccgatttcaccaacctgtgtggcttggtgaagttttacagcaccgcgcataactgcggggttaagccaatcattggcgccgactttactttgcaatcggaagagttcggtgatgagctgaccaaactgaccttgcttgctaaaaacaatgtcggttacaaaaacctcaccttattgatttctaaagcctatttacgcggccatgtccagcatcaacctgtgattgataaagcgtggttggtcgagcatgccgaagggctgattgtgctctcgggaggcaaaagtggcgaagtggggcgcgcattactcaaaggcaaccaacaacaagtagaaagatgcattgagttttaccaaactcactttgccgatcatttctatctagagcttatccgcactggccgtgctgatgaagagagctacttacattttgcgctggatgtggcagagcagtacgacttgcccgtcgtggcaaccaacgaagtggtgttcatcactgaagagtcgtttgaagcccacgaaatccgagtcgcgattcacgatggttatacgctggaagatccacgccgtccgaaaaattacagtccgaagcagtatctgcgcagcgaagcggagatgtgtgagctgtttgcagacattccagaagcgttagccaacagtgtcgagattgccaaacgttgtaacgtgaccgtacgtttgggcgaatatttcctacctaacttcccaacgggcgggatggcgattgaagattttctggtgatgaaatctcgcgaagggttggaagagcgactcgaatttcttttcccagatccagaagttcgtgccaagcgtcgccctgaatatgatgagcgtttgcaagttgagctcgatgtgattaaccagatgggctttcccggatacttcttgatcgtgatggagtttatccagtggtcaaaagataacgatattccagtcggtccgggacggggctcgggggcgggctcattggtagcgtatgcactgaaaatcaccgaccttgatccgctggaatacgatctgctgttcgagcgtttcttgaatccagagcgggtctccatgcccgacttcgacgtcgatttctgtatggataagcgtgatcaagtaattgatcacgtagcggaaatgtatggtcgtgatgcggtatcacaaatcatcactttcggtaccatggcggcgaaagcggttattcgcgatgtggggcgtgtacttggtcatccgttcggttttgtcgatcgcatttccaaattagtgccacccgatccgggtatgacgctcgagaaagcctttatcgccgagcctgcactgcaagagctgtatgacgcggatgaggaagtcaaagagctgatcgacaagtgtcgaattctggaaggctgtacccgtaacgctggtaaacacgctgggggcgtggtgatttcgcccactgccatcactgactttgcgccgatttactgtgatgcggaaggcaacttcccggttactcagttcgataagaacgatgtggaaactgccggtctggtcaaatttgacttcttggggctgcgtacccttaccattattgactgggctttgggcttagtgaacccgcgtttgaaaaaggcgggcaaaccccccgtgcggattgaagcgatcccgctcgacgatgcgcgctctttccgtaacctgcaagatgccaaaaccaccgcggtattccagctcgaatcgcgcggtatgaaagagctgattaagcgactgcaacccgactgttttgaagacatcatcgctctggtggcgctgtttcgtccggggccgttgcaatccggcatggtggataactttatcgaccgtaagcatggccgagaagccatctcttatccggatgaaaagtggcaacatgaatcgctcaaagagatcctagaaccgacctacggcatcatcctctatcaggagcaggtgatgcagatcgcgcaggtactgtcgggttacaccttgggtggggcagacatgctgcgccgtgcaatgggtaagaaaaagccagaagaaatggctaagcagcgcgctgtgttccaagaaggggcggagaaaaatggcgtcgatggtgagttggcgatgaaaatcttcgatctggtggaaaaattcgccggatacggatttaacaaatcgcactctgccgcttatgcgctggtttcctaccaaaccttatggttgaaaacccactatccagccgagtttatggcggcggtaatgaccgcggatatggacaacacggaaaaagtggttggcctagtggatgagtgtaaaaacatgggattgaccgtgttgccaccggacattaactcgggtctttatcgctttaacgtcgatgacaacggcgcgattgtttatggtattggcgcaattaaaggggtgggtgaaggtccgattgaagcgattttggaagcgcgcaacaaagggggatatttcaaagatctgtttgatttctgcgcgcggattgatctgaaaaaggtcaacaaacgggtaattgaaaaactgatcttggctggcgccctggatagattaggcccgcatcgcgcagccatgatggcctcagtggatgatgcggtgcgtgcagcaagccaacatcaccaagcggaagcgtttggacaagcggatatgttcggtgtgctcacggatgcgccagaagaagtcgagcagaaatacacgcaagtgccagaatggccagaaaaagtgcgtttggaaggggagcgcgagacgcttgggctctatctcaccggccatccggtggatgaatacctgaaagagctcaccaaatacaccagttgccgtttgaatgaagccgcaccaacccggcgtgatcaatccttaaccgttgccggattggtgattgcagcgcgggtgatgaccaccaaacgtggcacgcgaattggtttaatgactttagatgaccgctcgggccgtatggaagtgatgctttactcggaagcactcgatcggtatgcagaatggttagaaaaagataaaattctggtggtttccggacaggtcagctttgatgacttcaatggcggacttaaaatgtcggcgcgcgaggtcatggacttgggcagcgcgcgtgaaaaatttgcccgcggtttatcgatctcgattttacagtcgcagattgatcaacaattttttgagcgttttagtcacatactggaacctcaccgcgcaggaaccgtacctgtcaatgtatactaccagcgccctgatgcgcgagcgcgcctgacgttaggcacagagtggcgagtcacgccaagcgatacattgttagacgaattaaagcagctacttggtcatgatcaggtagaactcgaatttaactaa

SEQ ID NO: 41230 - DNA, 621 bp, Vibrio cholerae
atggcgaagaaaccaagcattgagctgcctccctttgagattcctgcaggttatgccttgattgctggagtggatgaagtcgggcgcggcccactggtgggggatgtcgtcacggcagcagtgatccttgaccctaatcggccgattatgggcttgaatgattccaaaaagctcagtgagaaaaaacgcttagccctgtttcctgagattcaggtaaaagccttagcttgggcggtggggcgctgttcgccgcaagaaattgatgagctgaacatcttccaagccaccatggtcgcaatgcagcgcgccgtcgcagggttgcgcattcagcctgatttggtattgattgatggcaataaaattcccaagctcccaatggaggcgcaagccgtggttaaaggcgatctgcgtgtcgcgcaaatcagtgccgcttcgattattgccaaagtgatccgcgaccaagagatggaagcgttggataaacaatatcctcagtttggtttcgccaagcacaaaggttacccaaccgccgcgcattttgctgccattgagcagcatggagtgattgagcagcaccgtaaaagttttggcccagtaaaacgtgctcttggtatagaatag

SEQ ID NO: 41231 - DNA, 1140 bp, Vibrio cholerae
gtgaatagaccattacggattggcatagttgttggggagctctctggcgacaccttaggcgaaggctttatcaaagcgatacgtgctcgttacccagatgctgagtttgtcggcatcggtgggccgaaaatgaacgcacttggctgtcaatctctgtttgatatggaagagttggccgtgatgggtttagtggaagtgcttggccgcttgccgcgcctgctgaaagtcaaagccgagctggttaagtatttcactgccaatccgccggatgttttcgtgggtatcgatgcgccggattttaatttacgccttgagctgagccttaaacaagcggggatcaaaaccgtacattacgtcagtccatcagtgtgggcgtggcgacaaaaccgcattcatggcattgccgcggcgacgcatttagtgttggccttccttccatttgagaaagcgttttacgacaaattcaatgtgccttgtgagtttatcggtcataccttggcggattcgatcccgttagcgtccgataagttagccgctcgccaactgcttggtctggatgagcagcgccgctggttagccgttttgccgggcagccgtggcagtgaaatgaagatgctcgcggagccctttatcgccacctgtcaaaaactgcaggcgcgctatccagatcttggctttgtggtggccttggtgaatgctaaacgtcgtgcgcagtttgaacaggcttggcaacaagtcgctcctgagctgaattttgtgctggtggatgataccgcgcgcaatgtgattactgcagccgatgcggtgatgcttgcctccggcacggtggccttggagtgcatgctgcttaaacgccctatggtggtcggttatcgcgtgaatgcctttacggcctttttggccaaacgtctgctgaaaacgccgtatgtctctttgccgaatatcttggcgggagaggaactggtgaaagagctgctgcaagatcattgcaccgtcgacaacctttaccatgaagtgagccgtttactcgaaagcgacaaccaagccttgatggacaaatttaccgaaatgcatcaatggatccgtaaagatgcggatcagcaagcggcgcaagctgtgctgcatttgattcagaaataa

SEQ ID NO: 41232 - DNA, 462 bp, Vibrio cholerae
atgatgactttgactactgataagaaaacgatgaatatcactgaaattcaatcgcttctgcctcaccgctatccatttttactgattgatcgcgtgaccgactatgaagaaggtaagtacctgattggtttgaaaaatgtttcagtgaatgagcctcagtttacgggtcactttccacaactgccggttttccccggtgtattgattttagaagccatggctcaagccactggtctgttggcgttcaaaacctttggtgcgccaaaagagaatgaactgtactattttgccagcattgatgaagctaagttccgtaagccagtgacaccgggcgatcaactgatggttgaagttgaattccttaaagagcgtcgtggtatcgcgctgtttaacggcgtggccaaagtcgatggtgatgtggtctgttctgctcaactgaaatgcgcacgtcgagagttttaa

SEQ ID NO: 41233 - DNA, 1056 bp, Vibrio cholerae
atgaccacactcactttagccgaattggctactatcaccgggggggagttgttcggtgatccaacagcactggtcagtgccgttgcgcctatggataaggcacagcttggacatgtgacattcttgtctaatcctaaatacagtaagcacttaggtgattgtaaagccacggtgatcatggtgaaaaccagtgagcgagaactctgtccgagtaacgctctggtggttgccgatccgtatgttgcatttgctaaagtggctcaggcgctggattcaactccttctcctgcacacggtattgcaccgagtgctgtgattgctgaagatgcaaagttaggtcacaacgtttcgattggggcaaatgcggtcattgagtcaggtgttcagcttggcgataacgtagtgattggtgctggctgttttatcggtaaacaagcgcgtttgggcgataacactaagctttgggccaatgtaacgatttaccacaaagtggaaatcggctcagattgtttgattcaatctggaaccgtgattggtgctgatggctttggctatgcgaatgagcgtggcgagtggattaaaattcctcagcttggctctgtgcgtattggtgatcgcgttgagattggtgcttgcaccaccatcgaccgcggcgcgctggatgatacggtgattgaagataacgtgatcatcgataatcagctgcaaatcgctcacaacgtgcacatcggatatggtagtgcgctggcgggtggtacagtaatcgccggcagtacacgcattggcaagtactgtattattggtggcgctagcgtgattaacggacatatcgaaattgccgatggggtgaccatcactggcatgggtatggtgatgcgcagtattgaggagaaggggatgtactcttcgggtattcctctgcaaaccaataaagagtggcgtaaaacggccgctcgcgtacaccgtattgacgatatgcataagcgactgaaagctttagaaaagttgcttgagcaatccgacacggtacagcccgataactctcaagctgaataa

SEQ ID NO: 41234 - DNA, 843 bp, Vibrio cholerae
ttgaagcagcgaatcattacagcgcttattctggcgcctttggtgatccttggcatcctttatctgccttttgcttggtttatgttggcactcgcagtagtgaccttactcggattctgggaatggactcagttcgttaaccaaccatcacgcatgttagccatgattcccgccttattggttggtggtatcagtgtcgctttgatcgactttcaatttccggctatcagcaatatgaatacggcgcattttattgtgctgggtatcggtagcctttggtggctcgtctcaagtggactggcgatcacttatccgcgctcgcgtccattatgggagcactccagcactgttcgccacctgtttggcctatttacgctgctgcctttcttttggagtgtgttgttcttacgcgccgatacttacctttccgatcctctttatggtgcgaaattagttctcttcgtctgttttctggtctgggccgcagacagcggtgcctattttgtgggaaaaagcttaggtaaacacaaaatggcgcccgcagtcagcccgaataaaacgatagaaggtttggtcggtggcatcgtcaccgccatgctggttggttattgggtagcagagtgctttggtattcaatttagctctatgcctgtcatgctgctgatcatcttattgactgtggtaatttcggttttaggggatttggtcgagagcatgtttaaacgtgtttctgggatcaaagacagcagcaatatcattcctgggcacggcggcattctggatcggattgatagcctaacggccgctttccctgtgttcgctcttctctatttcttgttctag

SEQ ID NO: 41235 - DNA, 771 bp, Vibrio cholerae
ttgttcgttgtgtttcttatgcaaaatctatctctttcccaagatgtattgcctaaacatattgccgtcattatggatggtaatggtcgttgggcgaaagcgcagggaaaaccgcgtgttttcggccataaaaatggtgtggctgcggtacgaaaaaccatctctacttctgctcgccttggcattaaagccgtaactctgtttgcttttagcagcgagaactggcgtcgtccggaagaagaagtgggcgtgttgatggaactttttatgacggttctttcaaccgaaattaagaaattgcataaaaacaatctgcgtttgcgagtgatcggtgataaaagccgctttagtgagcgtctgcaaacgaaaatcgcgcaagcggagcagttaaccgccagcaataccggcatggtggtcaacatcgctgcgaactacggtggacagtgggatatcttgcaagctactcaagcattggctgaaaaggttacccaaggtgaactgcaaccgtcggacatcgatgaagacgtatttaagcagcatttgactatggctgatctgccggatgtggatttgttgatccgcaccagtggagagtgccgcattagtaattttatgctttggcaacttgcctatgcagaaatgtatttcactccagtcttctggcctgagttcgatgaaaactgcctgattgaagcagtgacttggtttgttaatcgtgagcgccgttttggctgtactggtgaacaagtcaaggcattgatggaaaactga

SEQ ID NO: 41236 - DNA, 558 bp, Vibrio cholerae
gtgattaatgagatcaaaaaagatgcgcaagagcgtatggagaaaagtgttgaagcactgaaaaatggcctgtcgaaaattcgtactggccgtgctcacccaagtctgctgacgggtatttcagttgactactacggcgctccaactccacttaatcaggttgctaacgtgattgctgaagatgcacgtacgctagcgatcaccgtgtttgatcgcgaattaactcaaaaagttgaaaaagcgatcctgatgtctgatctgggtctaaacccaatgtcagccggcaccattatccgcgttccactgccaccgctcacggaagaacgtcgccgtgatctggttaaaatcgtgcgtggtgaagcagaaggcggtcgtgttgcggtacgtaacattcgtcgtgatgcgaacaacgatctgaaagcgctactgaaagacaaagagatttcagaagacgatgaacgccgtgcacaagaagagattcaaaagctgacggatgcggcagtgaagaagatcgatgatgtgcttgctgcaaaagaaaaagagttgatggaagtttaa

SEQ ID NO: 41237 - DNA, 732 bp, Vibrio cholerae
atgacaacgaaccctaaaccagcttatcaacgtattctgttaaaactaagtggtgaagcgctacaaggctctgaaggttttggtattgatccaacggtacttgatcgtatggctcaagaagtaaaagaactggttgagctgggtgttcaagtgggcgttgtgattggtggcggcaacctattccgtggtgctggccttgccaaagcgggtatgaaccgtgttgttggggatcatatgggcatgcttgccacggtaatgaatggtttggcaatgcgtgatgccctgcatcgtgcttacgtcaatgcacgtctgatgtctgctatcccactaaatggtgtgtgtgacgattacagctggtctgatgcgattcgcgaattgcgccaaggccgagtggtgatttttgctgcgggtacaggcaatcctttctttactacggattcggctgcgtgtctgcgtggtattgaaattgaagctgatgtcgttctcaaagcgaccaaagtagatggtgtttacagcgctgacccggtagccaacccggatgcacaactgtatgataagctggcttacaacgatgtgcttgagaaagaactgaaagtgatggatttggcggcgtttactctggctcgtgaccataaaatgccaattcgtgtcttcaacatgaataagccaggcgcacttcgtcgtgtcgttatgggtgaagctgaaggtacgctgatcagcgacgtgcagtga

SEQ ID NO: 41238 - DNA, 843 bp, Vibrio cholerae
atggctgttactgctgctctagtaaaagaactgcgcgagcgtactggcgcaggtatgatggaatgtaagaaagcccttgttgaaaccaacggtgacatcgagctggcgatcgagaacatgcgtaagagtggtgctgctaaagctgctaagaaagctggcaacatcgctgctgaaggcaccatcatgatcaaagaaggcgaaggcattgcggctctagttgaagtcaactgccaaactgacttcgtagcaaaagacagcaacttcgtagcatttgctaaccaagttactgacgctgctctcgcttctaaagcctctgtagaagagctgcaagcacaattcgaagaagctcgtgttgctcttgttgcgaaaattggtgagaacatcaacatccgtcgcgttcagtacgttgaaggcgaagctctggcgacttatcgccatggcgaccgtatcggtgttgtcgttgctggttctgctgacgttgaaactctaaaacacgttgcaatgcacgtagcggcttctcgcccagaattcctgactccagacgacgttcctgctgaagtggttgctaaagaacgtgaagttcaagttggcatcgcaatgaacgaaggcaagtcaaaagaaatcgcagagaaaatggttgaaggccgtatgaagaaattcactggcgaagtttctctgactggtcagccattcgtaatggagccaaagaaaactgttggtgaaattctggctgagaaaggcgcaactgtttctgcattcatccgtctagaagtaggtgaaggcatcgagaaacaagaaggcctgagctttgctgaagaagtagcactggcgcaaaaaggttaa

SEQ ID NO: 41239 - DNA, 729 bp, Vibrio cholerae
atggcatctgtatcaatgcgcgatatgctgacagcgggcgtacacttcggtcaccaaactcgttactggaacccaaaaatgaagcaattcattttcggcgcacgtaaccgcgttcacatcatcaacctagaaaaaactgtacctatgttcaacgaagctctagctgagctggcaaaagttggcgagaagaaaggtaaagttctattcgttggtactaagcgcgctgcatctgagtctgtgaaagaagcagctctagcaagcaaccaatactacgttaacaaccgctggttgggcggtatgctgactaactggaaaactgttcgtcagtcaatcaagcgtctgaaagagctggaagttcaatctactgacggtacttttgacaagctgactaagaaagaagctctaatgcgcactcgcgaaatggagaaactggaaaagtctcttggcggtatcaaagatatgggcggcctgcctgacgctctgttcgtaatcgacgcagatcacgagcacatcgctatcaaagaagcgaacaacctaggtattccagtatttgctgttgttgatactaactctagcccagacggcgtagactacatcatcccaggtaacgacgacgcgatccgcgctgttcaactgtacctgaatgctgctgctcaagcgatcaacgaaggtcgtaacaaagacgtagctgctgtagctgaaaaagacggtttcgtagaagcggaataa

SEQ ID NO: 41240 - DNA, 2646 bp, Vibrio cholerae
ttgcatggacgcgctatgccgtatcaatcccctatcacatttcaagaaccccaactgacggtagagagcttaaagcagcagctcgaaagctttactgaataccaaaagcaggagtttttcgatcaccatccagtgaccgacttagtgcttggccgctccgaatacatggacttgctactccaccgtttgtggcaattttttggctttgatgagctggttgaagtgagcttagtcgcggttgggggttatgggcgtggtgagctacaccctctctcagacatcgatctcctagtcttatctcaacagccgctcagcgaacaagtcgccaataaaatcagccaatttctcaccctgttatgggatttaaaattggagattggccacgcggtacgaaccgtggaacagtgtgctgaaatcggtaaagccgacctcactgtagccactaacttgcaagaagcgcgcttactgtgcggctgtgaagagacctttcatcgcctgaaaatggtgatccattctgagtccttctggccaagtgaaatcttctatcaagccaaagtgcgtgagcagaaagagcgccacgctcgatatcacgacaccacctacaacttagagccagacatcaaatcgactcccggtgggctacgcgatattcacaccttaagttgggtcgcacgccgccattttggagcaacgtccttgtatgagatgagccgctttggttttctgaccgatgccgaataccgtgagctggttgagtgccaagactttttatggcgcgtgcgttttgcgctgcacattgagctgaaacgttacgacaaccgcttaaccttcgcgcatcaagtgcaagttgctcgtcatctcggttactttggtgaaggcaaccgtggcatagagatgatgatgaaagagtttttccgcaccctgcgtcgtgtggctgaactcaacaaaatgctgctgaaaattttcgataaagcgatcctcaataatggtgaagaagccgaagccgtgattattgatgatgacttccaacgccgtggcaatatgattgaagcgcgtaaacccgcgctatttcaagctcgtccagaaactattctggatatgtttttgcacatggccagcgactccaccatcgaatcggttgcgccagccaccatgcgccaattacgcacggctcgtcgccgactgaataaatttctgcacacccttcccgccgcacgcgaaaagtttattgagctggtacgccaccccaacgcactgcataaagcgtttagccaaatgcacaagctgggcgtacttgctgcttatttgccccaatggaaccagattgttggccagatgcagttcgacttgttccacgtctatacggtggatgaacatagtattcgtctactcaaacatatccatctattcagtgatgccaataaccacgaccgccaccctatttgctgtgaaatttaccctaaaattcagaaaaaagagctgctcatcctcgcggccattttccatgatatcggtaaaggacgcggcggtgatcattcagaaattggtgctgatgaagcgtttgatttctgtattgagcacggtttatctaaaccggaagcgaaattggtcgcttggctggtcaaaaatcacctcctgatgtcagtcaccgcgcagcgtcgtgatatctacgatccagatgtgatcatcgaatttgccaaaaaagtgcgtgatgaagagcgcctcgaatacttggtgtgtttaaccgtcgctgacatctgcgccaccaaccctgagctttggaacagttggaaacggactttgttggcagagctcttttactcaacccagcgcgcgctacggcgcggcctagaaaatcccgtcgatgtccgtgaacgcattcgtcataaccagcaaatggcctctgccttactgcgcaaagaaggcttctctagccgtgaaattgaggtgttgtggcagcgctttaaagccgattatttcttgcgccatactcataaacagatcgcgtggcactgcacccatttattacgccatgaagacagtagcaaacctttggttttactcagcaaaaaagccactcgcggcggaacggaagtttttatctacaccaaggatcaggctgctttatttgcgactgtggttgccgagctcgaccgacgtaatctgaacgtgcatgacgcgcaaatcatggccagtaaagacggttatgtactcgatactttcatggtacttgaccaaaatgggcaagccattgaagaagatcgccatcaagcactgattcgtcatctggtgcatgtactggaagatggtcgtcctaccacgcaaaaggcaaggcgcattcctcgtaacttgcagcactttaaagtcaaaactcaggttgattttctaccaaccaagagtaaaaagcgcaccttaatggaattcgtcgcgctggatacgccgggactactggctaccgtcggagcaacctttgccgaactcaacttggatttgcatgcggctaaaatcacgaccataggtgagcgcgcagaagacttattcattttgaccaacgcccaaggcacgcgcctcaatgaagaggaggagcagcacttgcgcgagaaattgattgaacatgtcgcagagctcgcgcctagcgctcagtag

SEQ ID NO: 41241 - DNA, 1005 bp, Vibrio cholerae
atgcagcgtttcaaccaaagagtctggatgatgtttggtgaatttaatttaatcgataaatacttttccaaccgacaagcacaacgcaaagacgttcacttagcattgggtgatgactgtgccattgtcaaagttcctgaaaattcgcgcgtggcgatcagcacggataccttagttgctggaacccattttctggctcaggccaatccggcttgggtcgcgcacaaagccttagcgtcgaacatcagtgatttggcggcgatgggcgcgactccggcttgggtttcgcttgcgttgactctgcctgagattgatgatgcgtggctaacgccattttgcgatgcttttttcgagttggccaagtactacaatgtgcagctcattggtggcgataccaccaaagggccactcagtatcacattaaccgtgcagggctttttacccaaagagcaggctatgctgcgtagcggggcgaaagttggcgattggctctatgtcacgggcgatctaggcgatagccaagccggcttagacgtgattttagatccggaaaagcgccatttacccttcgccgatattcttgagcagcgccattacttgtcgacaccacgcattgtggcagggcaagccttagtgcatttggcctcttcggcgattgatatttccgacggcctgattgccgatctgcaacacattttgcggcgttccaatgttggggcgagtattgatgtcagcttgttgcctctgtctaaagagttattgcagtttgtagacagtgtcactagtgcacagcagtatgccttgaccagcggtgaagagtacgaactctgcttcaccattccagaagaaaatcgaggctcgctagaaaatgcgctcgcacattgcggcacgaaagtgacctgtattggccaaattcgcccggccggtacgtttgagctgcacaatcaggggaaaaagctcgattggcaactggctgggtatgatcatttcaaggtgaaagcatga

SEQ ID NO: 41242 - DNA, 471 bp, Vibrio cholerae
atgggggccagtgtgaaaccagccgcacgtcgtaatgcacgtcaatttgcgctacaagcaatttattcatggcaaattactaaagagaatgttgcgactattgaagagcaatttctaaccagcggtaagtacgatgaagaagaacatcgtgccgctgagccagctcttgctgctcctgaaaccgatgtttcttatttccgtgatctgctggcgggtgtggttttaaaccataatgaactcgacagcaaactgcgtccttttgtttctcgtccgatgcaagatctggacatgatggaactggcgctactgcgtttggccatgtatgaaatgacgcgtcgtgaagacgtaccatacaaagtggtgattaacgaggcgattgaactggcaaaagtgtttgctgcggaagatagccataaattcgttaacggtgtgctggataaagccgcaccgcacgtacgtaagaaagcgtaa

SEQ ID NO: 41243 - DNA, 522 bp, Vibrio cholerae
gtgctagaatccggcgattctcacttgatgaacagagttaaaggaaagcttatgaaagtgatcgagggtggtttcccagcaccaaatgcgaaaattgcgattgtgatttctcgtttcaacagttttatcaatgaaagtttgctgtctggtgccatcgatactcttaagcgtcacggtcagatcagtgatgacaacattaccgttgtgcgttgtcccggtgcggttgagctgcctctggtagcgcaacgtgttgcaaaaaccggcgactacgatgcgattgtctctctgggttgtgtgatccgtggcggtacaccgcactttgactacgtttgcagtgaaatgaataaaggtctggcacaagtgtctctggaatttagcattccagtcgcattcggtgtgttgactgttgatactatcgatcaagctattgaacgcgcaggaaccaaggctggtaataagggtgctgaagcagcactgagcgcacttgagatgattaatgttctttctgaaatcgattcctaa

SEQ ID NO: 41244 - DNA, 1110 bp, Vibrio cholerae
atgccaattagcaccccacaagagatcattgaagacattcgtcaaggcaaaatggtcatcctgatggatgatgaagatcgtgaaaatgaaggcgatctgatcatggcggctgagcacattacgccagcagcgatcaattttatggcaacccatggtcgcggactcatctgtttaacgctcacgaaagagcgttgtcgccgtctgggtttaaatcccatggtacaagataataatgcccagtacaccaccaatttcaccgtttcgattgaagctgccgaaggcgtgaccaccggtatttcagcggcggatcgcgcgcgcacagtacaagcggcagtggcaaaagaagcgaaagcggccgatttggttcagccggggcatattttcccgttggctgcacaagatggcggagtattaacgcgcgctgggcacacagaagctgggtgtgatttggcacgcttggcaggtttagagcccgcgtcggtgattgtggaaattcttaatgatgacggcaccatggcgcgtcgtccggacttagaagtgttcgctgaaaaacacggcttaaagctgggtacgattgcagacttgattgagtaccgcaaccacaccgaaaccaccattgagcgtgtcgcgcagtgtaaactgccaaccgaatatggtgagtttgagctggtgacttaccgcgacatcatcgataagcaaatccactttgctctgcgtaaaggcgatattactagtgcgccaactcttgtgcgtgtgcatctgcaagatacttttaccgatctgctgcacagcaaccgtgcggcagagcgcagttggccacttgcgacagcaatgcagcgtattgggcaagaaggcggggtgttggtgatcctgggtcatgaagaatcgagtgagctcttgctacaccgagtgaaaatgtttgagctgcaagataaaggcgaagcccctgcgatggccaaaaaacaaggcacttcacgccgggtcggggttggctcgcaaatccttgctgatcttggagtgaaagagatgcgtctgctctcttcaccaaacaaaaagtaccacgcattgggtggttttggtctcaatgtggtcgaatacgtctgcgaataa

SEQ ID NO: 41245 - DNA, 654 bp, Vibrio cholerae
atgtttacaggtattgttgaagcggttggcaagctgaccgctattatccctaaaggcagcgacgtcaccatcagtgtagatgtgggtaagctggacatgggcgatgttaaactcggtgacagtattgccactaatggcgtctgcttaacggttgtggcatttgatcagcgtagttttagcgcggatctgtcgatggaaaccctcaaaaaatcgggctttgcacagtatcaggttggtgatcgcgttaaccttgaaaaagccatgctgcccacgacccgttttggtggtcatatcgtctcagggcatgtggatggcgtaggtgaaatcgtcgagcgtattcctgtggggcgtgcggtggatctgtgggtcaatatgccggcagaaatcagcaaatacgtggctgaaaaaggctcgattaccgttgatggcatcagtttaacggtcaatgatctgcgtaaaaacgcgtttaaactgaccatagtgccccacaccagcgcagaaaccactatcgatgaattccaagtgggacgccgagtcaatctggaagtggatgtattggcacgttacatggagcgtttactgcaaggtcaacaagagagtgaacctcaatcgcgtctgaccatggcatttttgcaacaaaacggttttgcttaa

SEQ ID NO: 41246 - DNA, 1104 bp, Vibrio cholerae
atgcctatgtttacctcttttgatcatcaaatgatgtctcgcgcgattgaacttgcgtggcgcgggcgttttaccacttctcctaatcctaatgtcggctgcgtgatcactcgcggtgagcagattgtaggggaaggtttccattttcgcgcgggcgaaccccatgctgaagtgcatgctatgcgccaagccggtgagcttactcgcggtgcgaccgcttatgtcactttagagccttgctctcattatggtcgcacaccgccttgtgctgaagggcttattaaagccggggttgcgaaagtgatttgcgcaatgcaagaccctaacccacaagtggcggggaagggcgtacaaatgctgcgtgatgccgggattgaggttgaagtggggttgctggaagcggatgctcgagtactcaaccgcggttttctaaaacgtatggaaaccggcatgccttttgtgcagcttaaaatggcggcgagtctcgatggacaaaccgcgctcgctaacggtaaaagccagtggattacctctcctgcagcacgtaaagatgttcagcggtttcgcgcgcaagccagtgcgattctctccaccagtcaaacggtgctggcggataatgcttctctggcggtgcgttggtacgatttaccgtcatcggtacaggcgcaatacgcagaagcggatttgcgtcagccactgcgggtgattttggatcgtcaacatcaattgcatccagagttagcgttataccaaacaccttcacccgtgctgcgagttgccagcgagaatgccgaactctgtatctctgctgagaacggaaagcttgatttgcgtgagcttttggcactactcgctcagcaacacaatgtgaatcaactctgggtagaggcggggagccaactggctcaatctttgattgagcaaaagttggtggatgaaatcattctctatttagcgccgaaactgatgggcagtgatggccgtggtttatttggcgcgctcggtttgacggaaatggctgaggccattgaactcaaaatagaagattgtcgaatggtgggggcagatttgcggatcatcgccaccccaaaaacaaaagattag

SEQ ID NO: 41247 - DNA, 1254 bp, Vibrio cholerae
atgatggatttaaccgtactcggtaaagcggccaaagcggcctctttccaactggctaccgccagtaccgcgcaaaaaaatcaggctctcgccagtatggccgatcagttggaagcgcaaagcgcgagcattcttgctgcaaacgcaaaagatattgcgctggggcgcgaagcgggtttgtctgatgccatgctggatcgcttgctgctcaatgagtctcgcttgcaagcaatcgccaacgatgtgcgtaacgtgatcaaattgaacgatcccgtcggcagcgaaattgatagccgagtgttggaaaacggcatgtcattggcacgccgtcgcgtcccccttggtgtggtcggcgtcatttatgaagctcgccctaacgtcaccattgatattgcggcgctgtgtttaaaaaccggtaacgccgcgattttgcgcggtggcaaagagacgtttttctctaacatggaactggtcaaagtgatccagtcggcgttggataaagcaggtctgccagcggcttccgtgcagtacattgaaaagccagatcgtgaactggtgacgcaactcctgaaaatggatgattacgtcgacatgatcatcccacgtggcggtgcgggcctgcacaaaatgtgcaaagaaaacagcactgtgccagtgatcattggcggctttggcattagccatattttcgtggatgaaagtgccgatctggataaatccgttgccgtgattgaaaacgctaaagtgcagcgcccatcggcgtgtaatgcgctagataccttgttagtccatcaagcgattgccaaaccgttactagacaaactcatcgcaaaactgaatggcaaagtggcgtttgtggcggagccaaaagccaaggcgttgatgagttcagcggctgagctgcgtgatgcgcaagcgggcgattttgataccgaatggctcagctacaccttaggggtgaaagtggtacaggatgtgcaagaagccattgagcatatgcgcgagcacaatgcgagccattccgatgcgatcatgaccaacgatctctataacgctgagctgtttgtgaatacggctggttcagcggcggtgtatgttaacgcttctacgcgttttacggacggtgcacagtttggtttaggcgcagaagtagcagtctcaacacaaaaactgcacgcgcgtggcccgatggggctagaagagctcaccagctacaagtgggtgggtaaggccaattacctgtcacgcagctaa

SEQ ID NO: 41248 - DNA, 2121 bp, Vibrio cholerae
atgatgttttgggatagcgaagtagcgaaacgtctgctggcacaaggcgcgctgcgtcctttggatgtgcagtttgcccgctttattggcaagcaagccgtattggcagggcacaacgctgcagaaagtgagcttttgagtgtactgagcgcggcgctcagtgcagaacttgggcgtggacacatctgtctgccactgtgtgatgcacagggtaatcgttgcgatctagcggcgctgattggtctttatggtgaagcgagtttgcagcacagtgaacgctggttagcggtagactggcaagccttactgcaagcctcgccgttggtggggcagcaaggtgaagcggtgccgttaatgtttgatggctcaaggctctatctgcatcgctactggcattatgaaaagcaactggcggcgcgattgactgagttggccgcaccccaacgtttaagccctgctgaactggctaacttgcgtgaacgcctgaataccttatttgcccgcgactatttaggcttgtggcaagcactacaacaaaagccgctaagttcggtcgagcggattcaactgctgaatgatcgattggatgttgtggagtcggatgcgctggattggccagcgattgaagctgtagtcgaaaaagcgcagcgtgccgcggatttgcaagctttagagcagcttattccgcttactcactgcttaaactggcaaaaagtggcggccgctgtcgctcttacccgccgttttgcggtgatttccggtgggccgggaaccggcaaaaccaccacagtgaccaagcttctggcggcgctgattagccaaagcatggcgcaaggtaaagtgccagagatcaaattgatcgctccaaccggtaaagccgcggcacggttaaccgaatcgatgggtaaagcggtgagtcagctggcgatagagcctgagatcgccgcggcgatcccgagctcttccagcaccattcaccgtttgcttggcgcgattccgggcagcgctgagtttcgtcatcatacacgtaatccactccatcttgatctgttggtggtggatgaagcgtccatggttgacttgcctttgatggtgaaactggtcgaagcgctacccaagcacgctcggttgattttgctcggcgataaagatcaattggcttcggtggaagcgggggcggtgctcggtgatatttgtaccttcctgaaccaaggttacggccatgagcagggcgcgcagttggctgaactgacggggtttgccactctgcgccaaactgccagtaaaacggtaaacccggtggcggattgcttatgtatgctgcaaaaaagctaccgttttgatgcgcgatctggcattggtcaattggcgaaagcgatcaacagtggatctccggcgcgcgttgaagcggtgtggcaacagtcgttcagcgatattgaacactttgcccttagtggtgagcattatcagcaactgctgcaaaccttagtgcaggcttatcgtccttatctgagcttgcttaatcagccaactgagcaatttgagtcgacccaacaaagcatgctcacacttgccaaatcagcacttgatgcgttcagtcgctgccgattgctctgtgcgctgcgtgaaggcgattttggagtgatggggctgaacactcgcatcgaacgggcgttgaatgctcacaagctgattaaaacgcaagaagagatctggtatcacgggcggccgatcatggtcacgcgtaacgatcatggtttggggttatacaatggcgatattggcttgtgtatgcgcgatcgtgacgatgatcagggcagactgaaagtctattttgagttgccggatggcagcattaaagccgtgttgccgagccgagtcccgcaacatgaaaccgcgtatgcgatgaccatacataaatcgcaaggcagcgaatttgatttaactttgctgattttaccgccggattacagtccgattctgacgcgtgagttagtttacacggggatcacaagggcgaaaaaacagctcaaattgtattgcgataacaaggtattgcagcgagcaattaaagtgaaaacccaacgggcgagtggcttagtggcaaggttggagcagtaa

SEQ ID NO: 41249 - DNA, 969 bp, Vibrio cholerae
atgattcgagcagcaaaagcgaaagtgatgggagcgccgaccccaatggccggcctcgcgctagggattgcgagcttgggatggagttgggaaaacatgattgcggcacacggtgtcgcgcagtgggtgggtgcagcaatcgccagtgtgctattgattgtgctggcctttaaatttttatggcacggtcacttgttacgccaagatttggcgcatccggtagtgggcagtgtggtgccaacctttgccatggcaaccatggtggtatcggcgtcattggggcatttttaccctgtggctggcgatgccttgtggctgtttgccgtgggtttacacattctgtttttggtgagttttttgtatcaccgcgcccaagcgtttgagctgcaccacatggtgccaagctggtttgtgccacctgtcggcattatcgtcgctgacgtttctttctcgggccatcctgcgttagcgccaattgcctacgcgtgtttagtgtttggcatgctggcttacgccgtgatgctgcctatgatgatctatcgttttatttttacacatgaaattccagatgcggcgaagccaacattggcgatcatggccgcgccagccagcctctctctggcggggtatttgaccgtagtgtccgagccttcacctgtgattgtggcgctgctgtttgggattgcggtgctgatgaccgccatcatctacttggcgttcacgcgcttactgcgtctgccctttagtccgggctacgcggcattcaccttcccgatggtgattggtgcgaccgcactgtttaaaatggcgcactggatggaaaatatcggcgtggcagagcattacgtagcacaagtgcattggttagcgagccttgagctgatcgtagccacggtggtggtgagctatgttgcgattcgctatctggccttttatcaaccacataaagtgttagtgggttctcgttaa

SEQ ID NO: 41250 - DNA, 1380 bp, Vibrio cholerae
ttgattgtgaaagctaagcgcgcctatgtatgtaatgaatgtggagcggattttccgcgttggcaaggacagtgtaatgcctgtggttcgtggaattcgatttcagaagttcgtttagcggcttcaccgcaagtggcgcgcaatgaaaggttggtcggttatgcgggagcccttgaagcgaaagtacaaactttggctgatattgatttacaagaagtgcctcgattcaccagtggctttaaagaactagatcgcgtactcggcggcggaattgtgccgggtgcggcgattttgattggtggtaatccgggcgcgggtaaatcgaccttactactgcaaaccatgtgtttactttccggacaaatgccgacgttgtacgtgacgggcgaagaatcgttgcagcaggtcgcgatgcgtgcttcacggcttggtttgccgaaacagcatctaaaaatgctctcagaaaccaatgtggatcggatttgccagattgctgagcaagaaaagccgcgcattatggtcatcgattcgatccaagtgatgcatgtggcggatgtgcaatcgtcgccggggagtgtcgcgcaagtgcgtgaatcggccacggcgcttacgcgttatgccaaacaaaataatgtggcggtatttattgtgggccacgtaaccaaagatggtacgttggcgggacctaaagttcttgaacacatcatcgattgctcgattctgcttgatggtgatacagacagtcgttttcgtacacttcgtagtcataaaaaccgttttggtgcggtcaatgaactcggtgtgtttgcgatgactggacaagggatgcgtgaggtgagtaatccatcggcgattttcctttctcgtggagaagaagccacatctggtagctcagtgatggtggtgtgggaaggaactcgcccactcttagtcgagattcaagctttggtcgattactcacaactcgctaacccaagacgcgttgcggttggcttagaacaaaaccgtctctctttattactggccgtgctgcataaacacggtggtttgcaaatggctgatcaggatgtgtttgtgaacgtagtcggtggtgtgaaagtgacggagaccagtgcagatttagcgctactcatggcgttattgtcgagttttcgtgatcgtccgctgccaaaagatgtcgtggtttttggtgaagtcggattggctggagaaattcgtcccgtaccgagtggtcaagagcgccttaacgaagccttcaaacatggttttaagaaagcgattgtgccgattgccaatatgccgaaaggtggtattgaaggtatgcagatccacggtgtgaaaaagctttctgatgcgatcgcggcttttgatgagctgtaa

SEQ ID NO: 41251 - DNA, 780 bp, Vibrio cholerae
atgagcgaattaaaagtagcagctctacgtgcactgaaactgatggatctcaccacgttgaatgacaacgatacggatgccaaagtgatccaactttgtcatgatgcgaaaagtccagtcggcaacacggctgccatttgtatttaccctcgctttattcctattgctaagaagacacttcgcgagcaaggaacccctgaaatccgtattgctacggtaaccaattttcctcacggtaatgacgatattgaaatcgccgttgctgaaacgaaagccgctgttgcttacggtgctgatgaagtggatgtggtattcccatatcgcgctctgatcgcaggcaacgagcaagtcggttttgatctggtgaaacagtgtaaagcggcttgtggcgacaaagtgctactgaaagtgatcatcgaaactggtgagctgaaacaagaagcgctgatcaaaaaagcctctcaaatctgtattgaagctggcgcagatttcatcaagacctcaaccggcaaagtgccagtaaatgcgacaccagaatatgcacgcatgatgctggaagtgatccgtgatatgggcgtagccaaaaccgtcggtttcaaacctgccggtggtgttcgtaccgcagaagatgcgcagcaatatctggccatggccgatgagatcctcggtggcgattgggcagacagccgtcactaccgtttcggcgcttcaagcctactgactaaccttctgaatacattagaagtgacagaccaaaaggcagatcctgccgcttactaa

SEQ ID NO: 41252 - DNA, 861 bp, Vibrio cholerae
atgtatgagaagttaatcggggcacatgtatcggcctctggtggtgtcgaactcgcgccagttcgagctcatgaaatcggagcgaatgcttttgctctcttcaccaaaaaccagcgccaatgggcagctaagccactggaagcgagcagcattcgtgctttcaaagccaattgtaaaaaatggggatttggcagtgaggcgattttgccgcacgactcttatctgattaatttaggggctccagaacccgagaagctcgacaaatcacgagccgcttttgtcgatgaaatgctgcgttgtgatcagttagggttaactttgcttaactttcatcccggtagtcatttacagcaggtctctgaagaggcgtgtttagcgacaattgctgagtcaattaatcttgcgcatcgtcaagtaccgaatgtgattgcggtgattgaaaataccgcagggcaggggagtaacttaggttggcgttttgagcatctggcggcaatcattgaccaagttgaggataaagagcgggttggcgtatgcctagatacttgccacacctttgccgcagggtatgatttgcgtacgaaagccgcgtgtgatgagacattcgctgagtttgagcgagtggtcggtatgcactatttgcgcgcaatgcacatcaatgattcaaaaggtaagctggctagccgcgttgaccgccatcattccttaggtatgggagagattggctgggagtgttttgaatatatcgcgcaagatgctcgatttaacggtatccctctgattttagaaacgattgatcctgacatttgggcgactgagatcgcaacgctacgcaaattttcgacgcaaaaagagaattaa

SEQ ID NO: 41253 - DNA, 1281 bp, Vibrio cholerae
atgaagctgtacaacataaaagaaaatgatgaacaagtctcctttggtcaagccgttcgccaagggttaggccgcaatcaaggcctgttttttccggcacaattgccgaagtttgacgatattgatgctctattggccgaagatttcgtctctcgtagcagcaagattttatcggcgttgattggcgatgaactgcctgcggataaaattcgcgctatggtggattccgcctttcaattcgccgcaccgattgccaaagtgaaagagggcgtttacgcgctcgaattgttccacgggccaacgctcgcgtttaaagattttggtggtcgctttatggcccagtctctggcggcggtctcgaacggcggaaaaatcacgattttgacggcgacatccggtgataccggcgctgctgttgcgcacgcattttatggtatgccagacattaatgtggtgatcctttatccgaaaggaaaaatcagtccgctgcaagaaaagctgttctgcacattaggtaaaaacattcacaccgtggcgatcaatggcgattttgatgcttgccaagcactagtgaaacaagcttttgatgacgcagagctgcgccaacagataggtttgaactctgccaactcaattaacatcagccgtttgatggcacaaatctgttactactttgaagccgctgcgcagatgagcaaagctgagcgtgaaaatctggtgatttcagtgcctagtggcaactttggtaacttaaccgcagggctgttagccaaagcactgggtttaccggtgaagcgctttattgcggcaaccaatgccaacgatacagtgccacgttacttggaaacgggacgttgggaacccaaacccacggtagcaacaacgtcaaatgcgatggatgtcagccaaccgaacaactggccgcgtatcgaagagctctgccaacgtatgggatggggcttagaaacgctgggcaaaggcgcggtttctgacgaggaaagtgcgcaagccgtacaagaactttacgatctaggctacttgtgtgaaccgcatggttcgattgcttaccgtgtattggaagagcagcgccagccgcaagaaacggggctgttcttatgtaccgcgcatcccgccaaattcaaagaagtggtggacgatattttaggtaccgacattgctctaccagcgccattggcaaaacatgcggcgatggaattgctctcacaagagctgaatgccgatttcgcagcgctgcgtgcgttactggtgaatgtgaaataa

SEQ ID NO: 41254 - DNA, 957 bp, Vibrio cholerae
atgagtgttgtggtgtacgcacccgcttccattggtaatgtcagtgtcgggtttgatgtgttgggggccgcagtgtccccgattgatggcacgttactcggcgatcgagtgaaagtggaagctggcgcagaggctttcacactgaaaacggcggggcgatttgtcgataagcttcccgctaatccgcaagaaaacattgtgtatgactgctggcaagtattcgcgcgtgagctagagaaaaagtcggtggtactgaagccgctgaccatgacgctagaaaaaaatatgccgattggttcaggattgggctccagtgcttgctcgattgtcgcggctctggatgcgttgaatcagtttcacgccagtccgcttgatgaaactgagcttctggctctgatgggggaaatggaaggcaagatctctggcagtattcactatgacaacgttgctccctgctatttaggtggtgtgcagctcatgctggaagagcttggcatcatcagtcaatccgtaccgagttttgatgactggtattgggtgatggcctatccggggatcaaggtgtccacggcggaagcgcgtgccattttgcctgcgcagtatcgccgccaagatatcgtggcgcatggccgctatctggcaggatttattcacgcttgccatactcagcagcctgaattagcggcaaaaatgatcaaagacgtgattgccgaaccctatcgtgagaaactgctgccgggttttgctaaagcgcgcaactacgccgcttcggctggcgcactggcaacgggcatttcgggcagtggtccgactttgtttagcgtgtgcaaagaacaagcagtggctgaacgtgtggcacgttggcttgagcaaaactatgtgcaaaatgaagaaggattcgtccacatttgtcgtctagacaagcaaggttcgaaagtaacaggaagtgagctatga

SEQ ID NO: 41255 - DNA, 2478 bp, Vibrio cholerae
atgcatttggaggaagggatgcgagtattaaagtttggaggttcatcgctggcggatccggagcgttttctacgcgctgccgatatcatcgcgaataacgcacagcaggaagaggtggccgttgtcctctctgctccgggaaaaaccaccaataaattggtggcagtgattgaaagtgctttacgtcagggagaggtggaagcgcaaatcgtagagctagagagctcattctatgccttgcttgatggcattaaagcgcagctcccgaatttggatgacagtgcttatcaacagcaagtgcactcttccatgactcagttacgccagtttgtgcatggcattacgttgctcggtatgtgtccagacaatgtgaatgcacgcattatcagtaaaggtgaacgcgtttccattcaattgatgaaagcggtgatggaagccaaaggtctgccagcgaatttggttgaccccgttaaatacctgcttgccaaaggggatcatcttgaagctatggtcgatgtggaaatctcgactcagcgtttcagacaagcaccattgccacaacagcacgtcaatatcatgccgggctttactgcgggtaatgcacagggtgagttggtctgtttagggcgtaacggttcggattactcagccgcagtactggctgcctgtttacgtgcggattgttgtgaaatctggacggatgtggatggagtttataactgcgatccgcgtttggtcgatgatgcgcgtcttttgaaatcccttagctatcaagaggcgatggagctttcttacttcggagcatctgtgttgcatccgaagaccattgcaccgattgctcaatttcaaatcccttgcctgatcaaaaacagcttcaatccacaaggtgcgggcaccttgattggccaagacactggcgaagataaactcgcgatcaaaggcattaccactctgagcaatctgaccatggtcaacgtttctggtccaggaatgaaaggcatggtggggatggcgagccgcgtgtttggcgcgatgtcagcggcagatgtgtcgatcgtgctcattactcaatcttcttcggaatacagcatcagtttctgtatcgaagcacaacataaagctttggcacagcaagcgctggcggatgcatttgaactggaactcaaagatggcctgcttgagccggttgagtttgtcgataacgtcgccatcatcacgctggttggtgatggtatgcgtacctctcgcggtgtcgcgtcgcaatttttctcatctctggccgaagtacacgtcaacgtgattgcgattgcccaaggctcttctgagcgtgcgatttcagcggtgatccccgatgataagatttcagaagcgatcaaggcctgtcacgaaaacctcttcaactctaaacactttttagatgtgtttgtggtcggtgttggtggcgtgggcggtgagttggtggatcaaattcagcgtcaacaagccaagcttgcggaaaaaggcatcatgatgcgcgtttgtggcctcgctaacagtaaaggcatgctgcttgatagccaaggcttgccgttagagcagtggcgcgatcgtatgatcaatgcggatcaagcgttcagtttagagaatctggtggctttggtgcagcgtaatcacatcattaacccagtattggtggattgcacgtccagtgatgagattgctaaccagtatgcggatttcctcgccgcgggtttccatgtggtgaccccgaacaagaaagccaataccgctagcatgagttattaccatcagctacgtaatgtggctcgtcattcgcgtcgcaaactgatgtatgaaactacagttggcgcgggtctacccgttatcgaaaacttgcaaaacctaattgcagcaggggatgagctggaaaaattcagcggtattctctcaggttctctctcctttatcttcggtaaattggatgaaggcatgaccttgagccaagcaacgcagcttgctaaagagaaaggctttacagagccagatccgcgcgatgatctctctggtatggatgtggcgcgcaagttactgattttggcgcgtgaagcagggtacgaattggagctgagcgatgtggatgttgaacaagcactgcccgctggctttgatgcttcaggcagtgttgaggagttcatggctcgtttagcgcaagccgatgccgcgtttgccgagcgagtggcgcaagccaaagccgaaggcaaagtgcttcgctatgtggcgcaaatcgtcgatggccagtgccaagtgcggattgtcgcggttgatgaaaacgatcctatgttcaaagtcaaagaaggtgaaaacgcgctggctttctacagccgttactatcagccaatcccattggtattacgtggttacggcgcgggttctgaagtgactgctgcaggcgtgttctcagatgtgatgcgtacactcggttggaaattaggggtttaa

SEQ ID NO: 41256 - DNA, 4593 bp, Vibrio cholerae
gtgcacactcagtgcggttgcgtcctcaataactggaaggatgtatctatggtagataaagcgcaacgttcgcgtggtctttatacgcctgagctggagcatgatgcttgtggcatcggctttgtcgctcacctgaaaaatcgcaagtctcatcaggtggtcactcaagctttggacatgctcgcacgcatggaacaccgtggcggtcagggttgtgacccttgcagcggtgacggtgcgggtattttgttgcaaaaacctcacgaatttttactcgaagaagcggttaaactggggatcaagctgccttcattcgaaaagtacggtgttggtgtggtgctgttcccgaaagatgaacataaacgcgcccaatgccgcgacattctagaacgcaatgccaaacgccttgatctggatgtgattggctaccgcgttttaccgaccaataacagcatgttgggtgccgaccccctcagtaccgaaccacaatttgaacacgtgtttatttctggcggcccgggtatgcagcctgacgagctagaacgcaagctgtacgtgctgcgtaactacaccgttcgcgtctgccttgagagcgtgtcgaacatcggtgatgatttttatatcaactcgatgtcgtacaaaaccttggtctataaaggtcagttgactacagagcaagtaccgcaatacttcctcgacttgcaaaatccgaccatggtgacagcgttagcactggtgcactcgcgtttttcgaccaacaccttcccgaaatggcgactggctcaacctttccgctacatcgcgcacaacggtgagatcaacacggttcgcggtaacttgaactggatgaaagcgcgcgaagcgattttacaatccaagctgtttactcaagctgaaatcgatatgctgctgcctatctgccaagaaggcgcatccgattcggctaactttgacatggtactcgaactgctggtgctttccggtcgcagcttgcctcacgctctgatgatgatgatcccagaagcatggcaagaaaacaaagcgatggatcctaagcgccgcgccttctatcaataccacgctaacgtcatggaaccttgggacggcccagcatcagtgtgctttaccgatggggtacaagtaggcgccacactggatcgtaacggtctgcgtccgtctcgttataccgtgaccaaagacgattttctgatcatggcttccgaatctggcgtcgtggaaattgatccggccaatgtggaataccgtggtcgtctgcaaccgggacgtatctttgttgccgacttagaacaaggccgtattatctcagatgaagaggtgaaagacggtatcgcttcggcgcagccttatgaaaaatgggtagaagaaaacctactcagtttgaaaaaactgccggatgccgacaacgtacatagccaaccgtcgccagagcgtctcctccatcgccaacaagcgtttggggtgagtagcgaagaggtcaatgacatcattctgactctcgcgcaaactggttatgagccgctcggttcgatgggggcagactggccggtcgccgtgctgtcacaccaatctcagcatctctccaactacttcaagcagttgtttgcccaagtgaccaacccaccgatcgacccgatccgtgaacgcatggtgatgtcgctcaacacttatatcggccgcgatcaaaacttgctagcagaaacccctgcgcactgtcgtaaggtcgaattggaatcgccggtcatttctaatgctgagcttgagaaaatccgggcaatcgataacgagcacttgcaagccaaaaccttagacatcgtatttcgtgccagcgatgaaccgggcaagctcgaacgcgctctgaaacgtatttgccaatacgcggaagatgcggtgattgatggctattcgatcattttgctgaccgaccgcgcggtaaactccaaccacgccgccatcccagccatgctggctgtaggcgcggtgcaccatcacctgatccgcaaaggtctgcgttcgaaatgcggcattgtggtggaaactggtgatgcgcgtgaaacgcaccactttgcaaccctactcggctacggtgcaaacgcagtcaacccgtatctagtggtggaaaccatcgtcgatctcaagcgtcagaagaaactcgatgccgatgtttcggtagagaaatacttcgagaattaccgtaaaggcgtgaacggcggtctgttgaagatcttctctaaaatggggatttcgacgctgcagtcttatcacggtgcacagatttttgaagcgctcgggatcagtaaagcggtggtcgataaatacttcactggcaccatcacccgtattcaaggtttgaccctcgacgacatcgctaaagaagtgttggttcgtcatcgcattggttacccaacgcgtgaaatcccactgcaagtgctggatgtcggcggcgtgtatcaatggaaacagcgtggtgagcagcatctgtttaacccagaaacgattcacctgctgcaagaatcgactcgccacaaaaattatcagcagttcaagaagtacgcagccgcggtggatagccaaggcgataaagccgttactctgcgcagtcagcttgattttgtgaaaaatccagcgggttccattccgattgaggaagtggaaccgatcgagagcattgtgaagcgctttgccaccggtgcgatgtcgtttgggtctatctcttacgaagcgcactccacactggcgattgcgatgaaccgtctaggcgcgaaatccaactccggtgaaggtggtgaagacccaatgcgttttgagctaaatgccaacggtgattcagagcgttcagcgatcaagcaagtagcatctggccgtttcggcgtgacctcttactatctgaccaacgcagatgaaatccagatcaagatggcgcaaggggcgaaaccgggcgaaggtggtcagctaccgggtgataaagtcgatgaatggatcggggcaactcgtcactcgacaccgggcgtcggcctgatttcgccaccaccgcaccacgacatttactctatcgaagacttagcccagctgattttcgatctgaaaaacgccaaccgcaaaggtcgcgtcaacgtcaaactggtttctgaagccggtgtcggcaccatcgcatcgggtgtggctaaagccaaagctgacgtagtactgattgccggtcacgatggcggtacgggtgcatcacccatctcttctatccgtcataccggtttaccttgggaactgggtctggctgaaacccaccagactctgctcaaaaacggcctgcgtaaccgcattgtggtgcaagccgatggacagatgaaaaccccacgcgatatcgcgattgcggtactgttgggcgctgaagaatggggcgtcgcaaccgctgcactggtggttgaaggctgtatcatgatgcgtaaatgtcataaaaacacttgccctgtcggtatcgccacacaaaacaaaactctgcgtgagcgttttgctggccgtgtggatgacgttgtgaccttcttccaatacatggcacaaggcctgcgtgaaatcatggctgagctcggtttccgcaccattaacgaaatggttggccaagcgcacaaactcaaagtgcgtgatgatattggccactggaagtacaaaaacctcgatctgtcgccgatcctctttattgagcagccgcgcagcgaagatggtatttactgccagactcagcagaaccaccagctcgaaagcatactggatcgcaccttgatccaattagcaacgcctgcccttgagcgtggtgaagcggtcaaagcagagctaccgatcatcaacaccgatcgcagtaccggcaccatgttgtctaacgaaatctgtaaggtttacaaagaccaaggtctaccacagccaatgcaggtgaaattcaacggcagtgcgggacaatctttcggggcattcctcactaaaggcgtttactttgaagtggaaggcgatgctaacgactactggggcaaaggtctttctggtggcacgctggtgctctacccgaaccgtaacgccaccatagttccggaagagaacattgtggtcggtaacgtctgtttctacggcgcaacctctggcgaatcttacattcgcggcctagcgggcgagcgtttctgcgtgcgtaactcaggtgccaaagtggtggtggaaggtatcggcgatcacggctgtgaatacatgaccggcggtgtcgcagtgatcctcggttcaaccggccgtaacttcgccgcaggtatgagtggcggtgtggcttacgtgtgggataaatctggcgacttccaatctaagctcaatgcagaattggttgatctggaccctatcgaagcggaagacagagccctactcaaagagatgttaaccaagcatgttcaattcacaggaagtgaagtggccaaagctttccttgccaactttgacgcaagcctagccactatggtcaaggtcatgccgcgtgattacaaagcggtactgcaaaagcgtaaagcacaggagcaacaagccacattagcagcggaggcggtataa

SEQ ID NO: 41257 - DNA, 1470 bp, Vibrio cholerae
atgggtaaagcaaccggatttttagaatttggtcgtgaactgccgaaaaaaatcgacccggcagagcgcatcaaaaacaacaaagagtttgtccttaaccaagagtttggtaagaagatcaatcagcaagcttcacgttgtatggattgtggcgtgccgttttgtcataacggctgcccgattggcaacatcattcccgagtttaacgatgcagtgtatcgcgacagttgggaagaggcttggaatattctgagctcgaccaacaacttcccagagtttaccggtcgtgtctgccctgcaccttgtgaaaccgcctgtgtgcttggcatcaaccaagatccgatcaccatctgtaacattgaaaaaaccattgtggaacgtgcttaccaagaaggctatgccaagccgaaaacgccacgttcacgcaccggaaaaacggtcgcgatcattggctcaggccctgcggggctggccgcggcggagcagttgaatgccgcgggtcatagcgtcaccgtgtttgagcgggatgaaaaagtcggcggcttgctgcgctttggcattcccgatttcaaactcggtatggatgtgattgatcgcaaaatcaatctgatggaacaagcgggcgttaagttcgtggtcaatgcgcatatcggtgtagacatcaacgctcaacagttgcgtcaggagtttgatgcggtattgctgacgggcggctcaaccgtaccacgtgatctgagcattcccggacgtgatctgaaaggcgtttacttcgcgatgcagttcctcgcgcaaaataaccgccgagccaatggcatggatctgaaaggtgaagagatccacgctaaaggcaaacatgtggtagtgatcggaggcggcgatactggctccgactgtgtcggcacctctaaccgccacggcgctgcgagtatcactcaagtggagatcatgccgatcccaccgcaaaagcgcccagtgaatatgccttggccgcaatatccgatgattctgcgcacctctacctctcatgaagaaggctgtgagcgtcattggaacatcctcaccaaagagttcattggtaatgaacaaggtgaagtgacgggtctacgcatcgctgacatcgtttggaaagatgcagcccccggtgagcgaccaagctttgacgaagtggtgggcagtgaacgcgtcattccttgtgatatggcatttctggcgatgggcttcttgcatccagagccacacggcgtgcttgctcagttggggattaagcttgatgagcgcggcaatgtggcgacgcaagattttgcgaccaaccaaaaaggcgtattcgccgcaggtgatatgcgcacaggccaatccttggtggtgcgctgtatcaacgaaggtcgcgaatgtgcgcgagccgttgacaccttcttgatgggcaatacccatcttgaggcaaaagcggactcactcatgctgtcagcataa

SEQ ID NO: 41258 - DNA, 4464 bp, Vibrio cholerae
atggctctatacgatccaagtcttgaaaaagacaactgtggattcggcttgatcgcgcacatggaagggcaagccagtcacaaactcgttcgtaccgcgatttcagcacttgatcgcatgactcaccgtggcggtatcgccgccgatggtaaaactggtgatggctgtggtctgttgctgcaaaaacctgactcttatttgcgcctgatcgcagaagagcaacattggaaactcagcaaacagtacgcgattggcatgctgtttctcagccgagatccacacaaagcgcagctggcacagcaaattgttaaccaagaactcgctaaagaaaccttaagcgtggcaggttggcgcaaagtgcccaccaacccgaaagtgcttggcccgatagccctcgactctttgcccgatattcaacaagtcttcatctccgccccggccggttggcgtgagcgcgatgttgagcgccgtctgtatattgcgcgtcgtcgcattgaaaaacagattacggatgatcgcgatttctacatctgctcgctctcgactcaagtgttggtttacaaaggcctgtgtatgcccgcagacctaccacgcttttatctcgacttagccgatctgcgtatggaatcggcgatttgcttgttccaccaacgtttctccaccaatactcagccacgctggccgctggctcagccgtttcgctatctggcgcacaatggcgaaatcaacaccattgaaggtaaccgccagtgggcacgcgctcgggcttataagttcgcgtcaccgctgctgcccgatttgcaaagcgctgccccttttgtgaatgaaaccggttcggactcttcgagcctagacaacatgctggatctgtttttagccggcgggatggatatcttccgtgcgatgcgcatgctggttccgcccgcatggcaaaaccatccggatatggatccggatctgcgtgctttctacgatttcaactccaaacacatggagccttgggatggcccggcggggatcgtgctgtccgatggtcgttacgccgcgtgtaaccttgaccgtaacggcctgcgtcctgcgcgttatgtgatcaccaaagataagctcatcaccctcgcttcagaagtcgggatttgggattacgcaccagatgaagtgtctgaaaaaggtcgggttggccccggcgagctgctggtgatcgacactcgcaaaggcaaaatttggcaatcgagcgaaattgataacgacctaaaaagccgtcacccctatcgtgagtggatggaaaataacgttcataaactcacgcccttttcacagttgcccgatgataaggttggtgagcgcagctttgatgctgacttgctaaaaacctatcaaaagcagtttgcgatgagcaacgaagagatcgatcaaatcctgcgcgtgcttggcgatatggcacaagaagcggtcggttcaatgggcgatgacacgccgatggcggtgctttcttccaaagagcgcctgatcagcgattatttccggcaaaaattcgctcaagtgaccaacccaccgatcgatccactgcgtgaaaaacatgtgatgtcgctggccaccagcatcggccaagagatgaacgtattttgcgaaaccgatggtcacgcccatcgcgtcacttttgattcgccgatcctgctctactcagatatgcagcagttactgacgctcagcgatcagcactatcgcaacaccattcttgacatcaacttcgatccgcaagagaaaaatctcaaacaagcggtgttggatttgtgtgacaaagccgaacaagtggtgcgcgaaggcaccgttttagtggtgctctccgaccgcgcattaaccgcggatcgtctgccgatccccgctgctatggcggttggtgcagtacaagctcgtctggtggaagccaatttacgctgcgatgccaacatcattattgaaaccggtgccgcgcgcgatccacaccattttgcggtgctgatcggctttggtgccacggccgtttatccttaccttgcctacgaaacgctgggcaaaatgattgatgatggcgcgctgcaaaagagctatcgcgaagtgatgcagaattaccaatacggtatcaacaaaggtctgtacaaaatcatgtccaaaatgggcatttcgactgtcgcctcttatcgctgctcacaactgtttgaagcggtgggtctgcaccgcgatgtggttgatctctgctttaaaggggttaccactcgcattcaaggcgcgaacttcgacgattttgagcaagatctgtttaatctgtcgcgtaaagcatgggcaaaacgtaagcctctcgaacacggtggtttactcaaatacgttcacggtggcgaataccacgcctacaacccagatgtggttggtaccctacaaaaagcggtcaaatccggcgaaatcatggattaccgtgagtttgctcagcaagtcaaccagcgcccagtcgccatgctgcgtgatttgctgcgtttgaaaacctcggataaaccgctgccactggagcatatcgagcccgcgagcgatctctacaaacgctttgactccgctgccatgtcgattggcgcgttaagcccagaagcccatgaagcgttagccaccgcgatgaaccgcctaggcggctattccaactcaggtgaaggtggtgaagatccacgccgctttggcactgagcgtaactcacgtatcaagcaagtcgcctctggtcgttttggggttacaccgcactatttaaccaatgcggatgtgctgcaaattaaagtggcgcaaggggcaaaacccggtgaaggcggtcagcttccggggcataaggtcacggcggagatcgccaaactgcgttattccgttcccggtgtgactttgatttcgccgccgccgcatcacgatatctactcgattgaagatttggcgcagctgattttcgatcttaaacagatcaacccgaaggccttggtctcggtcaagctcgtctctgagccgggcgttggcacgattgccactggtgtggcaaaagcctacgccgaccttatcaccatctcaggttatgacggcggcaccgcagccagcccgctcacctctgtaaaatatgcaggaagcccttgggagctcggtttggcggaaacgcaacaagccttggtcgccaacggtctgcgtcacaagatccgtctacaagtcgatggcggtttgaaaaccggattggatgtgatcaaaggagcgattttaggcgcggaaagttttggttttggtactgcgcctatggtggcgatggggtgtaaattcttgcgtatttgccacctcaacaactgtgcaaccggtgtggcaacgcaggatgaaacgctgcgcaaagattacttcaaaggtctgccagagatggtgatgaactatttcaaaggcttagctgaagaagtgcgcggttatctggccgaattgggcgttgagaagctcaccgatctcatcggccgtaccgatctgttggaggtggtagaaggcatgaccgcgaaacagagcaaattggatctctccgatctgctcgaagcacctgtatcaccacaaaatctgccactgtactgcaccgaaccgaacacgccgtttgataaaggggcacttaaccagaaaatcgtcgaagatgcgctagcagccgtggaaaaccagcaatcgctggagctctattacaacgtgatcaacaccgaccgttcgattggcgcgcgtctctctggtgaaatcgcgaaacgttacggcaatctcggcgtcgccacctcgcccatcaaggtcgtcctcaatggtaccgcagggcaatcgttcggagtctggaacgcaggtggtcttgagctgtatctcaccggtgatgccaacgactatgtcggtaaaggcatggcaggcggcaaaattgtgattcgcccccaccaaggcaccgcttttgtgtgtaacgaagcgaccattatcggcaacacctgcttgtatggcgcaacgggcggtaaactgtttgccgcaggtaaagctggcgagcgtttcgcggtgcgcaactccggcacgattgcggtgattgaaggcgctggcgataacgcctgtgaatatatgaccggtggcatcgtcgccattttaggcgcaacgggcgtgaactttggcgcaggcatgaccggcggctttgcttacgtactcgatgagaatggcgatttccaaggccgcgtcaatgatgaatccgttgaagcggttgccttgaccgacttatatatccatcaagagcatctgcgcgggttgattgctgaacatctcgaagagactggctccgcccacgcagagcgaattttggcgaactttgatgaatggattccgaagttctatctgatcaaaccacaagcagcggacttacgtaccctgctcggccatcagagccgcagcgcagctgaactgcgcgtgcaagcacaataa

SEQ ID NO: 41259 - DNA, 1416 bp, Vibrio cholerae
ttgatgagccaaaacgtttaccaatttatcgatgtcaatcgtgtggatccggccaaaaaaccgctgcacatccgcaaaattgagtttgtcgaaatttacgagccctttactaagcaacaagccactgcgcaggccgatcgctgcctcgattgtggtaacccttactgtgaatggaagtgcccagtacacaactacattccgcagtggttaaagctcgccaatgaaggacgcatcctcgaagcggccgatttggcgcaccagaccaacagcctgcctgaagtgtgtggccgagtttgcccgcaagataggctgtgcgaaggttcatgtaccttgaatgcggatttcggtgccgtcaccattggcaacatcgaaaaatacattacggataccgccttcgaaatgggctggaaacccgacatgtccaacgtggtctggaccgacaaaaaagtcgcgatcatcggcgcgggcccagctggtcttgccgccgcggacattctggttcgcaacggtgtacgacctgtcgtgtttgatcgctatcccgaaatcggcggtctgctcacctttggcattccctcattcaaacttgaaaaaggggtgatggaaaatcgtcgccgcatttttagcgagatgggtatcgagtttcgtctcaatgtcgaagtcggccaagacatcacactgcaacaactgctggatgagtacgatgcggtttttctcggcgtcggcacttatcaatatatgcgtgctggcttagccaacgaagacgcccccggcgtttatgatgcactgccgtttttgatctccaacacctataaagtgatggaacttaacaacgaggcgccattcattgatatggcaggaaaaaatgtcgtagtgctcggcggtggtgatacggcgatggactgcgtgcgcacctcgattcgccaaggcgcatctcgcgtgatttgtgcttatcgccgtgacgaagaaaacatgcccggctcacgccgtgaagtgaaaaacgccaaagaagaaggcgttgaatttatgtttaacttgcagccgctgggaattgaagtgaatgcccaaggccaagtgactggcgtgaaagtggtcaaaaccgcgcttggagaaccggatgcggcaggtcgtcgcaaacctgaaccggtcgcaggcagcgagcacgtcttgcctgccgatgccgtcatcatggcgtttggtttccaaccgcacaaaatggcttggttagagccgtttgatgtcgagctcgatcagtggggacgcatcaaagcccctgccaagcagacttaccagtatcaaaccaccaatcccaagatttttgctggtggtgatgcggttcgcggctcggatctggtggtcacggccattgatgaaggacgcaaagctgccgagggaattctcgactatcttggagtctag

SEQ ID NO: 41260 - DNA, 696 bp, Vibrio cholerae
atgaaaatcggcatcatcggcgcaatgcaacaagaagtcgccatcctgaaagatctcatcgaagacgtgcaagaagttaaccaagccggttgtactttttacagcggtcaaatccaaggtgtcgacgtcgttttactgcaatcaggcattggtaaagtctcggcagcattaggcaccgctttgctgattagccagtatgcgccggatgtggtgatcaatacgggttctgcgggcggctttgacgcaagtttgaatgtgggtgatgtggtcatttcaagcgaagtgcgccatcacgatgcggatgtgactgcatttggttatgaaattggccaaatggctggccaacccgccgcctttaaagccgacgagaaattgatgacagtggcggaacaagcgctggctcaattgccaaatactcatgcggtgcgtggccttatctgtaccggtgatgcgtttgtgtgcaccgctgaacgtcagcaatttattcgccaacatttcccaagcgttgttgcggtagaaatggaagcctctgcgattgcgcaaacttgtcaccaattcaaggtgccctttgtggtggttcgcgcgatttctgacgttgctgataaagaatctccactgtcgtttgaagagttcttgccactggccgccaaaagctcttccgctatggtgctgaaaatggtcgaactgctcaaataa

SEQ ID NO: 41261 - DNA, 831 bp, Vibrio cholerae
atgcttgttatccggcttatcgcctgcacgtttctgttcatcaccccaagcttattggccaagccttttcccgccgagcgcatcatcagccttgcccctcacgcgacagaaattgcttatgccgccggtttgggtgataagttggttgcggtgagcgagtacagcgactatccgccacaagcgctcgaactggagcgcgtcgccaatcatcaaaccatcaatatcgagaaaatcctgacgctcaaacccgatttgatcatcgcttggccagcgggcaatccaccgcgtgaattggctaaactgcgccaactcggttttacgatttacgattcacaaaccaaaacattggatgaaattgccgataatatcgaagcattgagtcactattcggccaaccctgaggttgggcaaaaagcggcacacgactttcggcaacgtttacaggatttacgcacgcaatacgcgagcaatcagccgatccgttatttctatcaactcagtgaaaaacccatcatcaccttggctcaaggtcactggccgagtgaagtatttagcctctgtgggggcgtcaatatttttgccgacagtgaggtgccctatccgcaagtgagcatagagcaagtcttggttaaacagccgcaagtgatttttacctcagagcatgcgatagccaatggccacatgtggcgagcttggcaggcagagctcagcgccgtgcaaaacgatcaggtttgggcactcaatgccgattggttaaaccgcccgaccccaagaaccctagatgcggtagagcaagtgtgcacatacctcaaaattgcacaaaagcagtaa

SEQ ID NO: 41262 - DNA, 972 bp, Vibrio cholerae
ttgtttactcttaaaaggacaaaattgaatatactaaccacattaagagagcaacttttaacaaacaatgtaattatgcctcaggagttcgagagacttgaggttagaggctctcatgcatataaggtatactcaattcccaaaagaaaagcagggcggcggacaatcgcgcatccttctagtaagctcaaaatttgtcagcgccatttgaatgctatcctaaatccattattgaaggtacatgactcaagctatgcatatgtcaagggtagaagtataaaagataatgctctagtacacagtcactctgcctatgtattaaaaatggacttccaaaatttttttaatagtattactccaaccattctacgacaatgtttaattcaaaatgacattctactttcagtaaatgagttagaaaaactagaacaattgatattctggaacccaagtaaaaaaaggaacggaaagctaatattgagcgttggatctcctatatcaccattaatatccaatgctattatgtacccatttgacaaaataattaatgatatatgcactaagcatggcattaactataccaggtacgcagacgatatcacattctcaaccaacataaaaaacactttaaataagctaccagaaatagttgagcagttaattatacaaacatatgctggaagaataataattaataaaagaaaaaccgttttctcatctaaaaagcacaatcgtcatgttactggtataacattaactaacgatagtaaaatatcaataggaagaagtaggaaaagatatatctcttctctagtatttaaatacataaataaaaatcttgatattgatgaaattaatcacatgaaagggatgttagcgttcgcatataatatagagcctatatatattcatcgacttagccataaatataaagtgaacatcgttgaaaaaattctcagaggaagtaactaa

SEQ ID NO: 41263 - DNA, 3231 bp, Vibrio cholerae
atgccaaaacgtactgacattcaaagcatccttatccttggtgcgggtccaattgttatcggtcaggcttgtgagtttgactactcaggcgcgcaagcgtgtaaagccctgcgcgaagagggttaccgcgttattctggttaactcaaacccagcgaccatcatgactgacccagaaatggccgatgcgacttacatcgagcctatccactgggaagtggtgcgtaagatcatcgaaaaagagcgcccagatgcgattttgcccaccatgggcggccagactgcgctgaactgtgcgctggcactcgaaaaacatggcgtattggctgagtttggcgttgagatgatcggcgcaaccgccgatgcgattgataaagcggaagaccgctcacgctttgataaagcgatgaaatcaatcggcctagagtgtcctcgcgctgataccgcaaaaagcatggaagaagcgtacaaagtcctcgatatggttggcttcccatgtatcatccgtccttctttcaccatgggcggcagcggtggtggtatcgcttacaaccgtgaagagtttgaagaaatctgtactcgcggtctggatctttcaccgaccaatgaactgctgatcgatgaatcactgattggttggaaagagtacgagatggaagtggtgcgtgataagaacgataactgcatcatcgtctgtgcgattgaaaacttcgacccaatgggcatccacacgggtgactcgatcactgtcgctccagcgcaaacgctaactgacaaagaataccaaatcatgcgtaacgcctctttggcggtactgcgtgaaatcggcgtagaaaccggcggttcaaacgttcagtttggtatcaacccgaaagatggccgcatggtgatcatcgagatgaatccacgtgtatcgcgctcttctgcgttggcttcaaaagccaccggtttcccaattgcgaaagtggcggccaaactggcagtgggtttcactctggatgagttgatgaacgacatcacaggcggcgcaacaccagcctcgttcgaaccgaccatcgactacgtggtcactaagatccctcgtttcaacttcgaaaaattcgccggtgccaatgaccgtctgactacacaaatgaagtcagtaggtgaggtgatggcgattggtcgtaaccaacaagaatcactgcaaaaagcactgcgcggcttggaagtgggtgcggctggtctggatgagaaagtggatctggacgcgccagacgctctgaccaaaattcgttatgagctgaaagaagcaggcgcagagcgtatttggtacatcgcggatgcattccgtgccggtatgtcagtggatggggtatttaacctgaccaacatcgatcgctggttcctagtgcaaattgaagaactggtgaagctggaagccgaagtgaaagccggtggctttgcgggcttgaaccaagacgtactgcgtaagatgaagcgcaaaggcttctctgatgcgcgtttgtcaaaactgctcggcgtgagcgaaaacgaaatccgtcgtctgcgtgaccaatacaacatccacccagtttacaagcgtgtggatacctgcgcggcagaatttaagtcagatacggcttacatgtactccacgtatgatgaagagtgtgaagccaatccgactgacaaagacaagatcatggtgctgggcggtggtccaaaccgtatcggtcaaggtatcgagtttgactactgctgtgtacacgccgcgcttgcactgcgtgaagatggttacgaaaccatcatggttaactgtaacccagaaaccgtatcaaccgattacgacacctcagatcgcctctactttgagcctgtaactctagaggatgtgctggctatcgtgcgtgttgagaagccaaaaggcgtgatcgtgcagtacggcggtcaaacaccactgaaactggcgcgagcgctggaagcggctggcgtacctgtgattggtaccagcccagatgcgattgaccgcgctgaagaccgtgaacgtttccaacaagcggtacagcgtttaggcctcaaacagccagacaacgcaaccgtaaccgctatcgagcaagcgattgagaagtcgcgtgaaatcggtttcccactcgtagttcgcccctcttatgttctgggtggccgtgcgatggagattgtgtacgatgagcaagatctgcgtcgttacttcaacgaagcggtgagcgtgtcgaatgaatcaccagttctgctggatcgcttccttgatgatgcaaccgaagtggacgtggatgcgatttgtgacggtgagcgcgtggtgattggcggcatcatggagcacattgaacaagcgggtgttcactcaggtgactcagcctgttctctgccggcttacaccttgagccaagaaatccaagacaagatgcgtgagcaagttgagaagttggcatttgaactcggtgttcgtggcctgatgaacattcagtttgcagtcaaagacaacgaagtttacctgattgaagtaaacccacgtgctgcgcgtactgtgccgtttgtttctaaagcaaccggtgctccgctggcgaaaatcgcggcgcgcgtgatggttggacaaactctggagcaacaaggcttcaccaaagagatcattccaccttactactcagttaaagaagtggttctgccgttcaacaagttcccgggggttgacccactgcttggccctgaaatgcgctcaaccggtgaagtgatgggtgtgggtgccacgtttgctgaagcctatgctaaagcagagttgggctgtggctcggtttaccctgaaggtggtcgtgcgctactttcggtgcgtgaaggtgacaaacagcgtgtagtggatctggcttctaagctagtgaaactgggttaccagttggatgcgactcacggtactgcagtgattctgggcgaagcgggcatcaacccacgtctggttaacaaagtgcatgaaggtcgtccacacattctggatcgcatcaaaaaccacgagtacacctacattgtgaacacggcttctggccgccaagcaattgaagactcaaaagtactgcgccgtggtgcattggctcacaaagtgaactacaccaccacactgaacgccgccttcgcaacttgtatgtcacacacggcggatgccaaagcatccgtcacttcagtacaagagctgcatgcgcgtgtaaaagcgaaccaagcttaa

SEQ ID NO: 41264 - DNA, 1140 bp, Vibrio cholerae
ttgagtaaatcagcactgttagtcctagaagatgggacagtgttccgcggagtgtccatcggggcagatggtatttccgtcggtgaagtcgttttcaatacctcgatgacggggtaccaagaaatcctcactgatccttcttattcccagcaaatcgttactcttacttatcctcacattggcaataccggaaccaactccgaagacgaagaatccaccgcgattcatgctcaaggccttgtgattcgcgatctccctcttatcgcttctaacttccgcagtgaacaatccctctctgattatctcaagtcacaaaacattgtcggtattgctgacattgatacccgtaaactgactcgtatcttgcgtgagaaaggcgcacagaacggctgcatcatggcgggcgataatctggatgaagcattagcactggcgaaagcgaaagagtttccgggcctgaaaggcatggatctcgcgaaagtggtttccaccaaagaagcgtatgcgtggaaacaaggctcatggacgctagaaggcggcctacctgaagcgaaagcggacagcgagctgccttaccatgttgtggcttacgattttggtgcgaagcgtaacatcctacgtatgttggtggatcgtggctgccgcttaactgtggtaccggcgcagacctctgcagaagacgtgctcgcccttaatccagacggtgtgtttctatccaatggcccaggcgacccagagccatgtacttatgcgattgaagccacacgcgttttccttgagaaaaacattcctgtttttgggatctgtctaggtcaccaaattctggcactcgcctccggcgcgaaaacagtaaaaatgaagttcggtcaccatggtgcaaaccatccagtgaaagatttggatcgcggtgtggtgatgatcacctcgcaaaaccacggttttgcagccgatgaagcgactctgcctgacaacctgcgtgcaacccacaaatcgctgtttgatggttcactgcaagggattcatcgtaccgacaagccagcgtttagcttccaaggccacccagaagcaagcccaggtccacacgatgcagcaccgctgtttgaccactttattgaactgattaaacaattccgcgcttaa

SEQ ID NO: 41265 - DNA, 810 bp, Vibrio cholerae
atggttagaattgcgattgcgggtgccgcaggacgtatgggacgcaatctggtaaaagcaacacaccagaatccgctttccgaattgggcgcgggctctgagcgtccagaatcctcattagtgggcgttgatattggtgagctgtgcggtattggtaaacaaggtattgttttagttgataacctagagcaagccgttgagcagtttgatgtgattattgatttcactgcgcctgccagcaccttagctaacttagctttgtgtgagcagcatggtaaaaaactggtgattggcacaacgggctttaccgatgctcagcgccaaaccattgaacaagcagcaaagaagatcccgattgtcatggcgcccaactacagcgttggtgtcaacttggtgtttaaactgctggaaaaagccgccaaagtgatgggtgactactgtgatatcgaaatcattgaagctcatcatcgccataaagtcgatgcgccttcgggtaccgcgattggcatgggcgaagcgattgcccatgcgatgggtaatcaactgagtgatgtggcggtgtacgcgcgagaagggatcaccggtgagcgttcacgcaatgaaattgggtttgccacgattcgtgcgggagacatcattggtgagcataccgccatgtttgccgatattggtgagcgagtggagatcacccacaaagccactgaccgaatgacgtttgccaatggtgcagtcaaagccgccatttggctcgcggagcaacccgccggtttctacaccatgatcgatgtgctcggattgaatgatctctaa

SEQ ID NO: 41266 - DNA, 2712 bp, Vibrio cholerae
atgataactaagctactgacaaaggtgattggcagtcgcaatgaccgcacactgcgccgtttacgcaagattgtaaaagagattaataactacgaacccgcctttgaagccctctccgatgaagagctaaaagcgaaaactgtcgagttccgtcaacgcattgaacagggcgaaaaccttgatcaactgttgccagaagcttttgccaccgtgcgcgaagcttctaagcgtgtgttcggcatgcgccattttgatgtacagctgattggcggtatggtgctgcatggcggtcaaatcgctgagatgcgtacgggtgaaggtaaaacgctaaccgcaacgctggctgcttacctgaatgccctacctggcaaaggcgtacacattgttacggtcaacgactacttggccaaacgtgacgcagaaaccaaccgaccactcttcgaattcttaggcatgaccgtgggtgtgaatattcccaacatgccgcagcctgctaaaaaagaggcttaccaagccgacatcctgtacggcaccaacaacgaatttggttttgactacctgcgcgataacatggcgtttcgccctgaagatcgcgtgcaacgtgctcgcttctttgctgtggtcgatgaagtggactcaatcttaatcgatgaagcacgtaccccgctgattatctcaggtcctgcggaagacagttcggatctctacatccgtatcaacaagttgatcccgctactgcaaaagcaagataaagaagattcggaagagtaccgcggtgacggtcacttcaccgtggatgaaaaatctaagcaggtgcatctgaccgaaacgggtcaagagttcgttgaagagctgctagtgaaaaacggcatgatgcaagagggtgatacgctttactctcccgctaacattagcttgctgcaccacgttaacgcggcattacgtgcgcatgttctgtttgaaaagaacgtcgattacatcgtgacacccgatggtgaagtggtgatcgttgatgaacataccggtcgtactatgccgggtcgtcgctggtctgatggtctgcaccaagcggtagaagcaaaagaaggggtgaagatccagaacgaaaaccaaactctggcttcgatcactttccaaaactacttccgtctgtatgaaaagctgtctggtatgacgggtaccgctgataccgaagcgtttgaattccaacaaatttatggtttggaaacagttgttattccaaccaacaagccgatggtgcgtaacgatatgccggatgtggtgtatcgctctgaggcggaaaagtttgccgcgatcattgaagatatcaaacagcgtgttgagaaaggtcaacctgtgttggtgggtacggtttcgattgagaaatcagaattgctctccaatgcactgaaaaaagcaggcatcaagcacaatgttctgaacgcgaagttccatgaaaaagaagcggaaattgttgctgaagccggtaaacctggcgcagtcaccatcgcaactaacatggcgggtcgtggtacggatatcgtattgggtggcagctggcaagccaaagtggagaagctggacaacccaacccaagagcaaattgatgcgattaaagctgagtggaagcaagtgcacgatcaagtgttgcaagcgggcggcctacacatcattggtactgagcgtcacgaatctcgccgtatcgataaccagctacgtggtcgttctggtcgtcaaggtgatgcgggttcatcgcgtttctatctctcaatggaagatactttactgcgtattttcacctctgatcgtatggcggcattgatccaaagcggtatggatgaaggcgaagcgattgagtcaaaaatgctctctcgctcgattgaaaaagcgcagcgtaaagtagaaggccgtaacttcgacattcgtaaacagttgctggaatacgatgacgtagcgaacgatcagcgtaaagtcgtttacgaactgcgtgatgaactgatgagcgcagatgacatcagcgacatgatcgcgcaaaaccgtgaagatgtgctgaacgcggtgatggatgagtacattccgccacaatctctggaagatatgtgggatatcaaagggttggaagatcgcctaaagaacgatttcgatctaccactaccgatccaatcttggttagatgctgacaacaagctgtatgaagaagcgctacgtgagcgcatcatcgagcaagcggttgaggtttataaagccaaagagcaagcggttagccctgcggtgatgcgtaactttgaaaaatctgtgatgctgcaaacgctagatacactgtggaaagagcatctggcggcgatggatcacttgcgtcaaggtattcatctacgtggttacgcacagaaaaacccgaaacaagagtacaagcgcgagtcgtttgaactgtttgaagatctgcttgagtcactcaaatcggatgtgatcactgtcttgtccaaagtccgtgttcagcagcaagaagaagtggagcgtatggaagctcaacgccgcgcgcaagctgaagaagcggcgcgtcatgcacaagcgcaacacgcgagtgctgatgatgctgagcaagacgagtcgaaccagccaatggtgcgtgatgaacgcaaagtgggccgtaacgaaccttgtccatgcggtagcggtaaaaaatacaaacagtgtcacgggcaaattaactaa

SEQ ID NO: 41267 - DNA, 918 bp, Vibrio cholerae
atgatcagacaacgtactctgaaagaaatagtgaaaacaactggggtgggcttacactctggtcgtaaagttacgctgactcttcgcccggccgcagccaatacggggattatttatcgtcgtactgacgtcaacccaccggttgattttcctgccgatccggcttctgtgcgtgacaccatgctttgtaccgctttggttaatgatcaaggtgtacgaatctctaccgtagagcatcttaatgctgctttagcagggatggggatcgacaatgcgattatcgaagtggatgcacccgaaattccaattatggatggcagtgcgagtccttttgtttacttgctgcaacaagcgggtattcaaacactcaatgcaccaaaacgcttcatccgtatcaagaaacctgtacgcattgaagatggcgataagtgggctgaatttgttccatttaacggcttccgtatggatttcgaaattgagttcaaccacccagcgattgatggcgatgaccaacgcctcgtgtttgatttttcttcacagggttttgtgaaagaaatctctcgtgcgcgtacctttggttttatgcgtgatatcgaatatctgcaatcacaaaacctctgcttaggtggtagctttgattgcgcgatcgtgctggatgattaccgtatcctgaatgaagaaggactgcgtttcgataacgagtttgtgactcataaagtgctggatgcgattggtgatctctacatggctggtcatgcgattgttggtgagttccgtgcctacaaatcaggccacggcttgaacaaccaactgctgcgtgcggtattggccgatcaagaagcatgggaatgggcaaccttcgaagaagaagtgggttcacctgttgcttttgctgaaccgaacatggttctcgcgtaa

SEQ ID NO: 41268 - DNA, 1197 bp, Vibrio cholerae
atgtttgaaccgatgatggaaatgtctgacgatgcggtaatcaaagtcgttggagtgggtggcggcggcggtaacgcggttgaacacatggtgcgtgaatccatcgagggtgtggaattcatgagtatcaatactgatgctcaggcactgcgcaaaacgagcgttggtactgttattcagattggtggcaatatcaccaaaggtctaggtgcaggtgcgaatccacaagtgggtcgtgatgcagcactagaagataaagaacgcattaaagaattcctaactggtgccgatatggtatttatcgcagcaggtatgggtggcggtacaggaaccggagctgcaccagtgattgccgaagtggcaaaagagctgggcattttaacggttgctgtagtaaccaaacctttcagctttgaaggcaaaaagcgtttggcttttgctgagcagggaattgaagagctatctaagcacgttgattcactgatcacgattccaaacgaaaaactgctcaaagtgttgggtcgtggtatcacgttactggaagcctttgcgagcgcgaacaacgtacttaaaaatgcagtgcaaggcatcgctgaactgattactcgcccaggcatgattaacgtcgactttgcggacgtacgcactgtgatgtcggaaatgggtcacgccatgatgggtagtggtgttgcaaggggtgaagaccgcgcggaagaagctgctgaaatggcaatttctagcccgctgctggaagacatcgatcttgctggtgcacgtggtgttctggtgaatattactgccggcctagatatgcgactggatgaattcgaaactgtcggcaatactgttaaggcgtttgcttctgacaatgcaactgtggttatcggtacttcgttagaccctgatatggcagacgaaatccgcgtaactgtcgtggcaaccggtatcggtaacgagaaaaagccagatattactctcgttgcaggtggcaaatctaaagttgcacctgtatcggctccggtgacttctcgcgtggaagagaaagcggcacagcctttgcatgaaagagttgaagtgaaaactcaaccagcagcagcgccatcgcactcttcggcaagtcagagtgtcgcgccaaagccagaaaaagagagcggatatcttgatattccggctttcctgagacgtcaagctgactaa

SEQ ID NO: 41269 - DNA, 1263 bp, Vibrio cholerae
atgactaagactgtcgatgacaacattattgttggtctggacataggcactgccaccgtctccgctctcgtgggtgaaatactccctgatggtcaaatcaatattattggcgctggcagtagcccatctcgcgggatggataaaggcggcgtgaacgaccttgaatcggtagtaaaatcggtccaacgggcgattgatcaagcggagatgatggctgaatgtaaaatcagccatgtgttcctttcgatttctggacggcacattgccagccgtatagagaaaggaatggggacgatttcggatgaagaagtctcccaagaagatatggatcgcgcgatccatacagcaaaatcgatcaaaattggtgaagaacagcgtatcctgcatgtcattccacaggagttcaccatagattatcaggaaggcatcaagaatccgctgggtttatccggggttcgcatggaagtgagtgtgcacctgatcacttgccataatgatatggcaagaaacattattaaagcggttgaacgctgcggtttaaaagttgaacaattggtgtattccggtttggcggctagcaacgcagtgattacggaagacgagcgcgagcttggggtctgtgtggttgatattggtgctggcaccatggatatcgccatttggaccggcggtgccctgcgtcataccgaagtattttcttacgcaggcaacgcggtaaccagtgacatcgcgtttgcttttggtacgccagtcagtgatgcggaagaaattaaagtaaaatatggttgcgcactgagtgaattggtcagcaaagacgacacggtcaatgtaccgagtgtcggcggccgtccatcaagaagtttgcaacgacaaaccttgtcggaagtgattgagcctcgctacactgaattaatggggctggtcaatcaaaccgtggattcggtgcaagaatccctacgcaaagaaggcatcaaacaccatttggctgccggcgttgtgttgacagggggcgcagcacaaatagaaggtttagtggcatgcgcagaacgcgtattccgcaatcaagttagggtgggtaaaccgctggaagtgagtggccttaccgactatgtaaaagagccgtatcattctacggcagtgggattgcttcattacgcaagagatagtcaaatcagcgacgatactgaatatcaggaacctaaacgaccctctatgacaggttggataggccgcttgcgcaactggatacaaaaagagttttaa

SEQ ID NO: 41270 - DNA, 783 bp, Vibrio cholerae
ttgatcaacaaggtacttttagaaggccagagaatcacccgctcaccacaagttaaacaacatgcctgtggtgcgagtttttttctggtggtgctattgctgataggtggtttgctgtattcgacgatcagttggatgtgggacgaacaacgtctgcctctctctaaactcgttttacagggtgacttacattatgtttctgctctcgatgttcagcgggtattagcacgcttagatcatatcgggacatttatgtcacaagatattaatgttctgcaagagagtgtgcagtcgatcccgtgggtttcccatgcatcgataagaaaacagtggccagatacgattaaagtctatttaaccgaatatcaggttgaagctctgtggaatgcgaatgcgttattagataaaaatggcacggtattttatggcgatattgcacgagtaaatggtgaatacgtcaaattatatgggccagatggcactgcgccacaagtattaaaagcatggcgagattacaacccgaaatttgctcagctaggtttaaatatctcttcattagtattaaatgatcgacgagcttggcaaattattctcgacaatggtattcgtctggaattggggaaagagtcattagaagaacgaatatcgcgcttctttttgctctataaacaattaggtaataaagctgaacaagtcagctatatcgacctcaggtatgatactggagccgcggtgggttggttccctgaacaagagttaacacaagagaaaaacgatgactaa

SEQ ID NO: 41271 - DNA, 1521 bp, Vibrio cholerae
atgctgacaaggtggtggcgcaagcgatcatcgccattaccgaataacgagaacagaattatgacgattaaacatacccaagacctcgcccaaattcgcgctatggtgccagagatgcgccgtgtaaaagcgatccactttattggcattggcggggcggggatgagcgggattgcggaagtgctgctcaatgaaggctatcaaatttcaggctccgatctggccgcgaatgcggtcactgaccgtttagctgacaaaggcgcgaccatttttattggtcatgaagcgcacaatgttgctcacgcaagcgtggtcgtggtctcgacggctattaatgaacaaaaccctgaaatccaagcggcgcgtgaaaaacgcatcccgattgttcgtcgtgctgagatgttggcagagctgatgcgttttcgccacggtattgcggtcgcgggaactcacggtaaaaccacgacgacggcactcgtcactcagatttattctgaagccggactggatccgacctttgtgaatggtggtttggtgaaaagcgctggcaccaacgcacgtttgggctctagccgcattttgatcgccgaagcggatgaaagtgatgcttcattcttgcatctgcaaccgatggtcaccattgtcaccaatatcgaagccgatcatatggatacttacggcggcgattttgaaaaccttaaacagacctttatcgactttttgcacaatctgcctttttacggccaagcgattttgtgtattgatgatccggtgattcgtgagcttattccgcgtgttagccgccaagtgatcacttatggattctcagaagatgccgacgtgcgtatcgaaaattaccgccagaatggtcagcagggccaatttaccgtggtacgtaaaggcaaagcgaatttggatatcacgctcaatatccccggccgtcacaatgcgctgaatgccgctgcggctattgctgtggctaccgaggacgatattcgcgatgaagcgattttacgcgcgatggccaatacgcaaggcacaggtcgccgttttgaccatcttggagagtttgaaaccgggaatggcgtcgctatgctggtggatgattacggtcaccaccccactgaagttgacgtgacgattaaagcggcgcgtaatggctgggcagaaaaacgcttagtgatgattttccagccccatcgttacacgcgaactcgcgatttgtatgatgattttgccaacgtacttgagcaagttgatgtactgatcatgctcgatgtctatgctgctggtgaaaagcctatcgcaggtgctgatgggcgatctttgtgtcgaactatccgcagccgaggcaaaatcgatccgatttttgtgccggatagccaaaccttaccttcggtgcttgccaatatcttgcaggatggtgacttggtactgacgcaaggcgcgggcgatgtcgggaaagtagcaaggcatttagccgcgcttgaactcaatatcgggcgtatgcaacagatttaa

SEQ ID NO: 41272 - DNA, 1065 bp, Vibrio cholerae
ttgatgaacaagaataaaaaattaatggtgatggccggaggaaccggcggtcacgtatttcccggtttggctgtcgccaaacaactacagcaacagggttggcaaattcgttggttgggaacggctgaccgaatggaagcggaattggttcctaagcacggcattgagattgactttattcaagtcaaagggctgcgcggccaagggctgatgcgcttactcaaagcacctttccaaattgtgaacgcgattttgcaagcgcgccgccatttgctgacttatcagccagatgcagtactcggcatgggcggttatgtgagcggacccggcgggattgccgcttggttactggggattccagtggtgttgcatgagcaaaatgcggttgctgggctgactaaccaatggctggctaaaattgcacggcgtgtatttcaagccttccccggagcatttgctgacgcgtctgtggtgggtaacccagtacgtcaagatgtggtacaacttgccgcgccagagcagcgttttgccacgcgtaacggcgccattcgaattttagtcatgggtggcagccaaggtgcccgcatcctaaaccaaaccttgccagcggtgatggcggcattaggtgagggttatgaaatccgtcatcaagccggtaaaaacagccaacaagacgtggctgaggcttatgctgctgccggagtggaaagcgcgcaagtcaccgaatttattgatgatgtggcagatgcatacgcttgggcggatctgcttatctgtcgctcaggcgcattgaccgtctcagaggtctcagcggcgggcgttggggcgatttttatccctttcatgcataaagatcgccagcaagcactcaacgctgatcatttagtggcttgtggagccgccaaaatgattgagcagcccgaattgagtgtggaaaagctgacccagatggtgcgcgaactcgatagagcacaattattgtccatggctcagaaggcgcgccaagccgccaaattagatgctgacaaggtggtggcgcaagcgatcatcgccattaccgaataa

SEQ ID NO: 41273 - DNA, 1197 bp, Vibrio cholerae
ttgtttttatccggatctttcacaaaactgagccactggttgagaacctcctcaccagaggcgctgtttgaccgtcaattggtctggattgcttttggcttaatgctgattggtctggtgatggtgacatcagcctcatttcccatcagttctcgcctaaccgatcaaccgtttcactttatgtttcgtcacgccatctttctactgttggcttttctcacctcaagcatggtgttacaagtccctctagatcgttggatgaaatacagctcgttactactcggcatctcctttttcttattgattgtcgtactggtcgtgggcaaatcggtcaacggtgcatcacgttggatcccgctcggtctttttaaccttcagccagcggaagtggctaagctgtcactgtttatctttatgtccggctatctggtgcgcaagcatgatgaagtacgacagactttctttggcggctttttaaaacctatcatggtgtttggtacgctcgctgtgttgctgctcggtcagccggacttaggtaccgtgatcgtaatgctggtgacactgttcggcatgctgtttattgccggcgcgaaactctctcagtttttggccttgatggtggcaggagtgttagcggtggtcgcgctgattgtcgctgaaccttatcgtgtacgccgtgtgacctcgtttttagatccatgggaagatccctttggtagcggttaccagctgactcaatctttgatggcgtttggccgcggtgagtggtttgggcaaggattaggcaattcgattcaaaaactcgaatatttgcctgaagcgcatactgactttgtattcgccgtcttggccgaagagcttggctttatcggcgtggtattagtgctggtgctgattttcagtttggtactaaaagcgatttttatcggcaaaaaagcctttcaacatgatcagcagtttggcggctacctcgcgtttggcatcggtatttggtttgcgtttcagaccttagtgaacgtcggtgcggcagcgggtatggtgcccaccaaaggcttgaccttaccgctgatcagttacggtggttccagtttaattattatgtcagtggcggtgtcgattttactgcgcatcgatcatgaatgccgtttagcggatcgccacgcaccagaagaaatcacagttgatgaacaagaataa

SEQ ID NO: 41274 - DNA, 1404 bp, Vibrio cholerae
ttggatcatctctatcgttttagtattgattggcttagcgacactcaaagttcgttaagtggattaaggatgtcaatttcaatggaccgttggcaaggcatacaacatgtggtcgtcgtagggctcgggattaccgggctctctgtcgttaattatctgagaaaatatcatccgtcggtaaccgtgcaggttatcgatacgcgcgaagcaccaccggggcaagagcagctttcgtcggacgttgcactgcatcgtagcggttggaatcttgagtggttactcaatgccgatttggtagtcaccaacccaggcattgcgttggcgacgccggaaatccaacaagtgctggccgctggaattcctgttgtcggtgatattgagctctttgcatggcatgtggatacacccgttattgcgatcactggctcaaatggcaaaagcaccgtcactgatttaagcggtgtgttagccaatgctgctggtgtgaaggccgcggtaggtggcaatattggggttccggcactggatctgatttctccagacgttgaactgtatgtgcttgagctatcaagcttccaattagaaactacctctagcttaaaactgaaagcggccgcgtttctcaatctttctgaagatcatatggatcgttatcaggggatggaagattaccgccaagccaaactgcgcattttcgatcatgccgaaaccgcagtggtgaatgccgatgatactcaaacttttcctgaccacgcggcacatctgcaagtggtgacgtttggtgtcgagcaagctgcacaatttagccttgctcaacatcaaggccgcgaatacctttttgcgcgcgatgaggccgtcatggcgtgtgctgagctgagtttagttggccgtcataacgtggcaaacgtacttaccgtgttagctttgctggattcagccggagtaaacttccgtttggctttggatgcactcaagtcttacacaggtttgacacaccgctgccaagtggttgccgataatcacggcatcaagtgggtcaatgattctaaagcgaccaatgttgcgagtacgctggcagcattgtcgggattaaaaatcgaaggtcagctctatttgttggttggtggcgtaggtaaaggggcggatttcacgccgctcgcccccgtattggcgacattgcctgtgcaattgtgctgctttggtgtggacggccatcaatttatgccactgcacccttcggctcggttttatgactcgatggagagcataattcgctcaatccgcccgcaattaaaaagtggggatatggtgctgctctctcccgcttgtgcgagctttgatcagttcaaaaactttatggcgcgtggggatatttttgcccaactcgctcggcaatatgcataa

SEQ ID NO: 41275 - DNA, 1083 bp, Vibrio cholerae
atgattatttggcttgctgaactgctccagccatatttttcgtttttccgtctgttcgaatatctctcatttcgcgccattgtcagcattctgactgcgcttgggatctcgttgtggatggggccgcgcatgattaagcgcctacaaatgctgcagattgggcaagtagtgcgtaatgaagggcctgaatctcacttcagtaaacgcggtactccgaccatgggtggggtgatgatccttgccgcgatcaccatcactgtactgctgtgggccgatctgactaacccttatgtttgggctgtgcttgcggtactgctcggttacggtgcggtcggttttgtcgatgattaccgtaaagtggtgcgcaaaaataccgatggcttgatcgcgcgctggaaatacttctggcaatctgcgattgctttagtggttgcgtttgctctgtatgcgcacggccaagatacggcggcaacgcagttggtggtccctttctttaaagatgtgatgccacagctgggcttgatgtacattgtgctgacctatttcgtgattgttggtaccagtaatgcggtgaacttgaccgatggtctggatggcttggcgatcatgccaaccgtattggttgcagccggatttgcggcgattgcatgggcgaccggtaacgttaacttcgcgaactatctgcatatcccttatattcctcactcttctgagttggtggtggtgtgtaccgcgatggttggtgcaggtttaggctttttatggtttaacacctatccagcccaagtatttatgggcgatgtcggcgcgttggcgttaggtggcgcgttaggtacgattgcggtactggttcgccaagagtttgtgttggtgatcatgggcggtgtattcgtgatggaaaccctgtcagtgattttgcaagttggttcttacaagctgcgtggacaacgtatcttccgtatggcaccgattcaccatcactacgaattaaaaggctggccagaaccacgtgtgatcgtgcgtttttggatcatctctatcgttttagtattgattggcttagcgacactcaaagttcgttaa

SEQ ID NO: 41276 - DNA, 1362 bp, Vibrio cholerae
atgattcgcgtaatgctttctcagctcagctcagtattgaatgctcgtttaattggtgaggatcgcgcggtcagtgccgtatcgacggacagtcgtgctattcccgccgaagcgctgtttgttgccttggtcggtgaacgttttgatgcgcacgattttgcctctcaagcggtaactggtggcgcagtggcgctgttggttgagcgtgagctcgatgcagagtgttcacaactggttgttgccgataccaaacaggccttaggtcagcttggctcttgggtgcatgcgcagtgtcaaacgcctacggtcgcgatcaccggaagttgtggcaaaaccacggtcaaagagatggtggccagcattttaagccagaaaggccaagtgctttacacgcaaggaaacttcaataacgacatcggcgttccgctgactctgctgcgctcaacgaccgaagatgattatgccgtgattgaattaggggcgaatcatgtaggtgaaattgcctacaccaccgccttggttaagccggatgttgccctagtcaacaatgtagcggcagcgcacttagaaggttttggctcgatggatggcgttaaacgcgctaaaggtgaaatctatcaagggttacaggcgggtgccgtggcgattgttaatttagacagcaacggtggtgactactggaaagcggtactggcggacaaaaccgtgaaaacattttccgctaccgatcacaatgctgacttttatccacgtgatgtgcggttaaatgcgctcggtatagctagctttactttggttaccccggttggtgaagtgggtgttgagttgggcatcatgggccaacacaacgtggccaatgcactggctgcggcggcgttatcactggaaatgggcgcgagcttggcggaaattggtcaaggtttagcgcatttatccaaagtgaaaggtcgagtggatatggcacagttgcgtgacgatatcacgcttattgatgacagctataacgctagcgtgccagccatgaaagcggcggtggagctgttaggcagcttttccgctgtacgctggttaattttgggcaatatggcggagttgggtgatgaaagtcttgcacttcatcagcaagtcggtgaacatgctgcaccattcggttttgagtttgtcctgacgtatggcaaggacgcaaaagtgatcagcgacctttgccaagggcatcactttgctacccatcaggacatgatgacatttattgagcagcacatagaacaacaacagggtcgtactcaagtattgttggtgaaaggtgccaacagtgcagggatgagtaaaattgccgctgctctcaaggagaaatttgcatga

SEQ ID NO: 41277 - DNA, 1539 bp, Vibrio cholerae
ttgctcctgatgaaaaccgcttccaaaacaaataatagtgtgagacggaacatgaacacgcattcagcgatctccgaactgatcgcgccatggctagagctgaccgaccctaagttggccgcgctggtcattactcatcttgaactggatagccgcctgattaaatcgggtgatacctttgtggctattcaaggccatgcagtggatggtcgccaatttatcgataaagccattgcgcaaggtgccaatcttgtgttggcagaagccgatgctcagcatctcaatgggtgggttgagtatcgtgctggtgtccccgtcatctatttggctgaacttggtcaacatctgtcagagttggctgggcgtctgtatggcggccaccacaatcaactgattggcgtgacgggcacgaacggtaaaaccaccatcacccagctgattgctcaatggctcgaattgctcggtcataaagctgccgtgatgggcaccacggggaacggttttttaaatgcgcttgaacctgcggccaacaccacaggtaacgcactgcaaattcaggccacactgcgcgatttagccgagcgcggcgcgcaatatacggcgctggaaacctcgtctcatggtttagtgcaagggcgcgtgaaaaagctccattttgtggccggtgtcttttccaatttgagccgtgaccatttggattatcacggcactatggaggcttacgccgccgcgaaattctctctatttagtgagcatgcctgccaaaacgcgattattaatgtcgatgatgcggtcggcgcgcaatgggtcaaacaattgccgcaggcgatcggggtttccttagtgacgaaaccaaacacagcgcaagccatctgggcgcgcgaagtggcatacgctgaaagcggtattacgctgaactttgagagttcgtggggagaaggcgaattgcacgcaccactgattggtgagttcaatgcctgtaacttgttattggcattggcaaccttgctcagcttgggttttgagaaaagtgcactgctcgccactgcgccaaagctgcgtccagtcttaggacggatggagctattccaacgtgagcaaaaagccaaaatggtggtcgattatgcgcacacgccggacgctttagaaaaagcactgcgcgcgttacgtgtacattgtgcgggtcagttgtgggctattgtggggtgtggcggcgatcgtgatcgcggtaaacgtccgatgatggctgcgattgctgagcagtttgccgatcgcgtgatcttgaccgatgacaacccacgcagtgagtcgccgcaagcgattgtagcggatatggttgcaggactgacttaccccgagcgcgctcatatcgaacaccaccgtttccaagccgcgagttatgcgcttcagcatgcaggtgcgcaagacatcatcctgctcgcgggtaaaggacatgaagattatcaggtgctggccaacgaaacgattcactactcggatcgtgaaaccgcccaacagttactggagttacaaccatga

SEQ ID NO: 41278 - DNA, 1743 bp, Vibrio cholerae
atgaagaagaaagccccagccaaagcctcccgagtttctccccgtgttaccacggctgagcctgcacctatctttatccgctggcgtttctatctgctgctgttttttgtgctaacggcgttctgcgctttggttgcacgagtggcttatatccaaattattgaacctgacaatctgattaaagaaggggatttgcgctcgattcgcgccaaaaccttgcaatcagcgcgcggcattatttccgatcgtaatggcgaagcgttagcggtgagtgtgccagtcgaagcggtctgggccgatcctgtcgctatttataaagaaggcggtctggttgagaaagaccgttggtatgcgctggccgatgtgctcggactggatcgtcaggagatgatgaagaaaatcgaggataaccgttcgcgccgctttatctatctgcaacgtcaggttagccctgcgatggccaaatacatccgtgaactcaaattagcggggattggcctaaaagaagagtcacgccgctattatcccgcaggtgaggtgagtgcccacttagtcggggtgaccggaattgatggccacggtcttgaaggggtagagcgcagctttgatagcaccttaacgggtgagtcaggtaaaagcgtgacgcgtaaagataagttcgggcgagtggtggaaaacattgccctggaagagcgtgaagaaggtaagcctatccagctcaccattgaccagcgcttacaagcgatcgcttttcgtgccgtgaaacaggcgatggcggattatcgtgcgacttctgcatcggcagtgatgttggatgtgaaaaccggcgcggtactggcgatggtgaatgcgccttcttacaacccgaataatcgcaatgactggcaaagctttaaaatgcgtaaccgagtgataaccgatgcgtttgaacccggttcaacggttaagccttttgtggtcttggcggcgctcgccaatggtatcgccgacaaaaacaccatcatagataccggagatggcaccatgcagattggcggtagccgcgtgcgtgatacctccaaagttggcaaagccgatctcacgctgattttgaaaaagtcgagcaacattggtgtggctaaattagccttagaaatgccgttagaggcgttattgggcatgtatagctcggtgggcttgggcgaaatgtctggcttggatttggtgggcgaaacgatcggtattttcccgaatcgccgccgttggtcacagtttgaaatcgccaccttatcgtttggctatggtttggcgatcacgcctattcagttggctcacgcctacgcgaccttaggcaatcatggtaaataccaacctattcatattattaaaggtgatcaacatggcgagacgcgccaagtggttgatcctaaatatgtcaatcaggtgctcgaaatgctggaaacggtaactcagcccggcggaacggcaacgcgtgcagcggtaccggggtatcgtattgcggccaaatccggtacgtcacgtaaagcgattgcgggcggttatagtgatgaatattttgcctacaccgcaggggtggctccggtgagcgacccaagaatttcactggtggtcatggtcaatgagccgcaaggcgactcttactatggcggcgcagtggccggtccggttttctcggaaatcatgaagggcgcattacaaatcctcaacattgctcctgatgaaaaccgcttccaaaacaaataa

SEQ ID NO: 41279 - DNA, 951 bp, Vibrio cholerae
atgactgcttctttccaacacatctctgtattattgaacgaatcgattgaaggattggcgatcaagccggatggtatctacatcgatggcacctttggccgcggtggtcacagtcgcaccattctcgctcagttaggcccagaaggtcgtctgtacagcattgaccgtgatccacaagcgattgctgaagcgcagaagattgatgatccgcgttttaccatcgtccatggccctttctcgggcattgccgaatacgcacagcgttatgatctggtgggtaaagtcgatggtgtgttgttcgatctcggcgtttcttcaccgcagttggatgatgccgagcgcggttttagttttatgaaagatggtccactcgacatgcgtatggatccaaccagtggtatgccagtttccgcgtggttggcacaagccgacttggatgacatcacttgggtgattcgcgagtttggtgaagataaacatgcgcgcagaattgccaaagccattgtcgaatatcgggaaaacgagcttaacgagcccttgacgcgtaccagccagttagcaaaactcatctccgatgcagcacctaagagttttaaagagaaaaagcaccctgccacccgcgcttttcaggcttttcggatctatatcaacagtgaattagaagagattgataccgcattgcgcggcgcttctgacattctggctccacaaggccgtttgtctgtgatcagtttccattcactggaagatcgcatggtgaaacgctttatgcgtaaagagagccaaggcccgcaagtgccgcacggtattccgttgacccaagatcaaattcgcgcgttgggtagtgccaaaatgaaaaccgtgggtaaggcactcaagccatcggatcaagaagtcgaacttaacccgcgttcacgcagctctgttctgcgcgtggcagaaaaactgtag

SEQ ID NO: 41280 - DNA, 1428 bp, Vibrio cholerae
atgagcaaagaaattaaagcccaagtcgtggtgcttggtgccggtcctgctggttactccgccgcattccgctgtgcagacttaggtctggataccgtcatcatcgaacgttacaacacgctaggtggtgtgtgtctgaacgttggttgtattccttctaaagcactgctgcacgttgcaaaagtgattgaagaagctaaagcgctgactgagcacggtatcgtgtttggcgagccaaaaacagacatcgacaaagttcgtctgtggaaagaaaaagtgatcaatcagctgaccggtggtctggctggtatggcaaaaatgcgtaaagtgaacgtagtgaacggctacggtaaattcactggcccgaacaccattgaagtggacggtgaagagggcaaaactgtcgtaactttcgataacgcgatcgttgcagccggttctcgtccaatcaaactgccattcattccgcatgaagacccacgtatttgggattcaaccgatgcgctggaactgaaagaagtgcctggaaaactgcttatcatgggcggtggtatcatcggtctggaaatggcgaccgtttaccactcactgggttctaaaattgatgtggttgagatgtttgaccaacttatccctgctgcggataaagatatggttaaagtctataccaaacgcatcaaagataagttcaacctgatgctggaaaccaaagtgaccgccgttgaagcgaaagaagatggtatctacgtttcaatggaaggtaagagcgcaccagcacaagctgagcgttacgatgcggttctggttgcgattggccgtgtaccaaacggtaaactgctggatgctgagaaagcgggtctggaagtggacgagcgtggctttatccgtgtggataagcaaatgcgcactaatgttccgcacatcttcgcgatcggcgacatcgtgggtcaaccaatgttggcacacaaaggcgtgcatgaaggccacgtagcggcagaagtgatctctggtaagaagcactacttcgatccaaaagtgatcccatctatcgcttacactgagccagaagtggcttgggttggtaagacagaaaaagaagcgaaagcagaaggcatcaactatgaagtggcgactttcccatgggcagcttctggccgtgcgattgcttctgactgtgcagacggtatgactaagcttatcttcgataaagagactcaccgcgtgatcggtggtgctatcgtaggtactaacggtggtgaattgctgggtgaaatcggtctggcgatcgagatgggctgtgatgcagaagacatcgcactgaccattcatgctcacccaacgctgcatgagtctgtgggtctggcggctgaagtattcgaaggcaccatcactgacctgccaaacgccaaagcgaaaaagaaaaagtaa

SEQ ID NO: 41281 - DNA, 1908 bp, Vibrio cholerae
ttgaaggtaggaaaagtaatggcaatcgaaatttatgtacctgacatcggtgcggatgaggttgaagtcactgagattctcgtcaaagtcggcgacaaagtggctgaagagcaatctctgatcacggttgaaggcgacaaagcttctatggaagttcctgcgtctcaagcgggtatcgttaaagagatcaaagtagtggcaggtgacaaagtgtctactggctctctgatcatggtctttgaagcggaaggtgcagcagcggcagcaccagctcctgcgcctcaagcggcagcaccagttgctgcggctccagcggcagctgcactgaaagaagtgcaagtaccagacattggcggtgatgaagttgaagtgactgaaatcatggtcaaagtgggcgatgtggttgcggaagagcaatctctgatcaccgttgaaggcgacaaagcgtcaatggaagtacctgcacctttcgctggtacggttaaagagatcaaaatcgctgcgggcgacaaagtatcaacaggttcactgatcatggtgtttgaagtagccggcgctgcgccacttgcagcacccgttcaagctgcggcaccagcggcagctgctgctccggccgttgcagcactgaaagaagttcaagtacctgatatcggcggtgacgaagtgaccgtaacggaaatcatggttaacgtgggcgacagcatcagcgaagagcaatctctgatcaccgtagaaggcgataaagcttctatggaagtacctgcaccttttgccggaactctgaaagagatcaaagtggctacaggcgataaagtgaaaacaggttcgctgatcatggtgtttgaagttgctggcgcagcgccagtcgcggcaccagttcaagcagcagcagcacctgcggcagcgcctgctcaagcagcgactcctgcggcggctgcacctgcaacaagtggtgaattccaagaaaaccatgagtactcacatgcttctccagtcgtgcgtcgtctggctcgtgaatttggcgttaacctagccaaagtcaaaggctctggccgtaagaaccgtatcctgaaagaagacgtacagaactacgtgaaagaagcgctgaaacgtctggaatctggcgcgcaagcggcggcttcaggtaaaggtgatggcgcagcgctgggcttactgccttggccaaaagtggacttcagcaagttcggtgataccgaagtgcaaccactgtctcgcatcaagaaaatctcgggtgctaacctgcaccgtaactgggtgatgatcccgcacgtgacccaatgggacaatgcagacatcactgagctagagaaattccgtcaagagcaaaacgcgatggaagcgaagcgcgacacaggtatgaagatcactccgctggtgttcatcatgaaagccgctgcgaaagcgctggaagctttccctgcgttcaactcttctctgtctgacgacggcgaaagcttgatcctgaagaaatacgtgaacatcggtatcgcagtggatacaccaaatggtctggtggttcctgtgtttaaagatgtgaacaagaaaggtatctacgagctgtcaaaagagctggctgaagtctcgaagaaagcccgtggcggtaagctgactgccgctgacatgcaaggtggctgtttcactatctctagcctaggtggcattggcggtacagcgtttaccccaatcgttaacgcacctgaagtggctattttgggtgtgtctaagtctgagatgaagccagtgtggaacggcaaagagttcgcgccacgtctgcaactgccactgtcactgtcttacgatcaccgcgtgatcgacggtgcagaaggtgcacgcttcattacttacctgaacgagtgtctaagcgacatccgtcgtctggtactgtaa

SEQ ID NO: 41282 - DNA, 771 bp, Vibrio cholerae
atggcttatcaaaggatccgtcagccaaagctctccgatgtgattgaacaagaactggagagactgatagtggaaggaacactctcacccggtcagcaacttcctccggaacgcgaactggccaaacagtttgaagtgtctcgcccctcgatcagagaagccatacaacgcttggaagccaaacgcttgcttacccgccgtcaaggtggcggtacattcgttagtgaccgaatttggcagagcttttctgatcctctgctaaatttattgtctagccactccgaaactcaactggatctgctggaagcgcgtcatgcgctggaaggtatttgcgcctattttgcggcgttgcgtggtaccgaagaagattttgctcgtattcagcactgtgtcacgcgtatcgcggaggctcaggcattgaataatgtggatgaagaagcagagcgggtgatggcctttttgattgccattactgaagcggcgcacaacgttgtgcttctgcacatcgtacgcagcttgagtccactgcttgagcagaatattcgtcagaattttaaactcttacatcgccgccctgaagcggtagagaaagtaagcaaacaccgggctaacattgtggatgcgatcgtttcgggtcagccggaaaaggcacgtgaaatgtcccattctcacttagcttatatcgaagaaacgttgttggatttgactcgtgaacagactcgccgtgagcgatctctgcgtcgaattcaacaaggtaatgagccgcaatag

SEQ ID NO: 41283 - DNA, 1755 bp, Vibrio cholerae
ttggcctgtcacagtatgatagaaatccagcgacgccccgaacctgatctctcacttctccccgaccacatcgacccactgttacgtcggctttacctgagccgtggtgtaagcaacgtggcacaacttgaaaaagccgccaaagcgctgcactcattcaagcagttacatggtattgatcgtgcggttgagttgctgttcgcagcgattgctgagcaaaaacgcatcatagtcgtcggtgattttgatgccgatggcgcaaccagttcggcactttccgtgctcgcgctgcgtatgctcggtagtcgtaatgtcgattacttagtgccaaaccgttttgaagatggttatggtctgagccctgaagtggttgatcaagcgattgagcgtggcgcagagatgatcatgaccgtggataacggcgtttcatcactggaaggggtgcgttacgccaaacagaaagggctgcaagtggtggtcaccgatcatcacttaccgggacaagaactccctgaagtcgatgccatggtaaacccgaacttgcagcagtgtgcttttccttctaaggcgctggctggggtgggggttgctttctatttgatgatggcactttgtgtgcacatgcgtcagcaaggttggtttgccgcgcaaggcatggttgaaccgaaattgatggaactgatcgatttagtggcactcggtacggtcgccgatgtggtgccactggatgacaacaatcgtattttggtgcaccaaggtttgcagcgtattcgtgcgggtttagcgcgccccggtattcaagctctgattgaagtcgccaaacgggatgcgcgccgtttggtcgctgctgattttggctttgcgcttggaccacggattaacgccgcagggcgtttggatgatatgtcgttcggcgttgaacttttgctgtgtaacaacattcacgctgcgcggcgtatggcgagtgagctggacggcctcaatcaaacccgaaaagagattgaagaggggatgaagcaagaggcggtcgcgttttgtgagcgtttgcaactgagcgatgatcgcgagctgccttacggtttagtgctgtttcagcgcgattggcaccaaggggtgatcggcattcttgcttcgcgcatcaaagagaaataccaccgacccgtgattgcgtttgctgaaggtggtgatggcaagctaaaaggttcatgtcgctcggttcccggtctgcatatgcgtgatgcactagataaaattgatacgcaaaacccgggcatcatactcaaatttggtggtcacgcgatggcggctggattaaccattgaagagcaaaattttgaacgtttttgccgactgtttgaccagctagtgcgtgaagagctggatgaagcagcactcaaaggcatcatcctcagcgatggcgaactgaaaccggaagagttttcgctgcataccgccgaattactgcgtgctggtggcccgtgggggcaagcgtttcctgaacccctgtttgatggcgaatttaaagtgctgcaccaaaaactggtcggcgaaaaacacctcaaactgatgcttgagccgctatataaaggctttccaaccaatgtgatgatcgacggaattgcgtttaatgtcgacctacgtcgctggccggatgcctcagtcaaaacggtacgtttggcgtacaaactcgacatcaacgagtttcgcggtaatcaatcattgcaactcatgattgatcatctggaagcgaaatga

SEQ ID NO: 41284 - DNA, 753 bp, Vibrio cholerae
atgagcgtactgcgccgactaacatggctggcatttcctttactgagtatggcattcaacgtacaagcgaacactgcaccagcacaattgaataaagccgagcttgagcagcgctttgccaaactcggattgcaagtggaagagataaaaacctctgatatcaatggcttgcttgaagtgcaaacgtctggtggtgtgttgttctcttcgcctgatggtgagcactttatcgcgggtactctgtatgcgctggatggtaatggcggttatgttgatgtgctggctaaacgccaagcgccactcaacgccaagaaaattgccgcattgcaagacagcatgattgagtttaaagcgcccaatgagaaatacgcgatcaccgtatttaccgatatcacgtgtggttactgtgtgcgtctgcacagccagatcaaagagtacaatgatctcggcattacggtgcgttatctcgcctacccgcgtcaggggccgcaaggtcaagtcgcggatcaaatggcggccatctggtgttctaacgatccgaaagcggcgatgcacgatgcgaaagtgaatcgtaaaaccattaccgccgataaagatatcgcccaatgccaaaagaccatcgcgcagcactatatgctgggtcacgagctcggcattagcggtactccagcgattttcttacccaatggtgagatggttggcggctatttgcctgcgccgcaattgctgcaacgcctgcaagccacacaatag

SEQ ID NO: 41285 - DNA, 909 bp, Vibrio cholerae
gtgagcgaagccttatctcccgaccaagggttggtggaacaatttttagataccatgtggtttgagcgcggtttggcagaaaataccgtggcgtcttatcgtaatgacttgagtaagctattagagtggatggcgcagaaccagtatcggctcgattttattagctttgctggtttgcaggagtatcaaagctggctgtcggagcaaaattacaaaccgacctcgaaagcgcgcatgttgtcggcgattcgtcgcctgtttcaatatctgcatcgggaaaaggtgcgcgctgatgatccgagtgcgctgttggtgagcccgaaactgccaacgcgcttaccaaaagatttgagcgaagcgcaagttgaagctttgctgagtgcgccagatccgcaaagtccacttgagctgcgtgataaagccatgctggaattgctgtatgctacgggactgcgtgtgacagagctggtctcactgaccatggaaaacatgagcttgcgccaaggtgtggtgcgagtcatgggtaagggtggtaaagagcgtttggtgcctatgggtgaaaatgccattgaatggattgaaacttttttgcagcagggacggtctttactgctaggggagcagacgtcggatatcgttttccccagtagccgcggtcagcagatgacccggcaaaccttctggcatcgcattaaacactatgcggttattgcaggaattgatgtggaaaaactctcgccgcacgtattgcgccatgcgtttgccactcacttgctcaattatggggccgatctgcgcgtagtgcagatgttgcttgggcatagtgatttatcgaccacacaaatttatactcatgtcgccactgagcggcttaaacaactccacaacgagcaccatccaagggcttga

SEQ ID NO: 41286 - DNA, 741 bp, Vibrio cholerae
atgactacgcaccagtttgaacaccctctcaatgaaaaaacgcgcatctacctgcgtgtcgaagcgctgctcaatcagatggagcgagcgtccactttcagtgatgggattcaacatcaactctttttccgctcactgttcgatatgctggagatttttgagcagatccaactgaaaagtgaactggctaaagatatggaaaaacagcgcttaacataccgcagttggctccatgtagaaggcgtagatcaagagatgcttaactcgctgctcaccgaagtcgatgaagttcatcgggatctgatgagtgccgagcgttttggccaatcactcaaagaagaccgtttcctcagtgcaattcgtcagcgctttaatttaccgggtggttcctgctgttttgatctgccagcgctgcactactggctgcatctgccgctggatcgcaaaatgcgtgatgcccagcagtggatgcaaaccgtgacgccgctttcgaatgcactcaaactctggcttaaattgactcgcgaaaccggccactaccgctcacgcatggcaagcaacggtttctaccaaagtgatgcggaagatgccaatatcctacgccttgcgattccgctcgaatacggtgtgtacccgatgatttctgggcacaaaaaccgctttgctatcaagtttatcgattttcacagcgggcaagcctgcactcaagatatcgcctttgatttggcggtgtgctgctaa

SEQ ID NO: 41287 - DNA, 819 bp, Vibrio cholerae
ttgaaagtgtcgtctcaatcagaggattcatcgatcaagcttattcagatcacggacacccatttgttcgcggcggaagatggtagcttgctcagtgtgaatacggctgacagctttgcggctgtggttgcggccattggtgaagagcaggtcgaatttgatgccattctcgccaccggggatatttcgcaagaccacacacccgagtcttatcaacgctttgtgcgcggtattcagccgctaaaaaaagcgtgttattggctgcccggtaatcatgattacaaaccgagtatgcacagcgtactgcccactcagcaaattcaagccgttgaacatgtgctgctgggggagcattggcaagtggtgttactcgattcgcaagtggttggcgtgccgcacggcaaactgagtgagcagcagttacaactgctggataacaagctgaccgagtacccagagcgtcacactttagtgctgctgcaccatcatccgctcttggtgggaagcgcttggcttgatcagcacacactcaaagagagcgagcgtttttgggatgtcgtcgccaagcacagtaatgtgaaagccattttgtgtggccatgtgcatcaggatatggatcgtattcaccttggcgcgcgtgtgatggcgaccccctcaacctgtgtgcagtttaagcctaattcacaagatttcgcgttagataactgctcacccggctggcgtgaattaacccttcacgcggatgggcaagtgagcacccaagtgaagcgacttaaacaaggccgatttttacctgattttaactcgaacggatactga

SEQ ID NO: 41288 - DNA, 447 bp, Vibrio cholerae
atgagtcaattgacagttaaaaaaccgtatcatgttgatctccctgaattaatgcgggtatatgagaccaactacgccaaactgaatgctctgctgcctgcgcagccggaggtcggagaggtgcgttgttaccaagctgctcaaatgacctatcaactgcaagtgctagaggtcacaaagtacacaactttgttggaggtctgtcaaagtgatgacttgtcagtatttccattgccgaccatgtctgtcaggctgtaccacgatgctcgcgtggccgaggtttgcagtagtgaacagttaggtcgagtgcaagcgcgctatgattatccgaacgaaaacatggtgcaacccgatgaaaaagcgcaactgaatcgctttttaggcgattggctgactttttgcctcaagcatggcatcagtcgcagtccaatcaccctatcacaataa

SEQ ID NO: 41289 - DNA, 1518 bp, Vibrio cholerae
atggaaaccgagatagaactgaagttttttgtttctccagatttttcaaccatcttacgcgcgaagatttctgaaaccaaagttcttcagcacagctgtcgggagttaggaaacacgtactttgatacccccgataactggttgcgtcagcatgatattggactgcgcatccgtcgttttgatgaggtgtatgtccagacggtgaaaaccgcaggtcgtgtggtcgccggtctacatcagcgtccggagttcaatgccgaacatcacagtaatgagcccgatctttcgctgcatcctgccgatatctggccgcaaggaaaagagctgactcagctacaagccgaactcatgcctctcttttcgaccaacttcactcgtgaacagtggttgattagcatggctgatggtagccaagtggaagtcgcctttgatcaaggtcttgtggtggcgggtgatcgccaagagccgatttgtgaagttgagctggaacttaagtctggtcaaaccgatgcactgtttaccttagcgcgccagctttgtgagcatggcggtatgcgcttagggaatcttagcaaagcagctcgtggctatcgcctcgccgccaattattcgggcgatgaaattcaacccatggccttggtcagtgtcgataaaaatgacactgccgagtcttgctttatccgtgctttagaacatgcgttagcgcactggcattatcatgagcaaatctataccgaacgtgaaaacgtggcggcattgcacgaaattcgtcatgcagtgagttacctgcgccaactgctttccgtctacggcggcatcattccgcgccgcgccagcgcgattttgcgccaagagctcaaatggttagagcaagagttacagtggctgaaagagtttgaatatctggaaagtttgcaagaagacaaaggttacgcgctgcgtaaactggatgcgcgtaagtttttagtcaccgcgttgaaaaccttgcaagagagtctgccacagcgtgaagatacactgcgtttactgagcagtgcccgttataccggcttgttactggatctaagtcgttgggtgctgacacgtggttggcagccgtttttagatgacaaagcacgcgaaaaaatggcgcagccgctggaagcgttttccgtaaaacaacttgaccgcacatgggcggagttgatggaagcttttccaccgggtaaaaccttaaccgtacaagaatacctcgatcagcagtatcgcctaatgcgtaacctttacactggggtgagttttgcaagtttatacgatgctgaaaaccgtcaggcatttcggatgccgtgggcggatttgttgcacggtattgatgatttattgcgcctcaaaccattagagcgtttggtggatctgctacaaggtgaggagcaagatcaactgaaacgttggctgattcgtcaagagaactccattttgcatgcgatggagcaaagccgcacgatgggtgttgaagcgcatccgtattggcgtgagtag

SEQ ID NO: 41290 - DNA, 1302 bp, Vibrio cholerae
ttgggttgctccgcttgttatcaacaactaggtattacgatggaaatccttgcgaactacggcaccgtcttgattattgtggcagctgtcttcggtttcttgatggcgattggtattggtgcaaacgatgttgccaatgcaatgggcacttcagtaggttcaaaagcactcaccgttaaacaagccattattattgcgatgatttttgaattcgcaggcgcttacttagccggtggtgaagtgacagaaacgatccgtaatggggtgattgaaacctctctcttcgcagataaacccgatgtgctgatttacggcatgatgtcagcgcttcttgccgcaggcacttggttactggtggcgtcttacatgggctggccagtctctaccactcactctatcatcggcgctattattggtttcgcgtgcgtttctgtcggtacagaagcggtcgattggagctcagtaaaaggcattgtcggcagttggattattactccggtgatttcaggcttctttgcgtacctcatttttgtcagcgcacaacgcctcattttcgatacagaaaaaccgctgatcaatgccaagcgtttcgtaccggtatacatgttcatcaccactatggtgattgctctggttaccatcaaaaaaggtcttaaacacgtcggcctgcatctttcgagctcagaagcttggatgtggtccgcggtggtttctgccatcgtgatggtcggcggctatctctacattcagaagaaatttgctaatcgcgatgaagaccatggtttcgcgggtgtggaaagcatcttcagtatcctgatggtgatcaccgcgtgtgctatggcttttgcgcacggctcaaacgacgtagcgaacgcgattggtcctttgtctgcggtggtttcaaccgttgaacacatgggtgaagtggccgcgaagagctctatcgcatggtggattcttcctctgggtggttttggtatcgtcgtcggtctcgcaacattaggtcacaaagtgatggcaaccatcggtactggcattacagaattgacgccaagccgtggttttgcagcccagctagcaaccgcttcaaccgtcgtactggcgtcaggcacaggcttaccgatttcaactacgcaaactctggttggtgcagtactaggtgttggtttcgcacgtggtattgctgcactgaacttaggtgtggtacgtaacatcgttgcctcttgggtcgtcactctaccggcaggcgcactcttagccgtggttttcttctacgcgattcaagcagtgtttgtcggctaa

SEQ ID NO: 41291 - DNA, 1590 bp, Vibrio cholerae
atgtatctgaacttctttgggtttgacgaattaccgttttctatcgtccccaatgcgcgttatctctacctgagtcagcgtcatcaggaagccatagtacacctgcaagccggattgggcgatggcggcggctttgccatgctcaccggagaagtcgggacgggaaaaaccactgtcgcgcgagcgattctggcgagtttgccaggcaaaacgcgcgcggggatgatcctcaatcccactttctcggatctggagctattggaagcgatttgtgatgaatttgaggtcagctatccgaaaaaagcgaccttaaagaaacttacgcaagtactgcatgagtttttgttggccgagcacgcgcaaggcatacaagtgcttttgatgattgatgaagcgcagcacttggcaccggatgtgttggagcagctacgcctgctgaccaatttggaaaccgagagccataaactgcttaaagtactgctgattggccagcccgagttgcaagaaaaactgcgtttgccgcagttgcgccagctcgcccagcggatcactgggcgctaccatttactgccattgaatgaagagcaaacggccgactacatccgctttcggattgagcaagccagcggtaaccctgagctgtttaatcgtaaagcctgtcagtggattgcagagcaaactcacggtattccgcgcttaatcaatctggtgtgtgatgcggcgttaaagcaagcgtatcaagcgggtgaaccaacgctgagcctagcgagaattaagctcgcctgccaagaggtgatgagctttcaatcttctgtttatcaagtagcctcggccaaacctcctgtccctaagctctcttatctctccagcgcattgggggggatagctctggccgtcgtactggcatggcaattaccgcctcagcttgatcgggttatgcaacactattttccgttacctgaagtggtgccgccgaccgaacagagagttttcccgcaagcgttacgtagtgcgttactcaacgcgacgagcagcgagcatgcccttgaaactctgtatgcggtctggggctatcaagcctcggtgctggagcagttttgtcagactcaagcagatgcggtgctttggtgtgaagagcagacgggcgattggtcaacgctgcaaacttacgatttgcccgctgtactcactttaatgatggatgatgtgcccacttacgcggtgctgtatcgcttaacgggcgatcaagcggagctgttggtgggaggcgaacgttatcgtattgcccgccaatggctagagccgttatggaatgggcaattttcgctactttggcaggccagtttttctcgaacattaaagcagggaatgcagggagccgatgtagccttgctcgagagcaaattggcgcaagtgttgggcgaacctgaacgcccgcgtgagcaatttgataaggatttgtcgcgtaaagtcgagttattccaacgttggcaaaatatgcatgttgatggtatcgcaggaagacaaaccttacgccgccttgagctattgacccagcagcaagcgccgagtttgaaggaggaaggctaa

SEQ ID NO: 41292 - DNA, 1212 bp, Vibrio cholerae
atgcaaatttacctcgttggcggcgcagtgcgcgatcaattgctgcaacttccggtttacgaccgtgattgggtagtggtcggcagtagcccacaagctatgttagcggcaggctttcaagccgtcgggaaagattttccggtgtttttgcatccgaacagtaaagaagaacatgcccttgcccgtaccgaacgcaaaaccagcgtaggttacaccggctttgcttgccactacgcacccgatgtcaccctcgaagaagatctgctgcgccgcgatctgaccatcaatgcgatggcgcaagataactctgggcaactgattgatccttatggcggtcagcgcgatctcgccgcgaaagtgctgcgccatgtttcgcccgcgtttgtcgaagatcccttgcgtgtgctgcgcgtggcgcgctttgcggccaagttgcatcacctaggtttcaccgttgccgaagagacgatgcagttaatggcgaagattgcgcaatcgggcgagttgcagcacttaaccgccgagcgtgtgtggcaagagtggcataagtcgctctcggcccatcatcccgaaatgtttttgcaggtgttacgtgattgcggcgcattggcggtggtgctgcctgaaatcgatcgcttgtttggcgtgccacaaccggaaaaatggcacccagagatcgacaccggcattcacacgttaatggtcgccaagcaagccgcacaactttctgactcccttctcgtgcgttttgccgcgcaagtgcatgatttaggaaaaggcgtgaccccaccttctgaatggcccagacataaattgcactgccataccgggcttaacatcattgaatcattgtgcgagcgcattcgcgtgcctaatgagtttcgcgatttagcgctcgcggtgtgcgcgcagcattccaatatccatcgtgcggacgagttaaagcctaccaccaagctgaaagtgctggggcttttggatgtgtggcgcaaaccggagcgtcttgagcaagtgctactgtgttgtgaagcagatcatcgtggccgtttaggtttagagagtgagccgtatccgcagcgtgagattttcctgcgtgcctaccaagccgcccttggcgtagcagttcaagccgtgatagcggatggttttcaaggcaagcatatcaaagaagagttggataaacggcgcgtatcggcaatcgaggctctgtag

SEQ ID NO: 41293 - DNA, 1302 bp, Vibrio cholerae
atgtctaagatcgttaaagttctaggtcgtgaaatcatcgactcacgtggtaacccaacggtagaagcagaagttcatctagaaggtggtttcgttggtatggcagcagctccatctggtgcttctactggttctcgtgaagcgcttgaactgcgtgacggtgacaagtctcgtttcctaggtaaaggcgttctgaaagcgctggctgcggttaatggtccaattgcagacgctctggttggcaaagatgcaaaagatcaagcaactattgaccaaatcatgatcgacctagacggtactgagaacaagtcaaacttcggtgcaaacgcgattctagcggtttctctagcaaacgcgaaagcagcagcggcagcaaaaggcatgcctctgtacgagcacatcgctgagctgaacggcactcctggcgtattctcaatgcctctaccaatgatgaacatcatcaacggtggtgagcacgctgacaacaacgtagacatccaagagttcatgatccaacctgttggcgcaaaaactctgaaagaagcagtacgtatgggcgcagaagtgttccataacctagctaaagtactgaagtctaaaggctacaacactgcagtgggtgacgaaggtggtttcgctcctaacctgaaatctaacgcagaagcgctagaagttatcgctgaagcggttgcggctgcaggttacaaactgggtactgacatcacactagcgatggactgtgctgcttctgagttctacgacgcagagaagaaagaatacaacctgaaaggcgaaggtcgtatcttcacttctaacggtttctctgatttcctagaagagctgactgagaagttcccaatcgtttctatcgaagacggtctggacgagtctgactgggaaggtttcgcataccaaactgagaaactgggtaagaaaatccaaatcgttggtgacgatctgttcgtaacaaacaccaagatcctgaagcgtggtatcgacaacggtatcgctaactctatcctgatcaagttcaaccaaatcggttctctgactgaaactctggctgcgatcaagatggcaaaagatgctggctacactgcagttatctctcaccgttcaggcgaaactgaagatgcaactatcgctgacctagcggtaggtactgctgcaggtcaaatcaagacgggttctatgagccgttctgaccgtgttgctaagtacaaccaactgatccgtatcgaagaagcactgggttcacgtgctcctttcaacggtctgaaagaagtgaaaggccaagcttaa

SEQ ID NO: 41294 - DNA, 1638 bp, Vibrio cholerae
atgacgacaaattatatttttgttactggcggggttgtatcctctctaggtaaaggtattgcagcagcatcccttgcagcgattcttgaagctcgtggtcttaaagtgaccatgatgaagcttgacccttacatcaacgttgatccgggcaccatgagcccaactcaacacggtgaagtgttcgttacggaagatggcgcagaaaccgacctagaccttggtcactacgagcgtttcattcgtaccaagatgaccaagcgcaacaactttaccgcaggtcgtgtttacgctgatgttctgcgcaaagagcgccgtggcgactacttaggtgccacgattcaggttattcctcatatcactaacgcgatcaaagatcgtgtgattgcgggctcagaaggccacgacatcgctatcgttgaagttggcggtactgtcggtgatatcgaatcactgccatttatggaagcgatccgtcagctcgcgatcgaagtgggccgtgagcacgctatgttcatgcatctgacgctggttccttacctagcggcagcgggcgaagtgaaaacaaagccaactcaacattcggtaaaagagctgctttctatcggtattcagccagacattctggtttgccgtagcgatcgtatgatcccagccaacgagcgtaagaaaattgctctgttctgtaacgtgcctgaaaaagccgttatctcaatgaaagacgtggattctatctacaagatcccacaactgatccgctctcaagggttggatgatttggtgtgtgcacgttttggcattaacgcgccagaagcggatctctctgaatgggaacaggtgatttacgaagaagcgaacccaaccggtgaagtgactatcggtatggttggtaagtacaccgaactgccagatgcttacaaatcggtcaacgaagccctgaaacacgccggtctgaagaaccgtctgagcgtgaccatcaaatacgtagattcacaagacgttgaaaccaaaggcaccgatgtgctcaatggtctggatgcgattttggtaccgggtggttttggcgatcgtggtatcgaaggcaaaatccgtgcagcgcaatatgcacgtgaaaacaaaattccttaccttggcatctgcttgggtatgcaagtggcactcattgaatacgcgcgcaatgtagcgggtatggaaggtgcacactcaaccgaattcaataaaaacaccaaataccctgtggttggtttgatcacggaatgggtagatggcgaaggcaatgtcgaagagcgtagcgagaaatcagatctgggcggtaccatgcgtctaggttcacagctatgccaccttgagaaaggcactaaagcgtacgagttgtacggtagcgcaaccattcatgagcgtcaccgccaccgttacgaagtcaacaacctgctgcgtcctcagattgaaaaagcaggtttgaaggtttctggtctgtcagcagataagaagctggttgaagtgattgagaaccctgctcacccatggtttgtggcagcgcagttccacccagagttcacctcaaccccacgcgatggtcaccctctgtttgctggctttgtaaaagcagcgggtcagttccaacgcggtgaattgaagtaa

SEQ ID NO: 41295 - DNA, 837 bp, Vibrio cholerae
atgcctgatgtgaggaaagccatgtcacacccgattgaacaactcgaacagatcatgcgccgcttgcgtgacccagaacaaggttgcccgtgggataaagagcaaaccttcgacaccattgcaccttacaccatcgaagaaacctttgaagtggtggatgccatcacccagcgcgattggcctaacctgcgtgaagagttgggggatttgctgtttcaggtgattttctacagccaaatggccaaagaacaaggcctgtttgagtttcgtgatgtggtggaaacggtcaacgagaaactgacccgccgccatcctcatgtgtttggggatgccacctttgaaaatgacgcgcaaattcacgccaattgggaagcggaaaaagccaaagaaaaagcgcaagcaggcaaaagtgagcaaagtattctagactctgtaccacgttcgttgcccgctttatcgcgtgcctacaagatccagaaaaagtgtgctcaatacggatttgattgggatagccttggccctgtggttgaaaaagtgcacgaagaagtcgaagaggtgatggaagaagcgctgcaagtggatgtggatacgcaaaaagttgaggaagagctaggcgatcttttattcgcaaccgtcaatttagtgcgtcatttaggtcatgatcctgaaatggcgctgagtaaagccaacgccaaatttgtgcgccgttttcaaggtgttgaggacaaagccagagcgaaaaataagccgctgcacgcgttcactttggctgaactcgacggattttgggatgaagtaaaacttgaagaaaaacaggcaataaagtcattttcctga

SEQ ID NO: 41296 - DNA, 2217 bp, Vibrio cholerae
atggttgcggtacgaagcgcacacttaaacccagaccaacagtttgagctagaaacatggatagccagcctgacccaagaggggaaaacggccgctaaattaaccgcagtgtatcgcgattgcgagcaactgttggcgggcaatccacaagggcctctgctgctttggcgtgggcgggaaatgatcgaaattttgatcaccctatcgatggaccgcccaacgttggtggcggctttgctatttccgatcgccaccagtggtgtgctggataatgagtcgcttgaagagggatatggccgcgaagtggttaagcttatccacggcgtggaagagatggcggcgattggccagctcaacgtcaccatgcatggcagtgaagcgtcagcgcaagtggataacgtgcgccgtatgctactggcgatggtggatgatttccgctgcgtggtgattaagcttgccgagcggatctgcaacctgcgtgaagtgaaaaacgagccagatgaagtgcgccgcgtagctgccaaagagtgtgccaacatctatgcgccactggctaaccgccttggcattggtcagctcaaatgggaaattgaagactacgcgtttcgttaccaacaaccggatacctataaacagatcgccaaacagctttctgagcgccgcatcgtgcgtgagcagtacattcgtgattttgtcagcgacctgcgtgctgagatgaagcaatccgggattaacgctgaagtcagcggtcgcccgaaacacatctacagcatctggcgcaaaatgcagaaaaagagcctcgcttttgatgagctgtttgatgtgcgtgcggtgcggattattgctgataagctgcaagactgttacgccgcgcttggcattgtgcatacaaaatacaagcacttaccgaacgagtttgatgactatgtagcaaacccaaaaccgaacggttaccagtccattcataccgtgattttggggccggaaggcaaaaccatcgagatccagatccgaaccaagcagatgcatgaagagtcagagcttggggtagcggcacactggaaatacaaagagggcagcagtgcagcacgcagtggctacgatgagaagatcacttggctgcgtaaactgctcgattggcaagaagagatgtccgattcgggcgagatgctcgacgaactgcgcagccaagtgtttgatgatcgcgtctacgcctttaccccgaaaggcgatgtggtcgacttacctatgggcgcgaccccgctcgattttgcctaccacattcactccgaagtggggcatcgctgtattggcgcgaaagtggcagggcgtatcgtgcctttcacccacaaattgcagatgggcgatcaggttgaaatcatcaccgccaaagagccgaatccatcacgcgattggttgaacccatcgcttggtttcgttcattcagggcgtgcgcgcgccaagattaatgcttggttccgcaaacagagccgtgaaaaaaatctcgaagcgggacgggaaattctcgaaatcgaactggcgaaaatcggtgccaatctcaagcacgccgaggcgtatgcgctcaagcgctttaacgtcaatagcgtggatgaaatgtacgttggtatcggcagtggcgatctgcgtatcaatcagatcgtgaaccatatcaatgcgttagtgaataaaccgaccgctgaggaagaagataagctcgcgctggaaaaactgcaggaaaacaaaaccctaacaccgaatcgcccgcataaagatgcggtggtggtggaaggggtcgataacctgatgacccaccttgcgcgttgctgtcagccaatcccaggcgatgaaatccgtggctacattacccaaggccgtggtatttcggtgcaccgcagcgactgcgagcagctcgaggagcttagccttcatgcaccagagcggatcattgataccgtatggggcagtggttttgtaggctcttatctactgaccgtacgtgttgaagcgatggagcgcagtggcttactgaaagacatcacgactttgctggccaatgagaaagtcaaagtggcgagtatgaagagccgctccgactataaacgccaaatcatcatcatggatttcgatcttgaggtgaacaacgtcgaagctttagcgcgcgtttctaaacgcatcgagcagatcaaagatgttatgttggtcaaacgcttaggttaa

SEQ ID NO: 41297 - DNA, 381 bp, Vibrio cholerae
atgatcgttggactcggaacggatatcgctgaaatcgaacgggttgagaaagcgttggcgcgctcaggagaaaactttgcgcgccgcattcttaccgattctgaactagagcaatttcatgcttcgaagcaacaagggcgctttttagccaagcgctttgccgccaaagaggcggcttcgaaagccttgggaaccggtattgctcagggggtgactttccatgactttaccattagccatgataagttggggaaacctttactgatcttgagcggtcaagcggcagagttagcttcgcagctgcaggttgaaaatattcatctttccatttccgacgaacgccattatgcgatggcgaccgtgatccttgaacgccgttaa

SEQ ID NO: 41298 - DNA, 978 bp, Vibrio cholerae
atggctgatcaagaatttgatatcgatgcatactttgcttctcaaagcgaaggtaaatctgtggtggcatcgacaccggaaaaccaacattgcggttttgtcgcgattgtcggtcgtccaaacgtgggtaaatcgactctgctcaataacctgttagggcaaaaaatctcgattacttcgcgtaaaccacaaaccactcgccaccgcattatgggcgtagagaccgatggcaattatcaggcgatatacgttgataccccagggctgcacattgaagaaaaacgcgcgattaaccgtttgatgaaccgtgcggcgtcaagctcactgagtgatgtcaacttagtgctgtttgtcgttgaaggtactcactggaccgctgatgacgagatggtgttcactaagctgcaaaaagccaacttccctgtggtgctgtgtgtgaacaaggtcgatcaggtcaaagatcgcaacgaagtgatgctgcacatgctggagctttctaaacgcatgcagtttgtcgatatcgtaccgatttccgctaaacagggtaaaaacaccgatgtgctgaaaaagcatgttcgcgaccatttaccgaaagccgtgcaccatttccctgaagagtatgtgacggatcgttcacagcgctttatggcctctgaaatcgtccgtgaaaagttgatgcgttttactggcgaagagctgccgtattcggtgacggtggaaatcgagcgtttcgattacaacccagataccgatggtttccacatcaacgccctgattttggttgagcgtatcggccagaagaaaatggtgattggtaaaaacggcgagaagatcaaaaccatcggccgtgaagcacgtctggatatggaagagctgttcggccgcaaagtctacctagagacttgggtgaaagtgaaatctggttgggcggatgatgagcgcgccctgcgttcactcggctacatcgacgatctctaa

SEQ ID NO: 41299 - DNA, 897 bp, Vibrio cholerae
atggcgaacacattctcactgattttggtgatcgtaactctggtcaccggtatcgtctggacactggaaaagctggtgtgggcgaaaaaacgccaacagaaacaagctcatttacaggcgcaaacgcccgatatgccagcctcagcgctggataaagtcgtggctcagccgtggtggattgaaaacagtgtctcgattttccctgttattgcttttgtgctggtactgcgctcgttcatttatgaaccgttccaaattccatccggttcgatgatgccgactctgctggtcggggattttattctggttgagaaatacgcttacggcttgaaagatcctgtatggcgcactcagttagtggaaacgggtaaacctgagcgtggtgatattgtggtgttcaaatacccagtgaaccctgagatcgactacatcaaacgtgtggtggggatgcccggagataccgtacgttacagcgcaggtaaagagctgtgtattcagcaccaaggcgagagcgaatgccaagcagttaaactctctaacgtgcaagagagcgagttttaccaaaatgagatccccctgatccagctgaacgaacagctaggtaaggttgagcacaatattttggttaacccattgagcattgataacgtggcgaattatcgcccacgcagtggcgtgaatgaatgggttgtaccacaagggcactattttgtgatgggtgataaccgtgacaacagtgctgacagccgtttctggggctttgtgccagagcagaatctggtcggaaaagctgtggctatctggatcagtttcgagtttgaacgcgctgaagacagcgtacttccacgctggattcctaccggagtacgattcaatcgtgttggtgggatccactaa

SEQ ID NO: 41300 - DNA, 261 bp, Vibrio cholerae
atgtacaccgctgaacaaaaagcgcgaatcaaatgggcatgccgtcgtggtatgttggagcttgatgtggtcatcatgccatttttcgaagagtgttttgattcactgaccgagtctgagcaggacgactttgtggctttactggaaagtgacgaccctgatctgtttgcttgggtgatgggacatggccgctgtgagaatttaggccttgctgcgatggtggataagattgtcgctcataacctcagcaaagtccgttaa

SEQ ID NO: 41301 - DNA, 972 bp, Vibrio cholerae
atggactggcaaaatcgtttttcagtactcaatctttcttctcacgatcctctccctgaactgatgctcacgcatctcactggatggggagccatcacgctggtcggtgccgataaaaaagcgtatctgcaaggccaagtcacctgcaatgtggtttctttgcaagagcagcaagtcacctttggtgcacactgtgatgccaaaggtaaggtatggtcggtatttcgcttgtttcatcatcacgatggctacgcaatgtttcaaccgcaatcggcgatggaagtcgaactgcgcgagctgaagaaatacgccatcttctctaaagtgacgattgccgaaagcagcgatatcgctctaggtgtgatgggcagtcaagccgacgcttggattgataccgtgagtgaaacgactggcgatgtacgccgtatcgcaggcggtacagccgtgcgtatgagtccacagcgctggctgctgttggtgaatgccgaacaggcggagcaatatgtcaatgcttggcaaggactgcatgtcgagcaatcgctatggacacgcatggatattgaagaggccgtgcctgtcgttacccaaacggctcaaaatgaacacattccgcaagcactcaatgtgcaagccgttgatggtatcagttttactaaaggttgttacacagggcaagagactgtggcacgcgccaagtatcgcggcatcaataagcgcgccatgtacatagtcaaaggtaatctgagtgcgccactgagccaagatgagccagtggttcttgaacgcgctgtcggagaaaactggcgtagcgcgggcgcactactgactcattatcgttttaccgattcaatagcgatcggtttgatcgtcctgcccaacgatcttgagcacgatgtcaagctgcgtctagctgctcaaccagacacccgttggcatatccaaccactaccctattcactcagtgatgaatag

SEQ ID NO: 41302 - DNA, 1230 bp, Vibrio cholerae
atgatgcaaagcgttgatgttgtaattatcggtggcggtatggtcggcctagcgttagcggcggctctgaaagagagtgacctacgcattgctgtggttgagaaccaattaccggaagaggcgctaaacccgctgccggatgtgcgcgtttctgccttgagtcgctcaagtgagattgtgctgcgtaatcttaatgcttgggcgggcattgaagcgcgccgcgctgcgccctacatcgcgatggaagtgtgggagcaagatagttttgcgcggattgaatttaaagccaatgagatgacgcagcctaatctgggacacattgttgaaaaccgagtcattcagttggcgctgttcgagcaagttcagcagcaagccaatgtgacactgcatgtgcctgcgacctgtcagagcatcgccgtgggtgaaagcgaagcatggctaaccttgagtaatggccaagccttgagcgcaaaattggtcgtaggggccgatggcgcaaactcttggttgcgtcgacaaatggatattcctttgactcattgggattatggacacagtgctttggtggccaatgtgcgtaccagtgatccgcacaataaagtcgcgcgccagatttttactgcccaaggaccgttagcctttctccccatgtctgagccgcatatgagttcgattgtgtggtcgacagagccttcacgcgctgaagctttgctcaatatgaatgatgtgcagtttaacaaagcgctgaccgcagaattcgatgcacgattaggccgctgtgaagtagtgggcgagcggcaggctttcccacttaagatgcgttatgcccgtgattttgttgcgcctcgggttgctctcgtcggggatgccgcgcacaccattcatccgctggctgggcagggagtgaacttaggtttactggatgctgcctgtttggcacaagagctgctgagcttatggcagcaaaatcgcgacattggtgatgagcgtaatttgcgccattatgagcgctggcggaaagcggaagctgccaaaatgattgcggcgatgcaaggtttccgcgatctgtttgagggggataaccctgctaagaaactgatccgtgggatcggcatgcgtctggttggtcaattgccgggtgccaaagatgaaatcatgaaacgcgcactaggcctgaagggcgatctgcctgagctggcgaagcaggtttggttagagcgtgcctactga

SEQ ID NO: 41303 - DNA, 585 bp, Vibrio cholerae
atgacagattctcgtacacacctacgcctgcaaattcgtcagcgtcgacaatcactctcagcgtttgagcaacagacggctagccaacaacttatccatacctttgccagcttaccggaagtgactgccgcgcagcgtattgccctgtatcttgccaatgatggtgagctcaatacccaaccactgatcgaatggctttggcagcaaggtaaacaagtgtatctccctgttttgcaccctttcgcaaaaggtcacttgctgtttctgcactaccacacacacacaccaatgaacaaaaatcgctatgggatcgcagagcctaaactcgaccaacgtttgatctgcccggttcgagagctcgatattatcggtactcctttggtggcgtttgatcaatcaggccagcgtttgggaatgggtggcggctattacgatcgcactctcgcaccttggtttaaaacgcagcaaggcgcgatgccgattggtcttgcgcacgattgccaacaagtcgaacaactgcccactgcaagctgggatattccgttacgaaaaatcgtgacccccagcaaggtttggcagtggtag

SEQ ID NO: 41304 - DNA, 495 bp, Vibrio cholerae
atgagacacattatttcactgctattggaaaaccaaccgggtgcgctgtctcgtgttgtcgggctcttttcccagcgcgggtacaacattgaaacgctaaacgtatcaccgaccgatgacgaaaccctttcgcggctgaacattacgacgaaaaccgatgaaatgcagctagagcagatccaaaagcagctgcataaattgattgatgttttgaaagtgcaggaagtgacagagtgtgaacacatcgagcgtgagctgatgctggtcaaagtcaaggcctctggttttgcacgtgcggaagtaaaacgtacggcggatattttccgcggccagattgttgatgtcacagcttcacaatacacagtgcaactggccggtacgagcgagaaactggatgcttttattgaggcgattgcggaagtgacggaagttatcgaagtggcacgaagtggtgtggtaggcatcgcgcgtggtgaacgagcgctcagagcttag

SEQ ID NO: 41305 - DNA, 1722 bp, Vibrio cholerae
atggaaatgctatctggcgcagagatgatcgtccaatctctgatcaatgaaggtgtggagcaaatcttcggatatcccggcggttcagtactcgacatctacgatgcccttcacgaaaaaacagaccaaattaaacacgttctggttcgtcacgaacaagccgcaacacatatggctgatggctatgcgcgcgccactggaaaaccgggcgtagtgctcgtctgctcaggtccgggcgccaccaatacggtgactgggattgcaaccgcctatatggactcgattccgatgattgtgatctccggtaacgtagccactaatcttattggtaacgatgcatttcaagagtgcgatatcgtcggcgtgtctcgtcccatcgttaaacacagctttttggtgaaaaaagccgaagatattcctgaaaccatcaaaaaagcgttttatatcgcgtcaacggggcgtcctggtcctgtagtgattgacgtgccaaaagatgtgatgagcccgcttaataagctgccttatgagtatccagaaaccattaaaatgcgctcttacaacccaacgacggctggccacaaaggacagatcaaaaaagggttacgcgcactgctcgatgcgaaaaagccagtactgtacgtcggtggcggggcgattattgctaatgcagatcagcaaattcgccaacttgcagaggctttaaatctgcccgtggttagtactttgatgggattgggcgtttttcctggcactcataaaaactcactgggtatgcttggcatgcatggtgtgtatgaagccaatatggcgatgcacaatgcagatctgatttttggggtaggtgtgcgctttgatgaccgtacgactaacaacctagagaagtactgccccaacgcgaaaatcatgcatatcgatattgacccgtcatcgatttctaaaaacgtgaaagtcgatctgccgattgttggttctgccgaccaagtattggatggcatgctcaagcttctggaagagagcgctgagcgcaatgatgcggcagcattggatagttggtggaatgagatccaagtgtggcgtgatcgtcagtgtttggcttatgaaacctcagcagaacggattaagcctcagcaagtgattgaaacgctatataaaatcacggaaggtaaagcaattttggcctcggatgtggggcagcaccaaatgtttgcggcactctactatccgtttgataagccgcgtcagtggattaactctggcgggctaggcaccatgggttttggtttacctgcgggaatgggcgtgaaattcgccatgccagaagaagaggtactggtcgtgaccggagatggcagtattcagatgaatattcaagagctatcgaccgcactgcagtacgacattccagtaaaaatcattaacctcaacaaccgtttccttggaatggtgaaacagtggcaggatattatttatcaaggtcgtcactctaactcatacatgagttctgtgccggattttgcggcgatcgcagaagcttatggtcatgttgggatccgtatttctcaccctgatgagctgcaagctgggctggaaaaagcgttagcgatgaaagatcgtctggtgtttgtcgacattaatgtcgatgaaactgagcacgtttacccaatgcagatcaaaggcgaagggatggacaaaatgtggttgagcaaaacggagagaacctaa

SEQ ID NO: 41306 - DNA, 537 bp, Vibrio cholerae
gtgatgagagctatggaaccgatcgctaaactcgatttagctttttcattactctgcttacagcataagtacaatacgcgagtcgcgaggctcagtaagtcaatttctcatacaggagatgggcatctttacgcgctgatgggcattttagcttggtggttagatgagactcatgggctgctgtttctcgcggttggcctgcttgcgtttgctattgaattaccgatttattggttgctgaaaaacagttttcagcgccgacgtccacaagaactttctgccttagtcacggcttatatcacgccgagcgatcgctacagcttaccgtcgggacataccgctgccgccttcgtcatggcgacattaattggttatatctatcctcattggtatgccgtcgcactttgttgggcaggtttaattggcttggcgcgagtgttattaggcgtgcattttctaagtgatgtgatcgctggagctttgcttggcatgggcagcgcaacctatgcaatgagcgtaatggagaaaagcatttga

SEQ ID NO: 41307 - DNA, 1404 bp, Vibrio cholerae
atgtcaaaagccaaaactctttacgaaaaaatttacgatgcccatgtggtggtggccgcaccgggtgaaacgccgattctgtacatcgatcgtcatctagtccatgaagtgacctctccacaagcctttgatggcttgcgtgaaaaaggtcgcccggtacgccaagttagcaaaacttttgcgaccatggatcacaacgtctccaccactactaaagacatcaatgcctcaggtgaaatggcgcgcatccagatgcaaacgctttccaaaaactgcgaagagtttggcgtcacgctgtacgacattaaccacaagtaccaaggcattgtgcatgtgatgggacctgagcttggtattaccctccccggcatgacgattgtatgtggtgattcacacaccgcaactcacggtgcattcggctcgcttgcctttgggataggcacctcagaagtagaacacgtactggctacccaaaccctaaagcaaggccgcgctaagacgatgaaaatcgaagtgcggggcaaagtggctcccggcatcaccgctaaagacatcgtactggcgatcattggtaaaacaactgccgctggcggtacaggctatgtcgtggaattttgtggagaagcgattcgcgatctctccatggaaggtcgcatgaccgtgtgtaacatggcgattgaacttggtgcgaaagcaggcttgattgcccctgatgcaactacattcaactacatcaaaggccgcaagtttgccccacaaggcagtgattgggatgctgctgtcgactattggcaaacattaaaaaccgatgaggatgcacagttcgatgccgtcgtgacgcttgaagccagtgaaatcaaaccgcaagtgacttggggtaccaacccaggccaagtgattgccgttgatgagccaatcccatcacctagccagtttgccgatcctgttgaacgcagctcagcagaaaaagctctggcttacatgggacttgaagccggcaaaatgctctccgattataaggtcgataaagtgttcgtcggttcatgcaccaactcgcgcatcgaagatatgcgcgctgcggcagcggtagccaaagggaaaaaagtcgcctctcatgtccaagcattgatcgtgcccggatccgaacaagtgaaagcgcaagccgaagcggaaggcttagataagatctttattgaagcaggatttgaatggcgcttaccgggttgctcaatgtgtttagccatgaacaatgaccgcttagggccaggagaacgctgcgcgtctacctcaaaccgcaactttgagggacgtcagggacgtgatggtcgcactcatttagttagcccagcaatggcagccgctgcagcgattgctggtcacttcgtcgatattcgtcagttttaa

SEQ ID NO: 41308 - DNA, 1512 bp, Vibrio cholerae
atggagttcagtgttaagagtggcagccctgagaaacagcgcagcgcatgtatcgttgttggggtgtttgaaccacgtcgcctttctccagtcgcagaacagcttgataaaatcagcgacggctatattagttcactgctacgtcgcggtgatctagagggtaaaccggggcagatgctactgctgcatcaagtacccggtgtgttgtctgagcgagtactgctcgtcggttgcggtaaagaacgcgaactgggtgaacgtcagtacaaagagatcattcagaaaaccatcaataccttaaatgaaactggctctatggaagcagtctgcttcttgaccgagttgcacgtcaaaggtcgcgatacctattggaaagtgcgccaagcggttgaagccaccaaagatggtctgtacatctttgatcaattcaagagcgtaaaaccagaaatccgccgcccactgcgtaaattggtattcaacgtgcccactcgccgtgaattgaatcttggtgaacgcgcgattacccatggtctggctatttcatcaggtgtaaaagcttgtaaagatttaggtaatatgccgcccaacatcgctaacccggcttacctcgcctctcaagctcgtcgtctggctgacgattacgagagcatcaccaccaaaatcattggtgaagaagagatggaaaagctcggcatggcttcttacctcgcggtcggtcgtggctcacgcaatgaatccatgatgtcggtcatcgaatacaaaggcaatccagatcctgaagccaaacccatcgtattagtgggtaaaggtctgactttcgattcaggcggtatctcactcaaaccgggtgaaggtatggatgagatgaagtacgacatgtgtggcgcagcatcggtattcggcaccatgaaagcgattgccaaactcggcctaccactcaatgtgattggtgttttggcgggctgtgaaaacatgcctggcagcaatgcttaccgtccgggtgatattctgacgacgatgtcaggtcaaaccgtggaagtgttaaacaccgatgccgaaggccgtttagttttgtgtgacgtactgacttacgttgaacgctttgaaccagagtgcgtagtcgatgttgccacgctaaccggtgcgtgtgtgattgctttaggccatcacatcagcgcggtgatgtcgaaccacaacccgctggcacatgagttggtgaatgcctctgagcaatcgagcgatcgcgcatggcgtctgccactggctgatgaataccatgagcagctcaagagcccatttgccgatatggcaaacattggtggccgcccaggtggcgccattactgcagcttgttttctgtctaaatttgctaagaaatacaactgggcacacttagacatcgcaggtactgcatggaaatcgggtgccgcgaaaggctcaaccggtcgtccagtctcgctactagtccaattcctgcttaatcgcagcggtggcctagacgctgaagagtaa

SEQ ID NO: 41309 - DNA, 450 bp, Vibrio cholerae
atgcctaccgcaactttttacctgatttcccgagattctgctcaagcaacgccagaaggcttggcgcagtacgtgctgtatttgacgcgtcactttgccgcgcaaggcgcacgcatttatctgcaatgccaagataaaccacatgccgagcagctagctgagcgattttggcaaatcgaacccgaacagtttttagcgcacaatctggtcggtgaaggtcccaaatccggtaccgcgattgagataggttatgtgggcgtttccccctcttggaatcgtcaactggcaataaatttggcggataatcagacaacctttgcgcgtacctttaccgaggtggtagacttcgtgccctgcgcagaaaatgccaagcagctggcgcgcgagcggtataaactctatcgacaagcaggttatcagctgcaaactgttgagattcagtatccataa

SEQ ID NO: 41310 - DNA, 2862 bp, Vibrio cholerae
atggaaaagacatacaacccaacatcaatcgaacaagatctgtataagacttgggaagagcaaggctactttaagcctcacggtgacacatcaaaagacgcgtacagcatcatgatcccgccaccgaacgtcaccggcagcctgcacatgggtcacgccttccaagacaccattatggatactctgatccgctgtcagcgtatgaagggcaaaaataccttgtggcaagtgggtactgaccacgcgggtatcgccactcaaatggtggttgagcgtaagatcgctgcagaagaaggcaaaaccaagcatgattacggccgtgatgcgttcatcgacaagatttgggaatggaaagcagaatctggcggtaccatcactaagcagctacgtcgtcttggcgcctctgtcgattgggatcgtgagcgctttacgatggatgatggcttctacaaagccgtgcaagaagtgttcgtgcgtctctacaaagatgatttgatctaccgcggtaagcgcctagttaactgggatccaaaactgcacactgcgatctccgatctggaagtggaaaataaagagaccaaaggtcacatgtggcacttccgctacccgctagccgatggcgtgaaaacggcagatggtaaagattacatcgtggttgccaccacccgtccagaaaccatgctcggcgatacgggtgttgcggttaacccagaagatcctcgttataaagatctgattggtaaagagatcattctgccgatcgtcggtcgtcgcatcccaatcgtgggcgatgagcacgccgatatggagaaaggcacgggctgtgtgaaaatcacccctgcgcacgacttcaacgactatgaagtcggcaaacgtcatcagctaccgatgatcaacattctgacctttgatgccaacatccgtgatgcagccgaagtcttcaactcaaacggcgaagcaagcaatgcttacggcacagagatccctgctaaataccaaggcatggagcgttttgctgcgcgtaaagcgatcgtggcggaatttgaagaactgggtctactgcaagaaatcaaagatcacgacctaacggttccttacggcgaccgtggtggcgtggtaattgagccaatgctgactgaccaatggtacgttcgcgcaggtattctggcgaaaccagcggttgaagcggtagaaaatggcgatattcaattcgtaccaaaacagtacgagaacatgtacttctcttggatgcgtgatattcaagactggtgtatctctcgccaactgtggtggggtcatcgcattccggcttggtatgacgagcaaggcaatgtgtttgttggtcgtaacgaagaagaagtgcgtgcagaaaacaacatcgcagctgatgttgctcttcgtcaagatgatgacgtactggatacttggttctcttctgcattgtggaccttcggaacacttggctggcctgaaaaaacgccagagctaaaagtcttccacccaaccgatgttctggttacaggctttgacatcatcttcttctgggtggcgcgcatgatcatgatgaccatgcacttctgtaaagatgaagatggtaaagcgcaagttccgttcaaaaccgtgtacgtaacaggtctgatccgtgacgaaaacggcgacaaaatgtcgaagtcgaaaggcaacgtacttgaccctatcgatatgatcgacggtattgatcttgagtctctggtcgcgaagcgcaccggcaacatgatgcagccacaactggcagcgaagatcgagaaaaacacccgtaagacgtttgaaaacggcatcgaagcctacggtactgactcactacgtttcaccctcgcggccatggcgtcaactggtcgtgacatcaactgggatatgaagcgtctagaaggttaccgtaacttctgtaacaagctgtggaacgcaagccgttacgtgctgatgaacaccgaagagcaagattgcggttttgcagccggtgctgagcttgaatactcgctggccgacaagtggatcgaatcacagttcgagctggctgcgaaagagttcaatggtcacattgataacttccgtctggatatggcagccaacacgctgtacgaattcatctggaaccaattctgtgactggtacttagagctgactaagccggttctttggaaaggcaccgaagctcagcaacgcgcgacccgtcgcacgctgatcaccgtactagagaaaaccctgcgtttggcacatccagtgatcccttacatcacagaaaccatctggcaaagtgttaagccactggtggatggcgtggaaggcgacaccatcatgctgcaagcgctacctcagtacgatgtggcaaacttcaaccaagaagccttggatgatattgagtgggtgaaagcctttatcactagcatccgtaacctgcgcgcagagtacgacatcaacccaggtaagcctctggaagtgatgttgaaagcggcgaatgagcaagatgccgcgcgtatcgaagcgaacaagccagtgctggtttcactggccaagctcgaaagcattcgtgtattggcggatggcgaagcgacaccggcgtgtgcaaccgcactggttggcaaatctgagctgatgatcccaatggccggtctgattgataaagacgctgagctggatcgtctggccaaagagattgctaagacgcaaggtgaaattgcgcgcatcgaaggcaagctgggtaacgaaggtttcgtggcgaaagcaccagaagcggtaatcaccaaagagcgtgaaaagctcgcgggttaccaagaagcactggtgaaacttgagcagcagaaagcgaccatcgcggcgctgtaa

SEQ ID NO: 41311 - DNA, 1005 bp, Vibrio cholerae
atggctttcaatttacgtaaccgcaactttttaaaactgctcgacttcaccccaaaagagatccacttcctgctggatctgtctgccgagctaaaacgcgccaaatacgcaggcaccgagcagaaaaccctgcaaggcaaaaacattgcgttgatctttgaaaagtcatcgacccgtactcgctgtgcctttgaagtggcggcgtttgatcaaggtgcacaagtttcttacatcggcccttctggctcgcaaattggccataaagagtcgatgaaagataccgcgcgtgttctaggccgcatgtacgatggcattcaataccgtggcttcggccaagagattgttgaggtgctcggacaatacgcgggggtgccagtgtggaatggcttaacggatgagtttcaccccacgcagatcttggccgatcttctgactatgcaagagtacggacgcagtaaacaattgcatgaaatgaagtttgcttaccttggcgatgcacgcaacaacatgggcaactccctgatggtgggcgcagccaaaatgggcatggatattcgtttagtcgcgccgaaagcgtactggccaaatgatgccttagtggcaacctgccaagagattgccaagcaaactggggccaaaatcaccttgaccgaagaggttcaagaaggcgtaaaaggctgtgatttcctttataccgatgtatgggtttcgatgggtgaagccgcggatgcttgggatgagcgggtggcgttaatgaagccatatcaagtcaacatggatgtcatcaaagcaacaggtaatccacaggtcaaattcatgcactgcttaccggcattccatgatgaccaaaccaaagtaggccaagagattgcggccaaatacggcatgcaaggattggaagtcaccgaagaggtgtttgagtcagaatactcgattgtgtttgatgaagcggagaatcgactacacactatcaaggcggtgatggtcgccactttaggtcaatag

SEQ ID NO: 41312 - DNA, 1260 bp, Vibrio cholerae
atggaaaagtttcgagttattgggtccacgcagccactccaaggcgaagtgaccatttcaggcgcaaagaatgccgccctaccgattttatttgcttcaattttggcggaagagccagttgaagtggccaatgtgcctcacctacgtgacatcgataccactatggaactgcttgagcgtttaggcgcgaaagttgagcgtaatggctctgtgcatgtggacgccggtccaatcaaccaatattgcgcaccttatgatttggtaaaaaccatgcgtgcctcgatttgggccttaggtccattggtggcgcgttttggtcaaggtcaagtttctctgccggggggctgtgcaattggtgcccgccctgtggatctgcatatccatggtttggagcagcttggcgcaaccattaccttggaagatggctatgtaaaagcccacgttgatggccgtttgcaaggcgcgcatattgtgatggataaagtgagcgtgggtgccacgatcaccatcatgtgtgccgcaaccttagcagaaggcactaccgtactggataacgcggcgcgtgaaccagagattgtggatacggctatgttcctcaataaactgggtgcgaaaatctctggtgccggcacggacagcattaccattgagggcgtagaacgtcttggcggtggtaagcatgctgtggttcccgatcgtatcgaaaccggcaccttcttggtcgccgctgccgtatcgcgtggcaaaattgtttgccgtaacactcatgcacatctattggaagcggtcttagctaagcttgaagaagcgggggctgagattgagtgtggcgaagattggatcagtttggatatgacagggcgtgagctcaaagcggttacggtacgtactgcgccgcacccaggttttccaaccgacatgcaagcgcagttcacactgctgaacatgatggcgaaaggcggtggcgtgatcactgaaaccattttcgaaaaccgttttatgcatgtacctgagttaaagcgcatgggtgccaaagcggaaatcgaaggcaatactgtgatttgcggtgatgtcgatcgtttaagtggcgcgcaagtgatggcgaccgatctgcgtgcttctgcaagtctggtcattgcgggttgtatcgccaaaggcgaaaccattgtcgatcgtatctatcacattgatcgtggttacgagcgaattgaggacaaactctcagcgcttggtgccaatattgagcgtttccgcgactag

SEQ ID NO: 41313 - DNA, 726 bp, Vibrio cholerae
atggccatcttaaaagcacagcatttagccaagagctacaaaaagcgtaaagtggtttctgacgtcagtcttcaagttgagtcaggacagattgtgggcctgcttggccctaatggcgcgggtaaaaccacctcgttttacatgattgtcggccttgtcgcgcgcgatgaaggcaccattaccattgatgacaacgacatcagcattctaccaatgcacagccgctcacggatgggcattggttatctgccgcaagaagcgtctatctttcgcaaactctcggtcgaagacaacatcatggccgtcctgcagacccgcgaagagctgacccatgaagagcgtcaggacaagctggaagatttgctcgaagagttccacattcagcacattcgtaaaagtgctgggatggcgctctctggcggtgaacgacgccgggtggaaatcgcccgcgctctggcggctaacccacaatttatcttgctggatgagccttttgctggcgttgaccccatctcggtcatcgatatcaaaaaaatcatcgaacatctgcgcgatcgcggtctaggggtcctcatcaccgaccacaacgtacgtgaaacgctggatgtgtgtgaaaaagcgtatattgtcagccaaggccgactgattgcggaaggaacgccacaagatgttctcaataatgaacaggtgaagcaggtttatctcggcgaacaattccgtctatga

SEQ ID NO: 41314 - DNA, 861 bp, Vibrio cholerae
atgcgtttgatcgtggtcagcggacaatcgggagccggtaagagcgtcgctcttcgagtactcgaagaccttggttactactgtgtcgataacctgcccgtcagcctgctgacagcctttatccagtcggttcaaggcagtcaacaaaacgtggcggttagcattgatatccgcaatctgcccaaagagccaagcttggtacaagatgtactcgaccagctcaagcagaacaacgatgtcagcatgctgtttctcgacgccagtaaagagaccttgctcaaacgctacagtgaaacacggcgcattcatcccctctctctcagtcaaagcaagccttcacttgcccaagccattgagttagaaaaacagctgcttggcccactcaaagagcaggcagacttgttgctcgacagcagtaaccagtcgctgcatgagctgagcgaaacggtgcgtatgcgcattgaaggccgtgagcgcaaagaccttgtgatggtgtttcagtcgtttggctttaagtacggtttaccaaccgatgccgactacgtgtttgatgtgcgctttctccccaatccccattgggaacctgacctacgcccgctgacaggactggatgctccgatcaaatctttcttggaaggtcatagcgaagtgatggaactcaaacagcagatccaaaaattcttcgaatactggcttcccatgcttgagaaaaataatcgtagctacctgaccatcgccattggttgtaccggaggcaagcaccgttcggtctacctgacgcagcagttgggtgaatatttcgcgcaacttggtcatcaagtacagctccgccatacttcattggaaaaacagcaatcctag

SEQ ID NO: 41315 - DNA, 1362 bp, Vibrio cholerae
atggccgagcagatcgaatttgaccaagctcacctcaccctccaagaaatcactgaagccttagataatggccgctttgttcatgtccgccgccaactgcaggacatggagccagaagatattgctcatctactggaagcctcaccacgtaaagcgcgtgaggtgttgtggcaactgactgacccagaagattacggtgaaatccttgacgagctgaatgaagacgttaaggacgcgctggtgtcgaaaatggcaccggagaagctcgccgaagcgaccgaaggtatggacatcgatgatgtcgcctacgtattgcgtagcttgccggatgatgtgtcacgcgaagttctgtcccaaatggatgccgcggatcgcatgcgggtcgaaaccgctctgtcctatccggaagataccgccggcggtctgatgaacaccgacgtgatcaccatccgtgccgatgtggacgtcgacgttgtactgcgttatttacgtatgaaaggcgaactccccgaagccaccgatgcgctgtatgtgattgatgatgaaagcaaactgattggccatctttctcttgtcactctgctcaccacccaaccggatgtgccggtcagtgaagtgatggacgatgcggacgaagcgatcaaagtcgatatgaaagactccgacatcgccaatctgttcgaacggcgtaactgggtttctgcccctgtggtggatgaaaaccaacatctggttggccgtattaccatcgatgacgtggtcgatattatccgtgaagacgccgaacactcgatgatgagtatggcgggtatggatgatgatgaagatactttcgcccctgtcgtcaaatcggcgcgcaaacgcagtatttggcttggggccaacgtactagccgcccttgctgcggcttcagtgtcgaacatgtttgaagcgactctcgaacaaatggcggcggttgctgtgctgatgaccatagtgccatccatgggcggcgtagccggtaaccaaaccgtggctctggtgattcgggggctggcactcggtcacatcggtgacagtaacaagcgcgaacttctgatgaaagaagcggcaatcggcctactgaatggcattacctgggcattgatcatcggagccatcgtcgtagtgtggaaaggtgaatggatgcttggcgggatcatttccgcggcgatgatgaccaacctcatcgtggccggcattgctggagtcagcattcctattttgctgaaaaagatgaacatcgaccccgctcttgccggtggtatggctctgaccactgtcacggatgtgattggtttatccgtatttctcggtctagccactttgctgctggccagttag

SEQ ID NO: 41316 - DNA, 582 bp, Vibrio cholerae
atgatgaagaatatggcacgtaaaaaccaaaaagccccttgggaagaggaagaagagatcatttgggtcagtagaaccgaattgaaaaatgacatgctggccctgcaaaagctcggcgaagagctggtggagctaaagccttccgcgttagccaaatttccgctgccagaagatctggccgaagccattaaagatgcacagcgttttaaaaacgaagctcgtcgccgccaactgcaatacattggcaaactgatgcgccatattgacccagagccactgcaagcggcactggataagctgcgtaacaagcactcgcaaaccactgcattactgcacaaactggagcaactgcgtgatcgcatcgttgccgaaggggatagcgcgattgaagtggcgatggagcaatacccagaagcggatcgtcaacgtctgcgtctgttagcgcgtcaagccagcaaagaaaaagcgggcaacaagccgccaaaatcgtctcgcgagatcttccaactgctgaaagaagcgatgttggcaaaacaagagatcgaagaagagagtgaagacgatctggattcagcggaataa

SEQ ID NO: 41317 - DNA, 993 bp, Vibrio cholerae
ttgaaatttcaactgactgcggttgcgttagcaaccctatgtgttgcctctgcagcgtctgctgcaccaaccctcaccgtttacacttacgactcttttgccgccgaatggggccccgctccagcgattgaaaaagcgtttgaagcacaatgtggctgcgatctgcaatttgtcgctttggatgatggcgtgtcgattcttaaccgtctgcgtttggaaggcagcaacagcaaagccgatgtggtgctggggctggataacaaccttatcgaagaagccaaacagaccggattattggcaacccacagtgtggataccagcaaggtgactctgcccaatggctggagtgacaacacgtttgtgccttacgactatggctatttcgctttcgtctataacaaagagaagctggctaacccgccaaccagcttgaaagagctggtggaaaaacgtgatgatctgaaagtgatctaccaagacccgcgcacttcaacgccgggacagggtttactgctgtggatgaaatctgtctatggcgaccaagcgccacaagcgtggaagcagctggcgagcaaaacggtcaccgtgaccaaaggttggtcagaagcttactcgatgtttctcggtggagaggcggatctggtgctctcttacaccacatcgccggcctatcatttgattgcagaaaatgatgcacgttttgccacagcgaatttcagcgaggggcattacctgcaagtggaagtggccgccaaagtcaaaagcactaaaaatggcgagctggcggacaagttcctgcaatttatcctgagtaatgagttccaaagcgtgatcccaacgggtaactggatgtatccagtgacggcggttgaactgccaaaagggtttgatactttggcggtaccgacacaatctctttctttcagcgcacaggaagtcgcgcaaatgcgtaagccatggattcgtgagtggcagcaagcgctgagcttctaa

SEQ ID NO: 41318 - DNA, 3765 bp, Vibrio cholerae
atgatcaaacgggcgttaaagtggaccaaatggctctctatgtcgctgttggtgttagtgatcttgctggtgctggctttggcgggggcgctgtttaccaaccccggtttgcatgtggttttgtggggcgcgcagcaagcattgccgcagttgaaagtggagcaagcgcagggcgcactgtttccgcgttttactttgcaaggggtcaattatgcggatagtgagcttaatctgagcttttctgtgcaaaagctaagcttggcgattaaccccaactgcttattggaacccagtatctgtatcaatgagctggcgctatctggagtcaagttagatctcccctcattagcagagagtgaaccggcacctgatgagcccgattctgagccgctgggagacatttccacgcccatcccgattcgcttaggtcagttagcgctacaagatattgaattaaatattctgggtaaccgagtggcgtggcagcaattgaccacgcgagcgtcttggcaaggcaatcgcctgcgtatcgggcaaaccgagtggcaggggatccgtcttgcgttagcggagagtgaagcctcaaccgaacctgaggcggctcaagcggccacctctgatagcgcagaacctttgcaactaccagacgtgatgatcccgctgcacattgagttagcgcgtttcgatattcgtgattttcgtttagaacaagagacgccgatcatcgtcaatcatctagctttgcaagcgactgccgcgcagcacgacgtctctatctctagtcttgagctgagcatgccggagctggatgcgcaattgaacgcacaagcgacgctcagtcaagattatcccattcagttagaactgcgcagtcaagtgcatcttgctgattttaaaggccaaaccttatcactggccgcgcagggcagtcttgcggatctcactgtacaagccaatctagactcgttagctcaagcacagttgaacagccactttaatctgctggatgccgatataccgtttgatctgcaactgagtcaggtgaaagcgcagtggcccatgttgggggaaggggattatcacgttgaggttccggagttaagcattcagggctccttggccaagtatcagttcgccttgcagggtgcgctacagggcaaagatttaccgaatgtgagtttagccctgcaagggcatggcaatctggatgaagtcgcgttgcaatcacttaaagtcgatacgcttggcggcttagtgacgggcaatgctgtggcaaattggaaaaatccgctcaattgggccgctcggttaaacctgaaaaatattcagcccggtctgcaatggcctgaagcagaaggcaagatcagtggtgagcttgatacctctggcgctttgactgagcaaggtggctggcaagtggaggtttcacgcttagccattaaaggggtattacgtgattatccgcttaaaatgttaggcgaactcagcgcctccgatgtccaaggacagggggatatcacgttacaaactaagggagtctccttagtgcatgggccgaactccctcaccgctaaaggccagttgagtaagcagtggcggatgtcggtggagttggatgtaccggatttgagtaaatccctacccgatgcaaaaggcaaagtgattggcgatgtgctgctgcgaggtgatctcaaacagccacgggtcaaattggtgctggatgccgatagcttgcaatggcaagagttaggctcgattgggcatgtcactttgcaaggaaatctcgtgccactgcctgagcctcaaggcgagctcaccttacaagtgcgcgctattcagtaccaagatcaacgaattgatactgttgatttaaaagcacaaggctctcagagaaaacacgaggtgacactcgatgtcacctctgatctcgcttcgaccagcttggcgatgaatggccgattgcgtactgaacccacactgcgctggcaaggtgagctggagcgcatgtggttaaattcaccgcaagggcaatggttattacaacaggcgaccgctctctcctttgatcagcgaacggagcgcgttaccgtcgccgctcactgttgggtgcaaggggaggcttcgctctgtttagaagaagaggccgagttaggggcgcggggtgagacgcgcttagcgattaagcagtttgattttaagcagctcgccggtgtcctgcctaaggaaaccaaactcagtggcggcttgaatggccaagtgtgggctaagtgggctccgaaagcggcgccgcagttgcaagccaatcttgagttaacccaaggtcaggtgacgcaaaagctgaataaaagcgtgacgtttggttgggataaagcgcaattttctgcccaattggcgaaaaatcagctgcaagccagttggttattagatgcaaccgataatggtgatctctcgggcaatatccaaattgccgatgtgcgtgcggagcagaaaaccatgctcggttcacttaacttaaccacgtttaatctggatttcttgcaaccgttgattggtgaacttagtgaagcgaaatccaatattaatgccgatgtacaatttcatggcccgatgctgcatccgcaattgaacggtgaaattgcgatcaatgatattcgcgtaaaaggtgagatctcgccggttgatgtgcaatccggtcaagtgtcacttaaatttaatggttatcaggcagtgttaaatgctgatatccagaccaccgatggtttgctcgaagtcgatggtgatgccgattggcaacagatagaggattggcgactcaaagcgcgagtgcatgctccctcaatgatggttgagctgccacctatggtgagagtcaaggtgatccctgatttaaccttgaccatgcaacctcaactggcacgcgtgacgggtaatatagcgctgccgtgggggcggattgtggtcgaagagttaccgccgagcgcgattggggtatcgaaagatcaaattttgctgaatgcggattttgagccactgactgacaaagagcggatcccgtttagtgtggagagtgacgtcaatgtgcaaattggcgacgatttccaactcagtgcttttggtctacaaggtaacttagtcggacgtctcaatgtggcgcaaaaggataaagggccgtttattttgggtgaggtgaacattcgcaatggtcaataccgctcatttggacaagatctgcagatcaaagaagggaagatcttgatgaatggcccggtggatcagccgtatttggcgatcactgcgatccgtaatcccaacaacacgcaagatggcgtggttgctggggtgcgagtcagtggaccctcggatgagccgtcactcaccatcttctctgaacctgcaatgccacaagccaatgcgctgtcgtatttgttgcgtggacaaaatattgatggggaagcagggggcaacgccatgaccaccaccttgattggtctgagtttagcgcagagtggtaaactggttggcgagataggccaagcgtttggtgtgcaggatctgcaactggatacggcaggttctggagacgattcacaggtcacggtcagtggttatattctgcccggcttgcaagtgaaatatggtgtaggtatttttaactcagtcggcgaatttactgtgcgttatcgcttgatgcaggatctgtatttggaggccgtctccggtgtcgacagcgccgtagatctgctctatcagttcgaatttaactaa

SEQ ID NO: 41319 - DNA, 648 bp, Vibrio cholerae
atgagtaagcaagcagatagcctgggctttgagcaagatgccaagccagagaatgtggtgtggcatcgtcatgcggtggataaagcgcaacgtgcgacactgaaacagcagcgccctgcggtactctggtttaccggtttatcgggtgcgggcaaatcgaccgtggcaggggcgcttgagaaccgtttagcggcgcttgggtatcacacttatctgctggatggtgataacgtacgccacggtttgtgtagcgatctcggcttttctgaacaggataggcgggaaaacattcgccgcattggtgagcttgccaagctgatgtcggatgcgggtttgattgtgctgaccgcgtttatttcaccccatcgcgctgagcgacaaatggtgcgtgacttgttgccaaatggcgagtttctagaggtgtacgtcaacacatcactcgatgtgtgcgaagcgcgtgacccgaaaggcttgtacaaaaaggcgcgcgccggagaaattcgccaatttactgggattgattccgcctatgaagcgccgctcaatccggatatcgatttaccggcgggtgaaaaaagcgtggatgagttggtggcgcagtgcctacaggcgttagcagagcgtcatatcattcaacgttgggtataa

SEQ ID NO: 41320 - DNA, 900 bp, Vibrio cholerae
atgcctgcaacagaccaattaaggatcaagattatggcgcaggatgcggtaactccccttcgtaaaacccctcgcttagccgttgtagaaggctcaggttatgtgcgtgccgcgcgtagccaactgcaagcaggagaagtggcgctggtgggcgcaggccctggtgatcctgagctactcacagtcaaagcactcagttatctccaacaagcggatgtggtgctctacgactacttagtgtccgatgaaatcatggcgcttatcccaagtgagacgattttagtctgtgtggggaaacgcgcaggccatcacagtgtgccgcaggagaaaaccaatcaactcttggtcgattttgcccgtcaaggttatcgcgtggtgcgcatcaaaggcggcgacccttttatgtttggccgcggtggtgaagagttagaagtgctgtttgaagctggcgtgaaatttcaggttgtccccggcatcaccgcagccgctggtgcaacggcgtatgccggcattccgctcactcatcgtgattacgcccaatcggcgctgtttgtcaccggccatttgaaagcgcaagccgaggatctggattggtcaacgctggcgcgtggtaagcaaactttagtgatttacatgggcttgagcaacgctgcggcaatcgctgaacagctccagttgcatggccgtcaagcgagcacgcccgtggcaatcattgaacgtggtactcaagtcaatcaacaggtgctgattggcacattgcaaactttgcccagtttagccagccaagcgcaatctccggcgctgattgtggtgggtgaagtggtcgcgcttgccgccaagctgcactggtttggcgaacaaggcgcaacacagcagcttgatgcagcgcagtcagcgtaa

SEQ ID NO: 41321 - DNA, 1383 bp, Vibrio cholerae
ttgaacgccaactcttttgctgctttgaatctgaagcctgaacttcttgctaaccttgaaaccatggggtttgccactatgactccgattcaggcgcaatctcttcctgcgatccttaaaggtcaggatgtgattggccaaggcaaaacaggctccggtaaaaccgctgcgtttggtcttggggtactctccaacctcaatgtgaagcgctttcgtgtacaagccttggtgctgtgtccaacacgtgagttggccgatcaagtcgcgaccgatattcgtacgctagggcgtgctatccacaatatcaaagtgttgacgctgtgtggcggcatgccgatggggccgcagatcggatcccttgagcatggcgcgcatatcttggtcggaacgccgggacggattttggatcatttgagtaaagaccgtatcgatctcagtgagctcaataccttggtgttggatgaagcggatcgcatgctcgaaatgggcttccaagaagcgctggaggcgatcattgctgctgcgccagccgagcgtcaaaccttgctgtttagtgcaacttaccccgctagtattgagcagattgcgcaaagcgtgactcgcaatgcgctgatgattaaagttgaggcgacccacgatacttcaagcattcgtcaatacttctataaagtagaaggcagtgctgcgcgtgatgaggctctggaaacgttgcttttacaccatcaaccgacttcttcggtggtgttctgtaacactaaacgtgaagtacaaaatgttgccgatgccctgcatcaaagcggctttagcgtgattgaactgcatggtgatatggagcagcgtgagcgtgaccaagccttagtgcaatttgccaataagagtatttctattctggtcgcgaccgatgttgcggctcgtggtctggatgtcgataaccttgatgcagtgtttaactacgatctgtctcgcgatcctgaagtgcatgtacatcgcatcgggcgtactggtcgtgcgggaagtaaaggcttagcgtttagcttctttagtgacaacgagagctaccgtgtggcgcaaattgatgagtacatggatattgcgattgagccttcaaccttgccgcaacctgctgcaggcgctcgtccttacgcggcgaatatggtcaccattcagattgacggtggtaagaaagacaaggtgcgtcccggtgatattcttggcgcgctaaccagtgatggtgaactgactgcggagcatatcggcaagattaacctgttcccgatgcgtgcttatgtagccgtgcacaagaaaatcgccaccaaagcactgaataaaattgccaacggtaagatgaagggacgccagttccgtgctcgcttactcaaataa

SEQ ID NO: 41322 - DNA, 483 bp, Vibrio cholerae
gtgatcatgcactatcgttttactgccttacttatttcgacgctcgccagcacatccgctctggctttccctgacctcaaatctttaggttcaaacgacctcgctggattagttggtgaaaccctctcccaatccaaagcaacccaagagttattgactcaatttaccagtcaatttcctctttcaccgcaacaagcgggaggtggcgtagcgaccctgcttgcacaggctcaaaacaacctaaatgccgatcaaaaaagcgagttgctccaattaatcccaaaccttaatgatttgaatggtcttatcccaaatcaaaacctcagcacaattttgcaacgcaaagaagtgaaccaagcctttaatacattaggactggatgccagcatggttgaacagttcgtgcctgttttgatgcaatacctgactcagcaaggtgcgagtcaagacctattggcgtcattaggtaagctatggcagtaa

SEQ ID NO: 41323 - DNA, 387 bp, Vibrio cholerae
atgcgccatcgtaagagtggtcgtcaactcaaccgcaacagcagtcatcgcaaagcgatgttcagcaacatggctagctctctagtacgtcatgaagttatcaagactactttgccaaaagcgaaagagctgcgtcgcgtcgttgagcctttgattacactagctaagactgacagtgttgctaaccgtcgtctagcatttgctcgcactcgtgataacgaagtggtagcaaaactgtttaacgaactaggtccacgtttcgctgcacgtcaaggcggctacactcgtattctgaagtgtggtttccgtgcaggtgacaaagctccaatggcatacattgagctggttgatcgcccagaagctgctgttgaagctgctgctgagtaa

SEQ ID NO: 41324 - DNA, 993 bp, Vibrio cholerae
atgcagggttctgtaacagaatttcttaagccacgtcttgttgatatcgaacaaatcagcacgacacacgcaaaagtaactcttgagccgttagagcgtggtttcggccatactctgggtaatgcacttcgccgtattcttctatcttcaatgccaggttgtgctgtgactgaagtagagattgaaggcgttcttcacgagtacagcaccaaagaaggtgttcaggaagatatccttgagattctcttgaacctgaaaggtctggctgttcgcgttgccgaaggcaaagatgaagtgttcattacactgaacaaatcaggctcgggccctgtggttgcaggtgacatcacccatgacggtgatgtagagatcgtaaaccctgaacacgttatttgtcatttaacttctgacaatgctgcgatcgctatgcgtatcaaagtagaacgtggtcgtggttatgttccagcttctgcccgtatccatactgaagaagatgagcgtccaattggtcgtttgcttgttgacgcgactttcagcccagtagacaaaattgcctactctgttgaagcagctcgtgttgaacagcgtactgacttggacaagcttgttatcgatatggaaactaacggtactcttgagcctgaggaagcaatccgtcgcgcagcaacaattcttgctgagcaattggatgcgttcgtagatcttcgtgatgtacgtgtacctgaggagaaggaagagaagccagaattcgatccgatcctactgcgtcctgtagacgatcttgaactaacagttcgctctgctaactgtctgaaagcagaagcgattcactacatcggtgatctggtacagcgcactgaggttgagcttcttaaaacgccaaacctcggtaagaagtctcttacagagattaaagacgtgcttgcatcacgtggtctgtctctgggcatgcgtctagaaaactggccaccagcgtcaatcgctgaagattaa

SEQ ID NO: 41325 - DNA, 621 bp, Vibrio cholerae
atggcaagatatttgggtcctaagctgaagcttagccgccgcgaaggtactgacttgttccttaagtcaggcgttcgtgcgattgataccaagtgtaaaattgataacgcaccaggcgtacacggcgctcgtcgcggtcgtctgtctgagtatggcgttcagcttcgtgagaagcaaaaagttcgtcgtatttatggcgttttagaaaaacaattccgtaactactacaaagaagctgctcgcctgaaaggcaacacaggtgaaaacctgcttcagcttctggaaggtcgtctggataacgtagtttaccgtatgggttttggtgcaactcgcgctgaagcacgtcagctggttagccacaaagctatcctagtaaacggtaaagtagtaaacgttccttctttcaatgttgcggcaaacgacgttgttgcagttcgtgagaaagcgaaaaagcaatctcgcatcaaagcggctctagaagttgctgaacaacgcgaaaaaccaacttggattgaagtcgatgtaaacacgatggaaggtactttcaagcgtatgcctgagcgttccgatctgtctgctgacatcaacgaacaattgatcgtcgagctttactctaagtaa

SEQ ID NO: 41326 - DNA, 390 bp, Vibrio cholerae
atggctaaacaaccaactcgcgcacgtaagcgtgtacgcaagcaagttgctgatggcgtagcgcatatccacgcatctttcaacaacacaatcgtaaccattacggaccgtcaaggtaatgctcttgcttgggcaactgctggtggttctggtttccgcggttctcgtaagtctactccgttcgctgcacaggttgctgctgagcgttgtgctgaaatggctaaagaatacggcctaaagaacctagaggttatggttaagggtcctggtccaggtcgtgaatctactgttcgcgctctgaatgcagctggtttccgtatcacgaacatcgttgatgctacaccaatccctcataacggttgtcgtccaccgaagaaacgtcgcgtttaa

SEQ ID NO: 41327 - DNA, 357 bp, Vibrio cholerae
gtggcccgtatagcaggcattaacattcctgatcataaacacgctgtaatcgctctaactgcgatctacggtatcggcaaaactcgttcaaaagctattctagctgacctgggtattgctgagagtgttaagatcagtgaactaactgaagagcagatcgatcaactgcgtgatggtgtagctaagtacactgtagagggtgatctacgtcgtgaagtttccatgaacatcaagcgcctaatggatcttggttgttaccgtggtcttcgtcatcgtcgcagtctaccactacgtggacagcgtactaaaaccaacgctcgcacccgtaagggtccgcgtaagccgatcaagaaataa

SEQ ID NO: 41328 - DNA, 114 bp, Vibrio cholerae
atgaaagttcgtgcttccgttaaaaaaatctgccgtaactgtaaagttatcaagcgtaacggtgtcgttcgcgtgatttgcagtgagccaaagcacaagcagcgccaaggctaa

SEQ ID NO: 41329 - DNA, 1335 bp, Vibrio cholerae
atggctagaaaaccaggacaagattttcgtagtgctcagagcggcttaagtgaactgaagtcgcgcttattcttcgtaattggtgcacttttagtattccgagccggctcttttgtgccgattcctggtattgacgctgctgtacttgccgaattgttcgaacagcaaaaaggtaccatcgtagaaatgtttaacatgttctccggtggtgctcttgagcgtgcatctattttagcactgggcatcatgccgtatatttcggcgtcaattgttgtccagttgctaacagtagttcatccagcgttagcggaactcaagaaagagggtgaagcaggccgtcgtaagataagccaatatacgcgctacggcacgcttgtacttgcaacattccaagcgattggtattgcaacaggcttaccaaacatggtcaacaatctggtcgttatcgaccaaaccatgtttaccctgattgcgaccgtgagtttagtaaccggtaccatgttcttaatgtggttaggtgaacaaattacagagcgtggaattggaaacggtatttcgatactgattttcgcaggtattgttgctggattgcctaaagcaatcggtcaaacaatcgagcaagcgcgtcaaggtgaactgcatgtacttcttctgctgttaatcgcagtgttagcttttgctgtgatttacttcgttgttttcatggagcgtggtcaacgtcgtatcgttgtgaactacgcaaagcgtcaacaaggtcgtaaagtgttcgcagcacaaagcactcacttgccgttgaaaatcaacatggctggtgtaattcctgcgatttttgcgtcaagcattatcctgttcccaggaacattggcgcagtggtttggtcagaacggcgaaagcagcacattcggttggctaactgatgtgtctttagctttgagcccaggccagcctctgtatgtaatgctttatgcagcggcgattatcttcttctgtttcttctataccgcgttggtgtttaacccgcgtgaaacggcagataacttgaagaagtctggtgcattcgtacccggtatccgcccaggtgagcagacagcgaaatacatcgataaagtaatgacacgtttaacccttgcaggtgcactgtatattacttttatctgtctgatccctgagttcatgatggtcgcttggaacgtacgtttctactttggcggcacatcactactgattgtagttgtcgtgatcatggactttatggcacaggtacagacccatttgatgtctcatcaatatgagtctgtgttgaaaaaagcaaatctgaaaggctacggccgttaa

SEQ ID NO: 41330 - DNA, 435 bp, Vibrio cholerae
atgttattgaatactctatcaccggctgcgggttctaaacatgctcctaagcgtttaggtcgtggtgtcggttcaggccttggtaaaacaggtggccgtggtcacaaaggtcaaaagtcacgttctggcggcaaagtacgtccaggttttgaaggcggtcaaatgcctctgaaacaacgtctaccaaaattcggcttcacttctcgtaagagctttgtgtctgctgaagttcgtctgtctgaactggcgaaagtaactggtgacgtagttgatctgaacgctctgaaagcggcaaaccttgttactaaaaacatcgagtttgcaaaaatcgttctttctggcgagatcaacaaagcagtgactgtaaaaggtctgcgcgtgactaaaggcgctaaagctgcaatcgaagctgcaggcggtaaaatcgaggaataa

SEQ ID NO: 41331 - DNA, 177 bp, Vibrio cholerae
atggcaactattaaagtaactcaaactaaaagctcaattggtcgcctgccaaagcataaagctacactgcgcggtttaggccttcgtaaaatcaaccacacagtagaacttgaagatacgccatgtgttcgtggcatgatcaacaaggtttactacatggttaaagttgaggagtaa

SEQ ID NO: 41332 - DNA, 504 bp, Vibrio cholerae
atggctaaagaacaacaagttcaagcgaatgatttgcaagaaaaattaatcgcagttaaccgtgtttctaaaacggttaaaggtggtcgaatcatgagctttactgcactgactgtagttggtgacggtaacggtcgtgtaggtttcggttacggcaaagcccgtgaagtacctgctgcgattcaaaaagcaatggaaaaagcacgtcgtagcatggttacgatcgcgctgaacgaaggtactcttcaccacccagtgaaaggtcgccattcgggctctaaagtttacatgcagcctgctgcagaaggtactggtgtaatcgcaggtggtgcgatgcgtgcagtacttgaagttgctggtgtacacaacgttttgtctaaagcgtacggttctactaacccaatcaacatcgttcgtgcaacgattgatgcgctagtagacgttaagtcaccagaaatggttgctgctaaacgtggtctaactgttgaagcgatttcggagtaa

SEQ ID NO: 41333 - DNA, 354 bp, Vibrio cholerae
atggataagaaagcatctcgcatccgtcgtgctacacgtgcacgtcgtaagattgcagaactgggtgcaactcgcctagtagtacaccgtactcctcgtcatgtgtacgcacaagtgattgcagctaatggctctgaggttatcgccgccgcttctactgtagaaaaagcgatccgtgagcaagtgaaatacaccggtaacatcgatgcagcgaaagcagtgggtaaagctgttgcagagcgcgcacttgaaaaaggcgtaactgtagttgcgtttgatcgttctggtttccaataccacggtcgagtagcagcgctagcagattctgctcgcgaagctggtctgaaattctaa

SEQ ID NO: 41334 - DNA, 534 bp, Vibrio cholerae
atgtctcgtgttgctaaagcacctgtcgctattccagctggcgtagaggtgaaactgaacggccaagagatcactatcaaaggtgctaaaggcgaattaactcgcgttttccacaatggtgtagtgatcgcacaagaagacaaccaactgacttttggtccacgtgaaggcgtagccaatgcatgggcacaagcaggtactgcacgtgctcttgttaagaatatggttgttggtgttactgaaggctttactaagaaactcgttctgaagggtgttggttaccgtgctgctatgaaaggcaacgctgtaggcctgactctgggtttctctcaccctgttgagcacgagctgccagcgggtgttaaagcagaatgtccaagccaaactgaaattgtcctaactggttgcgacaagcaagtagttggtcaagttgcggctgacattcgttcttaccgcgcgcctgagccttacaaaggcaaaggtattcgttacgcagatgaaaatgtgcgtagtaaagaagctaagaagaagtaa

SEQ ID NO: 41335 - DNA, 393 bp, Vibrio cholerae
atgagcatgcaagatccgatttcggatatgctgacccgcattcgtaacggtcaggcagcaaacaaagttgctgtaaaaatgccttcttcaaagctgaaagttgcaattgctgcacttctgaaagcagaaggttatatcgctgatttcgctgttgaaggcgaagtgaaagcagagctggaaatcactcttaagtatttccaagcaaaaccagtaatcgagcaaatcaaacgcgtttctcgtccaggtcttcgtgtttacaagaagaaagacgagctgccatctgtaatgggtggtctaggcgttgctgtcgtttccacttccaagggtctgatgtcagaccgcgctgctcgtaaagcaggtcttggcggtgaaatcatttgctacgtagcataa

SEQ ID NO: 41336 - DNA, 306 bp, Vibrio cholerae
atggctaaacaatcaatgaaagcacgtgaagaaaaacgtgcgaagctggtagctcagttcgctgaaaagcgtgcaactctgaaagctatcatcagcgatgtaaacgcatctgaagaagatcgttggaacgcggttcttaaactgcaatctcttccacgtgattcaagtcgttctcgtcagcgtaaccgttgcaaccaaactggtcgcccacacggtttcctacgtaagttcggtctaagccgtattaaagttcgtgaagcttgcatgaaaggcgagattccaggacttcgtaaggctagctggtaa

SEQ ID NO: 41337 - DNA, 540 bp, Vibrio cholerae
atggcgaaactgcatgattactacaagtcgtctgtagtcgctgagctgaccaaacagttcagttacacaagcgtcatgcaagtccctagaattgagaaaatcaccctcaatatgggcgttggtgaagcaatcaacgataagaaactacttgaaaatgcagcgtctgatatggcgatcatctctggccaaaagccactgatcactaaagcgcgcaaatctgtagctggtttcaaaattcgtgaaggctacccaattggttgtaaagtaaccttgcgtggcgagcgcatgtgggatttcttggagcgtttgatttctatcgctctaccacgtgtacgtgacttccgcggtgttaacggcaagtcttttgacggtcgcggtaactacagcatgggcgttcgcgagcaaatcatctttccggaaatcgactacgataaagtcgatcgtgtacgcggtcttgatatcactatcacgactaccgctggtaccgatgaggaaggccgtgctctgctggctgcctttaacttcccattccgtaagtaa

SEQ ID NO: 41338 - DNA, 318 bp, Vibrio cholerae
atggcagctaaaatccgtcaaaatgacgaagtaatcgttcttgctgggaaagacaaaggcaagaaaggtaaagtaactaaggttctggcaactggtaaagttatcgttgaaggtatcaatctagttaagaaacaccagaaacctgttcctgcgatgggtgtccaaggtggcatcgttgagcaagaagcagcgatcgacgtttctaacattgcgattttcaacgcaaaaactggtaaagcagaccgcatcggtttccgtttcgaagatggtaagaaagttcgtttctttaaatctaacaacgaaatcgtttctaactaa

SEQ ID NO: 41339 - DNA, 372 bp, Vibrio cholerae
atgatccaaatgcaaactatgctggatgcagctgataactcaggcgctcgcagcgtaatgtgtattaaggttctgggtggctctcaccgtcgttacgcccacgttggcgacatcatcaaagttaccgttaaggaagcaattcctcgcggtaaagtaaagaaaggtgatgtattaaaggcggtggtagttcgcacccgtaaaggcgtacgtcgtccagacggttctgtcattcgcttcgaccgtaatgcttgcgttctgttgaacaacaacagtgagcaacctatcggtacacgtatctttggtccagtgactcgtgaacttcgtaatgcgaaattcatgaagattgtatcactggctccagaagttctgtaa

SEQ ID NO: 41340 - DNA, 255 bp, Vibrio cholerae
atgagcgacaaaattcgtactcaactaggtcgtgttgttagcgacaagatggacaagtctatcgttgttgctatcgagcgcatggtgaagcaccctatctacggtaaattcgttaagcgcacgactaaagtacacgcacatgacgaaaacaacgagtgtggcattggcgacactgttgaaattcgtgaatgtcgtccactgtctaagactaagtcttggactctggtgaaaattgtagaaaaagcgaagatgtaa

SEQ ID NO: 41341 - DNA, 192 bp, Vibrio cholerae
atgaaagcacaagatctacgcgaaaaaagcgttgaagagctgaactctgagctactgaatttgctgaaagagcagttcaacttgcgcatgcaagctgcaactggtcaactgcagcagactcatactctgaaagctgtacgccgtgatatcgcacgtgtgaaaactgttttgactgagaaggcaggcgcataa

SEQ ID NO: 41342 - DNA, 411 bp, Vibrio cholerae
atgctacaacctaaacgtactaagttccgtaaggttcagactggtcgtaaccgtggtctagcgaaaggtacagaagtaagcttcggtacttttggtcttaaagctgtaggccgtggtcgtctgactgctcgtcaaatcgaagcggcacgtcgtgctatgacgcgtcatatcaagcgtcaaggtaaaatctggatccgtgtgttcccagacaagccaatcactgaaaaaccactagaagttcgtcaaggtaagggtaaaggtaacgttgagtactgggtagcccaaatccaacctggtaaggttatgtacgaagttgatggtgtacctgaagaattggcacgtgaagcgttccgcctagcggctcgcaaactgccattcaagactacattcgtaactaagcaggtgatgtga

SEQ ID NO: 41343 - DNA, 702 bp, Vibrio cholerae
atgggtcagaaagtacatccaaatggtattcgtctaggcatcgttaagccttggaatgctacatggtttgctaacaccaaagatttcgctgacaacctagacggcgacttcaaggtacgtcaatacctgtctaaggaattggcaaacgcgtctctgtcacgcatcgttatcgaacgtcctgcgaaaagcatccgtgtgactattcacactgctcgtccaggtgttgttatcggtaagaaaggcgaagacgttgaaaaactgcgtgcagcagtagcaaaaattgctggcgtaccagcgcaaatcaacatcgctgaagtacgtaagcctgagctggatggtcagcttgtggctgatagcatcgcgtctcaactagagcgtcgcgtaatgttccgtcgtgctatgaagcgcgcagtacaaaacgcaatgcgcctaggcgctaaaggtatcaaagtggaagtaagcggtcgtttaggcggcgctgaaatcgctcgttcagagtggtatcgtgaaggtcgcgtacctctacacactctgcgtgctgacattgattacgcaacttcttcggctcacaccacctacggtgtaatcggcgttaaagtctggatcttcaaaggtgagatcctaggcggtatgccagcagcaactgaagctgcagagccaaaggctgacaagccgaagaagcagcgtaaaggccgtaagtaa

SEQ ID NO: 41344 - DNA, 333 bp, Vibrio cholerae
atggaagctatcgctaaacataactttgctcgtatttctcctcagaaagctcgcttagttgcagaccaaatccgcggtaaatctgtggatcaagcgctagaacttctgactttcagcaacaaaaaagcggctgaactggttaagaaagttctggaatctgcaatcgcgaacgcagagcacaacgaaggtgcagacatcgacgatctacgtgtcgctaaaatcttcgtagatgagggcccagtcatgaagcgtattatgcctcgtgctaaaggccgtgcggatcgtatcttgaagcgttcaagccacattactgtggttgtcgcagatcgctaa

SEQ ID NO: 41345 - DNA, 279 bp, Vibrio cholerae
atgccacgttctctcaagaaaggtccatttattgacctacacttgctgaagaaggtagagaaagcggtggaaagcggagacaaaaagcctattaagacttggtcccgtcgttcaatgatcattccaacaatgatcggtttgaccatcgctgtccataatggtcgtcaacacgttccagttttcgtaactgacgagatgatcggtcacaaattgggcgaatttgcacctactcgtacttaccgcggtcacgctgcggataagaaagctaagaagaaataa

SEQ ID NO: 41346 - DNA, 825 bp, Vibrio cholerae
atggctattgttaaatgtaagccgacttcggctggtcgtcgtcacgttgttaaagttgttaacgctgacctgcacaagggtaagccatacgcacctcttctagagaaaaactctaagaacggtggtcgtaacaacaacggtcgtatcacagtacgtcacatcggtggtggccacaagcaacactaccgtttggttgacttcaaacgtactaaagacggtatcccagcgaaagttgagcgtctagaatacgatccaaaccgtagcgcaaacatcgctctagttctgtacgcagacggtgagcgtcgttacatcattgcaccgaaaggtctgcaagcgggtgacgttatccaatctggcccagatgcgccgatcaaagcgggtaacgcaatgccaatgcgcaacatcccagttggttcaacaatccacaacgttgaattgactccaggaaaaggcgctcagctggctcgttctgctggtgcttacgcgcaacttgttgctcgtgatggtgcatacgtgactctacgtctacgttctggcgaaatgcgtaaagtactgtctgaaggccgtgcaactatcggtgaagtaggcaacgctgagcacatgctgcgtgaactaggtaaagctggtgcagcacgctggcgcggtgttcgtccaaccgttcgcggtgtggtaatgaacccggttgaccacccacacggtggtggtgaaggccgtacttctggtggtcgtcacccagtatctccttggggcgttccaaccaaaggctacaagacacgtagtaacaaacgcactgacaagtacatcgtacgtcgtcgtaataagtaa

SEQ ID NO: 41347 - DNA, 303 bp, Vibrio cholerae
atgatccgtgaagagcgtctactaaaagttctacgtgctccgcacatctctgaaaaagcaactatgtctgctgagaaatcgaacactatcgttttcaaagtagcaaaagatgccactaagaaagagatcaaagcagctgtagaaaagctatttgaagttgaagttaagtctgtaaataccctgatcatcaagggtaagaccaagcgtcaaggtctgcgccaaggccgtcgttcagacgtgaaaaaagcgtacgtgactttgaatgaaggtcaagatcttgacttcgttggcggcgcggaataa

SEQ ID NO: 41348 - DNA, 603 bp, Vibrio cholerae
atggaattgatggttaaaggtgctaacgcactaactgtttccgaaactactttcggacgtgagttcaacgaagctcttgtacaccaagtagttgttgcttatgcagcaggtgctcgtcaaggtactcgtgctcaaaagacacgttcagaagtttctggcggtggcgctaagccatggcgtcaaaaaggtactggccgtgcacgtgctggtacaatccgtagcccaatctggcgtacaggtggtgttacttttgctgcgaaaccacaagatcacagccaaaaagtaaacaagaaaatgtaccgtggtgctatgaagagcattctgtctgagctagttcgtcaagagcgtttgatcgttgttgaaaacttctcagttgaagctccaaagaccaaagctctggtagctaagctaaaagaacttgagctgaacgatgttctcatcgttactggcgaagtagacgaaaatctgttcttagctgcgcgtaacctgtacaaagttgacgtgcgtgacgtaactggtatcgacccagtaagcctgatcgcatttgacaaggttctaatgactgctgctgcagttaagcaagttgaggagatgctggcatga

SEQ ID NO: 41349 - DNA, 630 bp, Vibrio cholerae
atgattggtctaatcggtcgtaaagtgggcatgacccgcgtatttactgaagacggcgtttctatcccagtaactgttgttgaagttgaagcaaaccgcgtttctcaagtgaaaactcttgaaactgatggctacgctgcaatccaagtcactactggttctaagaaagctaaccgtgttactaagccagaagctggtcacttcgcgaaagcgggtgtagaagctggtcgcggtctttgggaattccgtttggaaaacggtgaagagtttgcagtaggttctgaactgactgttgaactgttcaacgaagtaaaaaaagtagacgttactggtacatctaagggtaaaggtttccaaggtgctgttaagcgctggaacttccgcactcaagatatgactcacggtaactcattgtctcaccgtgctcctggttcaattggccaatgtcaaactccaggtcgcgtgttcaaaggcaaaaaaatggcaggtcacatgggtgctgagcgtgtaacgactcaaaacctagagatcgtacgtgttgacgctgagcgcaatctgcttctgattaaaggtgcagtcccaggcgcaactggcggtaacgtgatcgtcaaaccagctgttaaagcgtaa

SEQ ID NO: 41350 - DNA, 312 bp, Vibrio cholerae
atgcagaaccaacgtatccgtatccgcctgaaagctttcgattacaaactgatcgatgcttctacagcggaaatcgttgaaacagctaagcgcactggcgcacaggttcgtggtccaatcccactgccaactcgtaaagagcgtttcactgttcttatctctccacacgttaacaaagatgctcgtgatcagtacgaaatccgtactcacaaacgtctaatcgacatcgttgaaccaacagacaaaactgttgatgctctgatgcgtctagaccttgctgcgggcgttgacgtacaaattagcctaggttaa

SEQ ID NO: 41351 - DNA, 1299 bp, Vibrio cholerae
atgggtaataacgttgtcgttcttggcacccaatggggtgacgaaggtaaaggtaaaatcgtagaccttttaactgaagatgcaaaatacgtggttcgctaccaaggcggacacaacgcaggtcacacactagtaatcgacggtcaaaaaaccgttctccacttaattccatccggtattcttcgcaataacgtgaaatgcatcatcggtaacggtgtagtactttcaccagaagcattgatcaaagaaatgtctggtctcgaagatcgtggtgttcctgttcgcgagcgtcttttcatttctgaagcttgtcctctgatcctgccataccacgttgctcttgaccaagcgcgcgaagccgctcgtggcaagaaagcaatcggtactactggtcgtggtattggtcctgcatacgaagataaagtagctcgtcgtggtctgcgtgttggcgacctattcgatatggcttcttttgctgagaaactgcaagaagtgatggcattccataacttccaacttgagcacttctacaaagtagaaccagtaagctacgaagcggtactggagcaggcgaagggttatgcagaactgctgacttctatggttatcgacgtaaccaacgaactggatgcagcgcgtaagcgtggcgataaaatcatgttcgaaggcgcgcaaggtacactactggatatcgaccacggtacttacccatacgtaacgtcttcaaacaccactgctggtggtgttgctgcgggctctggttttggtcctcgtcacctaggttacatccttggtatcgcgaaagcgtactgcactcgtgttggtgccggtccgttcccaacagaattgtttgacgaagtgggcgatcacttaggcactaaaggccatgagtttggtgcaaccacaggtcgtaagcgtcgttgtggttggtttgatgcagtggcaatgcgtcgcgcgatccaaatcaactcagtaaccggcttctgcctgaccaaactggacgttctagatggtctgaaagagatcaagatctgtacgggttaccaaatgcctgacggttctattgctgaagtttcacctatggctgctgacgcatttgaaaacgtgacgccaattttcgaaactatgcctggttggtctgaaacgactttcggtgcaaaaacgctggctgaactgccacagacagcactggattacatcaagcgcatagaagagctgactggcgttccggtagacatcatttctactggcccagaccgcaacgaaaccatcatcaaagttcacccattcagcgcgtga

SEQ ID NO: 41352 - DNA, 1458 bp, Vibrio cholerae
atgacacattggatagccggtgaatgggttgcgggaaccggtgaaaagctggaatcacatacgccttatagccatgagcttttatggcaaggttacagcgctagtggcgagcaagtcgacgcggcggtgaaggccgctcgccgcgcttttctcgactggaaaaaacgcccatttgctgagcgtgaacagaaggtgttggcctttgcggaattggtgaaagccaacagcgaacagattgcgcaagtgattgctaaagagacgggcaagcctttgtgggaaacgcgcacggaagcggcgtcgatcgccggaaaaatcgcaatttcgattcgtgcttatcatgagcgtaccggtgaaaccgtgcgtgaagcggcgggtaatcagctggtattgcgccatcggccgctgggcgtgatggcggtgtttgggccgtataacttccccggccacttgcccaatgggcatattgtgccagctctgctcgctggcaataccgtggttttcaaaccttccgaacaaacgccgtggactggcgaagttttgatgcagttatggcaacaggctggcttgcctgctggtgtcatcaatctggttcaaggctcaaaagagacggggattgcgctcgcgcaatcccgcgggattgatggtttgctgtttacggggagtgccaatactgggcatctgctgcatcgccaatttgcaggtcagccggacaaaatgctggcgctggaaatgggcggcaataaccctatggtgatttcagagcactatggcgatctggatgccacggtttacaccattattcaatcggcgtttatcagcagtggtcaacgctgcacctgtgtgcgtcgcttgtatgtgccacaagggacgaaaggcgatgcactgctcgataaactggtttccgtaacggccaagctgcgtattgatcagccctttgctgaacccgcaccctttatggggccgttagtttctgaagcggcagcacaagcgatcctcaaggcgcaagcagatctacaagcgctaggtggaaaaagtctacttgaagctcgcgccttgcatgcggcgtttatcactccggccatcatagatgtgacggcgattgagcgcttaccggatgatgagtatttcgggcctttgctgcaagtggtgcgttaccagactttggcgcaagcggtagagcttgccaatgatacccgctttggcttatccgctgggcttgtctcgacggatgatggcgagtgggattattttgtcgaacatattcgtgcgggtatcgtcaatcgtaaccgccaattaaccggagccagtggagatgcgccatttggtggcccaggagcatcgggcaacttacgccccagtgccttctatgccgccgactattgcgcttatccgatggcctcaatggaaggggatacaacgctgcttcctgctaccttgagcccgggtgttgaactctaa

SEQ ID NO: 41353 - DNA, 1212 bp, Vibrio cholerae
atgacggtggaaatgagtgtagatcggagttcttttgatgaggtgatggtgccttgttacaacccgatggagtttatcccagtaaaaggttttggttcacggatttgggatcagcagggtcatgagtacattgacttcgctggcgggattgcggtgagttgtctagggcattgccacccagtgatggtgcaagccttgaccacccaagccaataagctgtggcatttaagtaacgtaatgaccaatgagccagcgttgcgcttggcgaaaaaactgactcaagtgagttttgccgaaaaggtcttttttgccaactccggcgcggaagccaacgaagcagcactcaaactggcgcgtcgttatgcggccgatgtgtatggtcctgagaaatccgagattattgcctttaaccaaggtttccacggtcgtactttctttaccgtatcggtcggtggtcaagcgacctattcggatggttttggccctaaaccgggtgatattgttcatttgccttataacgatttggctgcactgcaagcgcagatctccgatcgcacttgtgctgtgatgatggagccgctgcaaggtgaaggtggcattgtttctccgagtgctgaatttgtgcaagcggtgcgcgagttgtgtgacaaacacaatgcactactgattttcgatgaagtgcagacgggtaacggccgtaccggtgatttctatgcctaccaagggattggtgtgacgccagatattctggcgaccgcaaaatctctcggtggcggtttcccaatcggtgccatgctgaccacggcgaaaattgctgagcacatgaaagtgggcgtacacggttcgacttatggcggtaacccattagcgtgtgccgtagcggaagcggtagtggatttcgtcgcgcaaccagaaatactggctggtgtgaaacagcgtgagcagtggatgcgcgctgagctagagaaaatcaatcagaaatatcaattgtttaaagagatccgcggtaaaggtttgctacttggtgcggcactcaacgatgaatggcaaggccgtgcgcgtgacattctggtcgctgcgggtaagcaaggcttgatggtgttggtggccggggcgagcgtggttcgctttacgccatctctcatcatcagccaacaagaaatcgaagaaggtatggctcgcttagacaaagcgatcgccacactgatgtga

SEQ ID NO: 41354 - DNA, 1413 bp, Vibrio cholerae
atgacagttcagacttttacgccaaatcaaaccacgacactggaaacggcgaaaaaaaccatcgccgagcaaagccaaaatagccaaaccacaggcaataaaattggctttgtttccttaggttgcccaaaaaacttagtggattcagaacgcattctgacccaactacgcactgaggggtatgagatcgtcaacagctaccacgactccgatgtggtgatcgtcaacacctgtggttttatcgacagtgcggtgcaagagtctctggataccattggcgaagcgctgaaagagaacggcaaagtgattgtgacgggctgcctcggcgcgcgtgaagatgaaattcgccaagtacaccccaatgtgctcggtattacaggcccacacgcttaccaaaacgtattggagcacgtacaccaatacgcgccaaagccagcccacaacccgtttaccagcttagtgccggatcacggggtgaaactgacgccaaagcattacgcttacctgaaaatttctgaaggttgtaaccaccgctgtactttctgcatcatcccttcaatgcgtggtgatttggtaagccgcccagtgggtgaaattattggtgaagcggaacgcctgaaaaatgctggcgtgaaagagctgctcgtcatcagccaagacaccagtgcttacggtgtggataccaaacacagcctaggttttgccaacggctcaccggtgcgccacaacatcaaagcgctcagtgaagagcttggcaaaatgggcatttgggttcgtctgcactacgtttacccttacccacatgtggatgaaatcatcccattgatggcagaaggaaaagtgttgccttacttggatattccattccaacacgccagccctcgtgtgctgaaaatgatgaagcgtccggggcaagcggagcgcactttagagcgcatcaaaaaatggcgtgaaatctgcccagaactggtgatccgctccacctttatcgtgggcttcccgggcgaaactgaagaggatttccaaatcctgctcgattggctgaaagaagcacaactcgatcgcgtgggctgctttaagtattcgcccgttgaaggcgctgcagcgaacgagattgaagatcaaatcccagaagacgtgaaacaagatcgtttcgagcgctttatgctcgtgcagcaagagatcagtgctgccaaactgcaaaaacgcatcggcagcaccatgcaagtgctgattgatgaagtcgatgaagaaggcgcgattggccgtacttacgccgatgcaccggaaattgatggcttggtttacctcaatggtgaaaccaacctgaaaccgggtgagctggttaacgttgtgattgaacacgccgatgaatacgacctatggggcagcatactgcacgacgcgcagtaa

SEQ ID NO: 41355 - DNA, 1098 bp, Vibrio cholerae
ttgaaccgcgccgattccgtgcgcggtttttgtccctttgttttgtgtaatttcaatttcagtcacaaggaaatcaaacccatgagcaaacccattgtattgagtggtgttcaaccgtcaggtgaactaagtatcggtaactacttgggtgctctacgtcaatggcaacagatgcaagatgattatgactgccagtactgtgttgtggatttgcatgcaattacggttcgccaagatccgcaagcactgcatgaagcgacattagatgctttggctatttgtctcgccgttggcgttgatccgaaaaagagcacgctatttgttcagtcacacgtacctgagcatgctcaactcggttgggttttgaactgctacacccagatgggtgagctgagccgcatgactcaattcaaagacaaatcagcacgttacgccaacgatgtgaatgctggtctgtttggttatccggtactgatggcggcagatattctgctgtatggcgcgcaccaagtgccagtgggcagcgatcagaaacaacatctggaattggcacgcgatatcgcgacccgtttcaacaatatctacagcccagaacagccgatttttaccattcctgagccttacatcccaaccgtgaatgcgcgggtaatgagtctgcaagatgcgactaagaaaatgtccaaatcagacgataaccgcaaaaacgtgatcaccttgttggaagatccgaaatcgatcatcaagaagatcaataaggcgcagaccgatgcggaaaccccaccgcgtatcgcttacgatgttgaaaacaaagcaggcatcgcgaacctgatgggactctattctgccgcgacaggtaaaaccttcgccgaaatcgaagctcagtacgcaggcgttgaaatgtacggcccatttaagaaagatgtgggtgaggctgtggtggccatgcttgaacccgtgcaagcagaataccaacgcatccgtaacgatcgcgaatacctgaacagtgtaatgcgtgatggcgcagaaaaagcctcggcaaaagcgctgcaaacgctgaaaaaagtctatgcggcggttggttttgtggcgcgtccttaa

SEQ ID NO: 41356 - DNA, 2508 bp, Vibrio cholerae
gtgcagcctcaactaaacagggattctccggtgaagttcataaagcgtttattagtattttcattgatttgcattattcttggagtcactacaatctttggtttctatttttatgtgaaatcagatctgccagatgtagccactctacgtgatgtccaattacaaactccgatgcaagtcttcagtcaagacggcaaactgatcgcccaatttggtgaaaagcgccgcatcccgctcaagctggaagaaatgcctaaagagttgatcgaagcggtgattgcgaccgaagactctcgctactacgagcactacggttttgacccgattggtatcacgcgtgccgcctttgctgtactcgcctcgggcagtgcttcgcaaggtgccagtaccattactcagcagcttgcgcgtaactttttcctctctaatgagaagaaggtgatgcgtaaagtcaaagagatcttcattgcgatccatattgagcaactgttaagcaagcaagagatcttagagctgtatctcaacaaaatttacctcggctaccgttcttatggcgtcggcgcggctgcgcaagcgtatttcggcaaagaggtgaaagatctgaccttaggtgaaattgcgctgattgcaggcctaccaaaagccccttcaaccatgaaccctatctattccgtcgagcgtgcgaccaaccgtcgtaatgtggtgctgcagcgtatgctggatgaaaaatacatcactaaagcagaatacgatgctgcgcgtgccgaacctgtgctgccgaaataccatggcgcagagattgagttaaacgcaccgtatgtggctgaaattgctcgcgcatggatggttgaacgctacggtgaagaagctgcttacacgtcaggcatgaatgtctacacaacggtcgactctaagttgcaaagagccgccaaccaagccgcgatcaataacctgttggcttacgatgagcgtcacggttatcgcggtgcagaaaaagagttgtggcaagtcaatcaaccggcttggagcagcactcagctgtctgaatacctgagcaatgaacctacctatggcgatatgttccctgccgcggttctcagcgttgaagaaaaatcggcccaagtgtgggtaaaaagctatggtgtgcaaaccatcgcttgggaagacatgaattgggcgcgccgttttatcaacgacgatcgccaaggcccacttccgaaaagtgccaatgaatttttagccgcaggacagcaaatttgggttcgtccacgcacccaagatggcgcgattaccgcttggaagctaactcaagttccgaatgccaacaccgcatttgtcgcgatgaatccagaaaacggcgcggtcactgcgttggttggtggttttaactttgtgcacaacaaatttaaccgagctacccagtcagtgcgtcaagtgggttcaagtatcaaaccatttatctattctgcggcactgaataaaggactcactttagccacgctgattaatgatgcgccgattaaccaatgggatgagagtcaaggcacggcatggcgtccgaagaactcaccaccaacctacaccggcccaacacgactgagaattggtttagcccaatcgaaaaacgtcatggccgtgcgcgttttgcgtgaagtgggtttggatgaaacacgcgaatacttaactcgctttggtttcaaattagatcagttaccgcgctctgagacgattgcgctcggtgcaggcagcttgactcctgtacaaatggcacaaggcttctcggtttttgctaacaatggttacttcgttgaacctttctacatcagccgcgtcgaaaatccatttggcaacattgagtttagcgcagagccgaaagtcgtctgccaccgtgaatgctcatcggaacttgatgagtttgccgagcaagacgcagcaagcccttatgccccgaaagtgatttccgagcaaaacgctttcttaacgcgtgaaatgctgtacagcaatatttggggtggcggtgagtggagctcagataccggttggaacggtacaggctggcgagcacaggcactgaaacgccgcgacatcggtggtaaaaccggtaccaccaacgactcaaaagatgcatggtacaacggttatgccccaggcatcgttggtgtggcttgggtgggctttgatgatcatagccgtaacctagggaaaacagcgccgaatagaaacattgaagatgatgtttccggtgccgaatcgggtggtaaaaccgccttgccagcttgggttgagtttatgtctctcgcgctacaagatgtgcccgttcaacagaaagcggtaccgaacaatatcgctcgtgttcgcattgaccgcgatacggggttactgaccaacaaactcgactccagctcgatgtttgagtatttcgaagccggcactgagccgacagagtacgtcagcgaacatgtcaatgagtccatctattcgaccagctctggtgaagagctgttctag

SEQ ID NO: 41357 - DNA, 744 bp, Vibrio cholerae
atgaggaacacaatgtttacatctaaagaaggtcaaaccattccacaggttacttttcctactcgccaaggtgacgcttgggtcaatgtgactagcgatgaactgttcaaaggcaaaaccgttatcgtgtttagcttgccgggtgcctttactccaacctgttcatccactcacctaccgcgctacaacgagctgtttcctgtctttaaagagcatggtgtcgacagcattctgtgcgtatcggtcaacgatactttcgtgatgaatgcttggaaagatgaccaaaatgccgacaacatcaccttcattcctgatggtaatggtgaatttaccgatggtatgggcatgctggtggataaaaatgaccttggctttggtaaacgctcatggcgctacagcatgctggttaaagacggtgtggtagaaaaaatgtttatcgaaccgaatgagccgggcgacccgttcaaagtatcggacgccgataccatgctcaaatacattgcccctcaatacaaggtgcaagaatcagtgactattttcactaagccaggctgtccttattgcgccaaggcgaaacaagcgctgattgatgccggtctacagtatgaagagctgattttaggtaaagacgctaccacagtgagtctgcgcgccgtttctggccgtaccacggtgccgcaagtgtttatcggtggtaaacacattggtggtagcgacgacttagaagtctacctaaatcaataa

SEQ ID NO: 41358 - DNA, 1377 bp, Vibrio cholerae
atggcattatggggcggaagatttacccaagcggcagacagtcggttcaaatcattcaacgattccttacgttttgattatcgattggctgagcaagatattgttggatcaatcgcttggtcaaaagccttggtctccgtcaatgtcttgagcgtgcaggagcaacaacagttagagcaggcgttaaatcacctattgcaatcggttcagcaagatccggagcaaatcttagcctctgatgcagaagatattcactcttgggtcgagcagaagctgattgagcaagtcggtgatcttggtaaaaaactgcacacagggcgttcacgtaatgatcaggtcgcaaccgatcttaagctctggtgtcgcgatcagggcgttcatctgctgcttgctctgaaaacgctgcaacaacagttggtggcggtggctgctgaacatcaatcgacagttttgccgggctacacccatttgcaacgcgcgcaaccagtaacttttactcattggtgtttagcttatttggagatgtttgagcgtgatgagtcccgtttgactgatgctctagcgcgtttaaacacctcaccactgggttcaggtgcattagcgggaaccgcttacgcgattgatcgtgaggtgttagcggcggatcttggtttcactcgcgcaacacgtaactcgctggatgcggtctccgatcgcgatcatgtgatggagctgatgtcagtcgcatcgatctctatgctgcatttgtcgcgtctggcggaagatatgatcttctacaccactggtgaagcgggctttattgaattggctgatacggtgacctctggttcttcactgatgccacaaaagaaaaaccccgatgcacttgaattgatccgcggcaaaaccggacgcgtctatggtgcattggctgggatgatgatgacagtcaaagctctgcctctcgcgtacaacaaagacatgcaagaagacaaagaagggctgtttgatgcgctcgacacttggtttgattgcttgcaaatggcgggactttgctttgatggcattaaagtcaatgcggcgcgtacgttagaagcggccaagcaaggctactcgaacgcgactgaattggcggattatctggttgcgaaaggcattccatttcgcgaggcgcaccatattgtcggggtagcggtagtcgcagctattggcaagggtgtagcgttggaagagttgtgtctggcggagctgcaacagttttcgcctttgattgagcaggatgtctatccgatcctgactattgagtcttgtttagagaaacgctgcgcactcggtggggtatcgcccaaacaagtggcgcatgctcttcagcaagctcaagcgcgcgtgaagtcttaa

SEQ ID NO: 41359 - DNA, 822 bp, Vibrio cholerae
atgaaacagtgcgcccacaccaaggtttggcaaaccattgtcgctgaagctcgcgagcaagccgagcaagagccgatgctcgccagtttttaccatgccaccattattaagcatgacagtttaaaagcggccttgagctatattctggccaaccgtttgaacactgcctccatgcctgcgatggcagtacgagaagtgattgaagaagcgtttgctgccgatccgagtatctcagaagcggcggcgtgtgatatttgcgcgacagtcaaccgcgatccggcagtgtcgatgtactcaatgccgctactttacctaaaaggttatcacgctttacaaggctatcgggtggctaactggttatggcgacaagggcgtaaggcgctcgcgacctatttccaaaatcagatatcagtggcgtgtcaggtggatattcaccctgcagcgcgtattggtcgcggcatcatgctcgatcacgcgacggggatcgtgattggtgaaaccgccgtggtagaagatgatgtatcgatcttgcaggacgttacgcttggcggtaccggtaaagagtgcggcgatcgccacccgaaaattcgggaaggggtgatgattggtgcgggcgcgaaaatattaggcaacatcgaagttggagaaggggcgaaaattggctcgggatcggtcgtgttgcaagctgtaccgccccataccacagtcgctggagtacctgctcgtattgtggggcggccacaatcggataagccttctttggatatggatcagcagtttaatggtcgttcgcagacgtttatcggcggtgatggtatctag

SEQ ID NO: 41360 - DNA, 1035 bp, Vibrio cholerae
atgagcgaaacacagaaccacaatagctacggaaaacctgttgaaatgaccgtgataggtgcgggctcctacggtacctcactggcgatctctttggcgcgcaatggcgcgaatatcgtcctgtggggacatgatgcagagcatatggcgcgccttgacgctgaccgcgctaaccatgaatttttgcccggaattgcttttcctgacactctgattgtggaaactgacttgcaaaaagcggtgcaagcgagccgtgatctgctggtggtagtgcctagccatgtgtttggtatcgtgttgaaaagtttgcagccacacctgcgtgcggatagccgcatttgttgggcaaccaaggggctagagcctgagactggacggctactccaagatgtcgcccatgatgtacttggtgatagctacccccttgcggtgctttctggtcctacttttgccaaagagctggcgatggggatgccaaccgcgatttcagtggcttcgccggatgcgcaatttgtacgtgacctgcaagagaaaattcactgcagcaaaactttccgagtgtacgccaacagtgactttatcggtatgcagcttggcggcgcggtaaaaaacgtgattgcgattggtgcggggatgtctgatggtattggctttggcgcgaatgcgcgaaccgctcttatcactcgtggcttggctgaaatgagccgcttaggcgccgctttaggcgcgcagccggaaacttttatgggtatggcaggattaggtgatttagtgctgacttgtactgacaaccaatcgcgtaaccgccgttttggtttggcactaggtcaaggtaaagatgtggataccgcgcaaaccgatatcggccaagtggttgaagggtatcgcaacaccaaagaagtgtggatgttagcgaaacgcatgggcgttgagatgccgatagttgaacaaatttaccaagtattgtatcaaggaaaagatgcgcgactcgccgctcaggatttgctggcacgagataagaagatggagcgttaa

SEQ ID NO: 41361 - DNA, 435 bp, Vibrio cholerae
atgcaagagtacattgagttttttcagcaaaatatgatcctttcactggcttggatcggtattttggtcgcgttaatcgccagcatctacaaatcggccaccgcggcttatcaagaagttacggccacccaagccactctgttgattaaccgtgaaaacggcatcgtggtcgacatccgtagtaaagatgaattcaaacaaggccacattaccgacgcaattcacattttgccgtcagacatcaaggcgggtaacttggctggccttgaaagccataaatcgaaccccattattgtggtatgcaaaacaggtcaaaccgcacgtgaaagtgcagatttactgaccaaagccggttttgagaaggtcaatcttcttaaaaatggcttgattgcttggaatgaagctaacctgcctttggtacgcggtaaacgctaa

SEQ ID NO: 41362 - DNA, 1050 bp, Vibrio cholerae
gtgtcacaattgagtttggctttttgttctgaaagagtacaattcgttatctctgtttcttgtgatgagccacccatgactaattccgattggatgccgaccgcatcaataagccaattaaaacaacgcgcgaccttgttgcgtcagattcgtgaattttttgctgagcgcaatgtgctggaagtcgaaacgccagccatgagccacgccacggtgacggacatccatctgcacacgtttaaaacggaatttgtcgggccgggttatgccaaaggcagcgcgctgcatctgatgactagccctgaatttcatatgaagcgtttgttggccgcgggcagtggttgtatttaccagctgggtaaagcttttcgtaacgaagaaaatggccgttaccacaatccagaattcaccatgttggaatggtatcggattggttttgatcaccatgccttgatggatgaaatggatgccttattgcaattggtgctgcgttgcggcagtgccgagcgaatgacttaccaagaagcgtttttgaatgtgcttggcgtttgcccactcgaagaggagatgcgtgagttaaagcaagtggctgcaacgctgggtttaagtgatatcgcagagcctgaagaggatcgtgacaccttattacaactgctgtttagcattggcattgagcctaaaattggccaaatcacaccagcatttgtgtatgattttccggcttcacaagcggcgctggccaaaattaatccggcggatccgcgcgtggctgatcgcttcgaagtctattttaaagggattgagctcgcgaacggcttccatgaattggataaccctgccgagcagttagcccgttttaaagcggataatgccaagcgtttagagatgggactgacagagcaaccgattgattaccatctgattgcggcgctggaggccggtttgccagaatgtgctggggtggctttgggtattgatcgtctgattatgttggcgcttggcgaggatcatattgataaggtcaccgcatttccatttcctcgagcctga

SEQ ID NO: 41363 - DNA, 1635 bp, Vibrio cholerae
atggctgctaaagacgtacgttttggtaatgacgctcgtgtaaaaatgctagaaggcgtaaacattctggccgatgcggtaaaagtgaccttaggtcctaaaggccgtaacgtagttctcgacaaatctttcggtgcaccaaccattaccaaagatggtgtatcagttgcgcgtgaaattgaactggaagacaaattccagaacatgggcgcacaaatggtcaaagaagtcgcttctcaagccaacgacgcggcgggtgacggtacaaccacagccaccgtactggctcaagcgattgtgaacgaaggcctaaaagcggtcgcggcgggcatgaacccaatggatctgaagcgcgggatcgataaagcggttatcgctgcggtagaagagttgaaagcactgtctgtaccttgtgccgatactaaagcgattgcccaagtaggtaccatctctgctaactcagactctagcgtgggcaacatcattgctgaagcgatggaaaaagtgggtcgcgatggcgtgatcaccgttgaagaaggccaagcgctgcaagacgagctggatgtggttgaaggtatgcagtttgaccgtggctacctgtcaccgtacttcatcaacaaccaagaatcaggcagtgtagaactggataacccattcatcctgctggtggataagaaaatctctaacatccgcgaactgctgccagtactggaaggcgtagcgaaagcctctcgtccactgctgatcgtggctgaagatgtggaaggcgaagcgctggcgactctggttgtcaacaacatgcgcggcatcgtgaaagtggcagcggttaaagctcctggctttggcgatcgtcgtaaagcgatgctgcaagatatcgcgatcttgactggcggtgttgtgatctctgaagagatcggtctggagctggaaaaagcgactctggaagacctaggccaagcgaaacgcgtttctatcaccaaagaaaactcaaccatcatcgatggtgctggcgatcaagccgcgatccaaggtcgtgttgcgcagatccgtcaacaaatcgaagaagccacttctgactacgacaaagagaaactgcaagagcgcgtagcaaaactggctggcggcgttgcagtaatcaaagtgggcgcagcaaccgaagtggaaatgaaagagaagaaagatcgcgtagaagacgcgctgcacgcgactcgcgcagcggtagaagaaggcgttgttgcgggtggtggtgtagccctgatccgcgcagcttctaaactctcttctctggtgggtgacaacgaagagcaaaacgtgggtatccgtgtcgcactacgtgcgatggaagcgccactgcgtcaaatcgtgaaaaacgcgggtgacgaagaatcagtggttgccaacaatgtgcgtgcaggcgaaggtaactacggttacaacgcggcaacgggcgtgtacggtgacatgatcgaaatgggtattttggatccaaccaaagtaacccgttctgctctgcaattcgcagcgtctgttgcgggtctgatgatcaccactgaagcgatgatcactgagctgccgaagaaagatgcaccagcaatgccagacatgggcatgggtggcatgggcggcatgatgtaa

SEQ ID NO: 41364 - DNA, 351 bp, Vibrio cholerae
atgccaaacttagtcatggaatactcaaactcagtcgatgaacgcatcaatgtgcaaggattgctggaagatttgcatcgagccgctattgattcaggactgtttgaaataagttcggtaaaatctcgcgcgctgcgctgccaccattggttgattggggatgaaggcgacagcgttgattttattcacctcagttttgagttgctggcaggacgcagtcctgagcaaaagcgagagctatcgcgtaagctgatggagattctggcggcgaaagccagccatgtgcgcagtttgaccattaatattcgagatatggatacagactgctttcaaaaagtcatcaatcgatga

SEQ ID NO: 41365 - DNA, 558 bp, Vibrio cholerae
gtgactactatcgtatcagtgcgtcgtaataataaagttgtcatcgctggtgacgggcaggtatcgctaggcaataccgtgatgaaaggcaatgcacgtaaagtgcgccgcctttataacaacaaggtactggcaggctttgctggtggaaccgctgatgcatttaccctgtttgagcgctttgaaagtaagttgcagatgcaccaaggtcacctgaccaaagcggcggttgagctagccaaagattggcgaagcgatcgcgcgctgcgccgtttggaagccattttggcggtcgccgatgaaaccgcatcgctgatcattaccggtaatggtgatgtgctgcagcctgaacacgatctgattgcgatcggttctggtggcaactatgcacaagcggctgctattgctctgttagaaaacaccgagcttgatgcacgcacgatcgccgaaaaagccttaaatatcgcgggcgatatctgcgtgtttactaaccaccatcacactatcgaagaactcgaaattccgcaggcgatgttgccacaaggcgcatctgcgtag

SEQ ID NO: 41366 - DNA, 318 bp, Vibrio cholerae
atggcagactggaatggcgaatacatcagcccctatgcagagcatgggaaaaagagcgagttggtaaaaaaaatcacggtatccattccgctgaaagttctcaaagtgctaacggatgagagaacacgccgtcaagtcaataacttacgtcacgcaaccaacagtgaattgctgtgcgaagccttcttgcatgcttatactggccagccgctgccgacggacgaagacctacgtaaagatcgccctgatgatattcctgccgaagccaaacgtttgatgaccgaaatggggattgagttcgaatcttacgatgagtaa

SEQ ID NO: 41367 - DNA, 1008 bp, Vibrio cholerae
atgaaacgcgatttagcaatggctttttcccgcgtcaccgaaggtgccgcactcgcaggctataaatggttaggacgtggcgataaaaatgccgccgatggtgctgcggtagaagtgatgcgcatcctgctcaaccaaacggagatcagcggtgaaattgtgattggtgaaggcgaaattgatgaagcgcctatgctgtacattggcgagcaagtcggtctggggggcgatgcggttgatattgcggtcgaccctatcgaaggtactcgcatgaccgccatgggacaatccaatgccttagccgtgcttgcagccggtgaaaaaggcagtttcctgaaagcgcccgatatgtacatggaaaagttggtggttggccccggtgcaaaaggctgcatcgacctcaatttgccgctcaaagataacctaaaccatgtcgcaaaagcactcggcaaacccttaaccgatttggtggtgatcacgcttgccaaaccgcgccacgaccaagtgattgcgcaaatgcaacagatgggcgtacgcgtttttgcagtgccggatggcgatgtcgccgcatcgattctgacctgtatgcccgatagtgaagtggacatgatgtactgcattggtggggcaccagaaggcgtagtctctgcggcggtgatccgcgcgctggatggcgacatgcaaggccgtttactgccgcgtcatcaagtcaaaggcgatagcgaagataatcgcatttggggggcaaaagagctcgaacgctgtcaacaaatgggcgtagaagccggtaaagtgctgaaaatggaagacatggcacgcagcgataacgtgattttcgcggccaccggcatcaccaaaggtgatttgcttgatggcatcagtcgcaaaggcaatatcgcaacaacagaaacactgctgatccgtggccgctgtcgcaccattcgtcgtattcgctcaattcactatctggagcgtaaagaccaacaagtgcgcgacatcattctctaa

SEQ ID NO: 41368 - DNA, 996 bp, Vibrio cholerae
ttgatattcgattcgcaaagttcgagggtgagcatgattaaaaaaatcggtgttttgacgagtggtggcgatgccccaggtatgaatgcagctattcgcggcgtggtgcgtacagcacttggcgcaggtttagaagtgtttggtatttacgacggctaccaaggtctgtacgaagatcgtattaagcagctagaccgttcaagcgtgtctgacgtgatcaaccgtggcggtacttttttaggctctgcacgcttcccacaatttcgtgaagttgaagtgcgcgaaaaagcgattgaaaacctgaaaaagcacggcattgaagcgctggttgtgattggtggtgacggctcttacatgggcgccaaaaaactgaccgaaatgggtttcccttgtatcggtctgccaggcacgattgataacgatatcgcgggcaccgactacaccatcggttatttgactgccctgaacaccgttattgaagcgattgaccgtctgcgcgatacctcttcttcacaccaacgtatctctatcgtagaaatcatgggtcgtcactgtggtgacttgacgctgacctctgcgattgcgggtggctgtgaatacatcatcacaccggaaacgggtctgaatatggagcagctgatttccaatatcaaagatggtattgcgaaaggcaaaaagcacgcgatcattgcgctgactgagctgatgatggatgccaacaaactggccaaagagattgaatcggcgacaggccgtgaaactcgcgcaactgtattaggccatattcaacgtggtggtaaacctaccgcatttgaccgtgtactggcatcgcgcatgggtaactacgcggtgcatctattgatggaaggtcacggtggtcgttgtgtgggtatccagaaagagcaactggttcaccacgacatcattgatgcgattgaaaacatgaagcgtcctgtacgcactgacctgtacaaagtcgctgaagagctgttctaa

SEQ ID NO: 41369 - DNA, 504 bp, Vibrio cholerae
atgaaacttgccaaaaaaatgattttagccgcggctgtcctaccgctgactctgggaacgacggcggcgctggcttacggtggtcacggttgggataaagagggtgatggacattgtggcgaccgcggtgaacgtgggatctggaaacagcttgatttaaccgctgagcagcaagcccaactcaaagagatgcgtgaggctggacgtgaagagatgcgcgctaatcgcgggcaaagccatgatgcaatgaaagcattgcacgcgcaggagcgcgctctggtgctcgcggctgattttgaccaagcagccgctgagaatctggcaaaacagatggtagatcagcaagtgactcatcgcgtaaaaatgatggaaaaacgccaccaaatgatgagcattttgactgccgaacagaaagccaagttgcaaaccctgcaacaagagaaaatggcggaatgcatgcaagatggccaacatggcaaaggcaaaaaacacgctagtcaataa

SEQ ID NO: 41370 - DNA, 477 bp, Vibrio cholerae
atgtttgatatcgctctctacgaacccgaaatcgcacccaatacgggtaacatcattcgtttgtgtgccaactgtggcgcgaacttgcatctcatcgagccactgggttttgatctggaagagaaaaaggtgcgccgcgccggtttggattaccatgatttagctcgagtgacgcgccataaagattacgccgcgtttatcgaatacttacagcgtgagcgaggctctttccgcttgtttgcttgcaccacgaaaaccacacaacatcatgtggatgcccaatttcaacaaggcgatgtgctgctgtttggtccagaaacacgcggtttgcctgccgagctgattgccagcttgcccgccgagcagcggattcgaatcccgatgatgccagaagcgcgcagcctaaacctttccaatgcggtagcgattattgcttttgaagcgtggcgtcaaatggggtttgatggcgcacgctaa

SEQ ID NO: 41371 - DNA, 672 bp, Vibrio cholerae
atgaatcactttacccctgcgcagcagcgcaaagcccttggctatcttgttttgtttcacctcgtgatcattgcgtcgagcaattatctggtgcaaatcccgtttaccattttcggtttccacactacgtggggcgcattcacttttccgtttatctttttagcgaccgatctcaccgtacgtatttttggtgcaggattggcgcgtaagatcatttttctggtgatgctccctgcattggcggtctcttacttgctttcggtggtgttttttgaaggccaataccaaggtttagcgccgctgagtgaattcaatctgtttgtcgcgcggattgcgatcgccagttttatggcatatctgcttgggcagatcatggatgtgcatgtgttcaaccgcctacgtcaaatgaagcagtggtgggtggcgccaacctgttcgacgctgtttggtaatgcactcgataccatcgctttcttctcgattgctttctaccagagcagcgatccgtttatggctgagcattggacggaaatcgctttagtcgattacaccttcaagctcatcattagcttaggtttgtttgtgcctatgtacggcgtcttgcttaattacctgatcaaaaagctgactgcggtgaaccccaattttgcgatggcgagtgccaaagcctaa

SEQ ID NO: 41372 - DNA, 2118 bp, Vibrio cholerae
ttgtatctattcgatagtctaaaagacgttgcccaagaatacctcacagagcctcaaattgaggctctgcgccaatcttatgtggtagccagagatgcccatgaagggcaaacccgctcaagcggcgaaccttatatcattcaccctgttgccgtcgcgcgaattctcgccgagatgcgtctcgacctagaaacgctacaagcggcactgctgcatgatgtgattgaagattgtgatgtcaccaaagaagacttagatgcccattttggcagctcagtcgccgagttggtggacggggtgtctaagctcgataagctcaaatttcgcgatcgcaaagaggcgcaggcggaaaactttcgcaaaatggtgctggccatggtgcaggatattcgggttatcctaatcaaactggccgaccgcacgcccaacatgcgcaccctcggtgcactgcgtccggacaaaaaacgccgcattgcccgtgaaaccttagaaatttatgctcccctcgcccatcgtttgggtatccataacatcaaaaccgaactcgaagagttaggctttgaagcgctctacccgaatcgttatcgcgtccttaaagaggtggtgaaagccgcgcgcggtaaccgcaaagagatgatccaacgcatccacagtgaaatcgaaggccgcttacaagaagtggggctgccggctcgcgtggtgggtcgtgagaaaaacctgttctccatctacaacaagatgaaaaccaaagagcagcgctttcacaccattatggatatttacgcgtttcggattgtggtggataccgcagatacctgctatcgcgtgttgggtcaggtgcatagcttgtacaagccgcgcccagcgcggatgaaagattacattgccgtcccgaaagccaacggctatcaatcgctgcacacttccatggttggcccccacggcgttccagttgaagtgcagatccgtaccgaagatatggatcagatggcggataaaggggtggcagcccattggtcgtacaaagccaatagtgaacgaggtggcactaccgcgcagattaaagcccagcgctggatgcaaagcttgctcgagttacagcaaagtgccggtaactcctttgaatttatcgaaaacgtcaaatccgatctgttcccagatgagatttacgtattcactcccaaaggccgtatcgttgagctgccaatgggcgcaactgccgtcgattttgcttacgcggtacataccgacatcggtaatacctgcgtcggcgcgcgagtcgatcgcacgccatacccgctcagccaatcgctgaaaagtggccagacggtggagatcatcagcgcgccgggcgcacgtccgaatgcagcatggctcaactatgtggtgacttcgcgcgcgcgtaccaaaatccgccaagtgctgaagacgatgcgtcgcgaagactcaattactctcggtcgtcgcctgcttaaccatgcgcttggcgaacactcggttaacgaaattgccccagagaacatcagcaaagtcttgagcgatctaaaaatcgcctcgatggatgatttactggccgcgattggtttgggtgagttgatgagtatcgtgattgcacgccgcctacttggcaatgctgatgaactgaccgagcctagcaaatccggcggcaataaaaataaactgccgatccgcggcgcagaaggcattctgctcacctttgccaactgttgtcaccccattcctgacgatcacatcatcgctcacgtttcaccgggacgtggcttagtggtacaccgtgaaacctgtccaaacgtacgcggctatcaaaaagagccagacaagtacatggcggtggaatggactaaagattacgatcaagagttcattactgagctgaaagtggatatgcacaaccgccaaggtgcattggctgaactgaccaatgtgatctccaaaacgggctcgaatattcatggcctgtcaacggaagagcgcgatggtcgcttgtacacagtcaccgttctgctcaccaccaaagatcgggtgcatttagctggcatcatgcgcaaaattcgcaccatgccccacgcgcttaaagtgcgccgccgtaagaactga

SEQ ID NO: 41373 - DNA, 1317 bp, Vibrio cholerae
atgcgaattcgcagttcatttacccaatcgatccttctgtttttctctctgttgatcgccagtcaaatttattcttactacgccgtctttaactatgcgttgctgccgagtttgcagcagttcaacaaaattcttgcccatgaaatcagcttgatgctcgatgacaccagtaatcccaatgtcagttcagaaatggatgcgttgctcaaaaggcgtgtgcttgagcaattaggggtgacgattcatagtaacgacagccccgaagcggtcgaatatcaacacgcgatcagtttggatttgatgagcgaagagatgagtagtgagctgggttcacccacagaagtgcgcatggcgttgggcgaagagagctacatcctgtggatgaagatcgattctctgcccggccagttgctgcgtattccactctcagagctgcaggaagaagatttcgcgccgctgtttcgtaacagcattattatggcgctactgattgtaattggtggctggctgtttattcgtctgcaaaaccgtccactgattgccttggaaaaagccgccaaaatggtaggtcgtggagaaacgccaccacatctacctgagcaaggcacgctagaaatccgctcggtaacgcgcgcgtttaatcgaatgtcgaaaggcattcaagcattggaagaagatcgcgcgctgttgatggcggggatcagtcatgacatccgcacgcccctgacccgcatccgcttggcaaccgagatgatgtcgccagaagacagctacctagctgagagcatcatcagcgataccgaagagtgtaaccagatcatcagccaatttatggattacctcaaacccgtcaatcgtgaagcgtttgaagcggtggatttgaatgatattgccagcgatgtggcaagctctgaagggggctacgaagtgcagattgaaaccgagttacaagcaggactcgcgcccgccctgggcaacccgattgcgattaagcgttcactcagtaacttggtagtgaatgcgctgcgctacggcaacggttgggtcaaagtgagtagcggcatgacggccgataagaagctagtctggctgtctgtggaagacaatgggccgggtatcgatccaagccaagtaaataaagtgtttgagccttttactcgtggggataccgcgcggggtagtgaagggacgggcttagggctggcgattgtgaaacggattgtcagccagcatcatggtgcggtgtcggttagcaatcgcagccaaggtgggctgcgtgctcaaatcagtttcccgactaagcagcaaaagggctaa

SEQ ID NO: 41374 - DNA, 2322 bp, Vibrio cholerae
atgagcaaagctatctgccaccagattgctcaagaactgaatgttcgccctgagcaagttatcgctgccgtcaccctgatcgacgatggcaataccgttccttttatcgcccgttaccgtaaagaggtgacgggaggattggatgatacccaactgcgcaacttagatagccgtcttgcctatctgcgtgagatggatgaccgtcgccaaaccatcctcaaatcgattcaagaacaaggcaaactcacccctgagctggagcaggcgattttaagtgccgacagcaaaaaccgccttgaagatctctatctgccttacaaaccgaaacgccgcaccaaaggccaaatcgcgattgaagcgggtcttgagccactggccgatacgctgtggacgcagcctaatactgaccctgaaagcgaagcggcaaaatacattaatgccgagaaaggcgtcgccgacagcaaagccgcactggatggcgcacgcgctatcgtgatggaacgcatcgcggaagatgccaacctactggaaaaaatccgtcagcacctcaatcgcaacgcggaaattgtgtcgcgcgtgatcgagggtaaagagcaagcgggcgagaaatttaaagattactttgatcaccgcgagccgatcagcaaagcgccttcacatcgcgcgttggcgatgctgcgtggccgtaacgaaggcttcttaaccctaacgctgaatgccgatcctgaattggaagagagtgcgcgccaatcctactgcgaaactctgattgccgagcattacggcattcatttgagccaagcgacggccgatgcgtggcgcaagcaggtgatcagttgggcatggaaaatcaaaatctccatgcacatggaaaccgaactgatgagcgcgatgaaagagcgcgcggaaatcgaagcgattgaagtgttcgccaccaacttaaaagatctgctgatggcggcaccggcgggtcctcgcgcgacactgggcctcgatccgggtctgcgcactggctgtaaagtcgccgtggttgacgcaaccggtaaagtgctggcaaccgacacgatttacccgcacgcaccacagcatcaatacgatcgcgccatgcagtctattgctctgctggtgaaaaagttcaacgtggatctgattgcgattggtaacggtacggcgtcgcgtgaaaccgatgcttttgcggcagatttaatcaagcgcggcaatctcaaagtacaaaaaatcatggtcagcgaagcgggcgcatcggtgtattccgcttcagagctagcggcgaaagagttcccaaatctcgatgtgtcactgcgtggcgcagtctctatcgcgcgtcgtctgcaagacccactcgcagaattagtgaagatcgacccgaaatcgataggggttggccagtatcaacacgatgtgagccaaaccctgcttgcgaaacgtcttgatgcgattgttgaggactgtgtaaacgccgtaggtgtggatgtgaataccgcctcggcagcgctactgactcgtgttgcgggcttgtctgcagcactcgcgcaaaacattgtggattatcgtgatgaaaacggtcgttttgagtcgcgtagtgccctcaaaaaagtgccgcgtttggggcctaaagcgtttgaacagtgtgccggcttcctacgcattatggatggcaaaaacccgctcgacgcttcagcggtgcacccagaagcgtatccggtggtgaaaactatcgctgagaagaacagcaaagatctgaaagcgctgattggcaatacagagttcctgcgcactcttcgcgcggtcgattacaccgatgaaaactttggtgtacccaccgtgaccgacatcatcaaggagctggataaaccggggcgtgacccgcgtccggaattcaaaaccgcgacctttgctgaaggcatccatgaggtgtcagatctggaagtgggcatggtgttggaaggcgtggtctctaacgtcgccaactttggcgcgttcgtggatatcggcgtccatcaagatggcttagtgcatatttctgcgctgaccgatcgctttatctcagatccgcgtgaagtggttaaagccggtgacatcgtcaaagtcaaagtgatggaagtggatgtgcagcgtaagcgtatcgccctttcgatgcgcttaaacgatgagccgggacaagataaccgcagccaacgcagcgctgcgccacgctcagggcaagagcgtcgcgctccacgccgtgatgagccgcaaggcaatgcactgggtggtgccatgggcggtgcgtttgccgctgctttcgctaaagcgaagaaatag

SEQ ID NO: 41375 - DNA, 384 bp, Vibrio cholerae
gtggcaatgagttccagcgcagaagaggtgagactggataaatggctgtgggcagcaagattttacaaaacacgctcgctcgcgcgaaatatggtcgaagggggcaaagtccactataatggccagcgcgccaaacccagcaaatcggttgaaattggagcgcaaatcacattgcgtcaaggtcatgatgagaaaacgatcattattgaaaagatctcagaccaacgccgtggggcacctgaagcacaacagctctatcgcgaaacggccgaaagcatcaccaaacgtgaacgcaatgccatgatgcgccaactcaacccgagtccggatcgacgtcctgacaagaaacagcgccgagatctactcaaattcatccatcagtaa

SEQ ID NO: 41376 - DNA, 891 bp, Vibrio cholerae
atgacgacacaatcaatggcgaacaacatgctacatcgctatctatttaaagacctttctgtacgtggtgagttggttcaactggacgacacttaccaacagatgatttccagtcaggaataccctgccgccgtacaacacctcatcggtgaactactggtcgccacctcactgctgacagcgacgctgaagtttgaaggctcaatcaccctgcaactgcaaggtaatggaccggtctctctcgtggtcatcaacggcgataacaaccaacaagtgcgtggcgtggctcgctggaaaggtgatattgcggatgatgcaagcctacatgacatgcttggcaaaggtcatctggtcatcaccattgaacctaagcaaggcgagcgctatcaaggtgtggtcggtttggaaggcgacaccttagcacaagtgttggaaggttattttgaacgttcggagcagcttaagacccgtttatggatacgtgttggcaaacacgatgggaaagcttgtgccgcaggcatgttgctgcaaatcgtacccgatggtaaaggttcagctgaagatttcgagcatctagaacaattaactaacaccatcaaggatgaagagctttttgcgctgccagcagaagagttgctgtatcgtctttacaaccaagagacggtgcaactgttcacaccacaacagatcagcttccgttgtggctgctcacgtgaacgcagtgctgccgcgattgtgaccgtcgcacgtgaagagattaacgatattcttgctcaagatggtgccgtcgctctgcattgtgattattgcggtacgacctactcgtttgactctgcgcaagtcgctgaattgtatgccccctcatcggcgaacggttcaaccttgcattaa

SEQ ID NO: 41377 - DNA, 1629 bp, Vibrio cholerae
atgaccgttatggaacatactaaggctgcacaaatcgacctagcccaatatgggatcaccggcgtaactgaactggttcgtaacccgagctatgaaatgttatttgccgaagaaacccgttcagatctcgaaggttatgaacgtggtgtggtgactgaattgggtgctgttgcggttgatactggcatcttcactggccgctcaccaaaagataagtttatcgttaaagatgataccactcgcgatacgctgtggtggacgtcagacaaagcgaaaaacgacaacaaaccgatcaatcaagaagtgtggaatgacctgaaagccttggtgaccaagcagctttctggtaaacgcgtatttgtgctcgatggctactgtggtgccaacgccgatactcgcttaagtgttcgcttcatcaccgaagtagcatggcaagcacactttgtgaaaaacatgttcattcgtccaagcgaagaagagctggcacactttaaaccagactttgtcgtaatgaacggcgcaaaatgtaccaatgcgaagtggaaagagcacggtctgaactcagaaaacttcactgtgtttaacctgaccgagcgcatgcagctcatcggcggtacttggtacggcggtgagatgaaaaaaggtatgttcgcgatgatgaactacttcctgccgctacaaggcattgcctctatgcactgctctgccaacatgggtaaagcgggcgatgtcgccatcttcttcggtctttctggtacgggtaaaaccaccctatccaccgatccaaaacgtgcgttaattggtgacgatgagcacggctgggatgatgatggcgtgttcaactttgaaggcggctgctacgcgaaaaccatcaagctgtctaaagaagcagagccggatatctataacgcgatccgccgtgatgctctactggaaaacgtcacggttcgtagtgatggttcgattgattttgatgatggttcaaaaaccgagaacacccgtgtttcttaccctatttatcacatcgacaacatcgtaaaaccagtttccaaaggcggtcatgcgactaaggtgatcttcctgtctgccgatgcgtttggcgtattgcctccagtttcaaaactgacgccagagcaaaccaagtaccacttcttgtctggctttacggctaaactggcaggtactgagcgtggcattactgaacctaccccaaccttctccgcctgttttggcgcagcgttcctcactctgcacccaactcagtatgcagaagtgctggtaaaacgtatggaagcagcgggcgccgaagcctatctggttaacacaggttggaacggcagcggtaagcgcatctcaattaaagatacgcgcggtattatcgatgcgattttggatggttcgatcgaaaaagcggaaaccaaacatatcccaatctttaatctgcaagtgcccaccgcactgcccggcgtcgatcctatgatcctcgacccacgtgatacttatgttgacccactgcagtgggaaagcaaagccaaagacttggcaacgcgcttcatcaacaacttcgacaagtacacagataacgccgaaggtaaagcactggttgccgcgggcccaaagctcgactaa

SEQ ID NO: 41378 - DNA, 1830 bp, Vibrio cholerae
atgaccactccgcaaattgaaaaattaagaaacatcgcgattatcgcgcacgttgaccacggtaagacgaccttggttgacaaactgctccagcaatccggcacgttagagtctcgcggtgatgttgaagagcgagtcatggactcgaacgacattgaaaaagagcgtggtatcaccattttggcgaaaaacaccgccatcaactggaatgattaccgtatcaacatcgtagacaccccaggacacgcggacttcggtggcgaagttgagcgtattatgtcgatggtagactcagtgctgctgatcgttgacgcggtagatggcccgatgccacaaactcgcttcgtaacccaaaaagcgtttgcacacggtttgaagccaatcgttgtgattaacaaaattgaccgtccgggcgcacgtcctgattgggttatggatcaggtatttgacttgttcgacaacctaggtgcgacggacgaacagcttgacttccaagtggtctatgcttcagcgctgaacggttgggcaactctggttgaaggcgaaacgggcgagaacatggaaccgctgttccaagccatcgtggataacgttgcggcgccacaagttgaccttgatggtccactgcaaatgcaaatttctcagctcgattacagctcttacgtaggtgttatcggtgttggccgtatcaaacgcggtaaagtaaaaccaaaccaacaagtgaccgttatcggtgcggatggtaagaagcgtaacggcaaaatcggtacggttctgggctaccttggcctgcaacgttctgaaactgaccaagccaccgctggcgacatcgttgcggtaactggtctgggtgagctgaaaatctctgacactatctgtgatgtgaatgctctagaagcgctgccaccactgagcgttgatgagccaaccgtaaccatgaccttccaagtgaacacctctccattcgcgggtaaagaaggtaagttcgtgacttcacgtaatatccttgagcgtctggaaaaagagctggtacacaacgtagcactgcgtgttgaacaaacggaagatccagacaaattccgtgtttcaggccgtggtgaacttcacctatcgatcctgatcgaaaacatgcgtcgtgaaggctttgagctggcagtatctcgtccagaagttattctgaagcacgaagacggccaactgatggaaccgtttgaaacggtcaccatcgacgtgcaagaagagcaccaaggcggcatcatggagaaaatcggcatgcgtaaaggtgagctgaaagacatgtctccagatggcaaaggccgtatccgtatggattttgtgatgccttctcgtggtttgatcggcttccaaactgaattcatgactctgacgtcaggttcaggtctgctgtaccattcatttgaccactacggtccacacaaaggcggcgtaatcggtcagcgtgtaaacggtgttctggtttctaacggtacgggtaaagcgctaacgaacgcgctgttcaacctgcaagagcgtggtcgtatgttcattggtcacggtgttgaagtttacgaaggtatggtgatcggtattcacagccgtgataacgacctgacagtaaacccactgaaaggtaagcaactgaccaacgttcgtgcttcgggtactgatgatgcgcaggttctaacgccgccaatcattatgtctcttgagcaagctctggaattcatcgatgacgacgaactggtagaagtaacgccagtgagcattcgtatccgtaaacgcttcctgaccgaaaacgatcgtaagcgtgcttctcgtgatgcgaagtaa

SEQ ID NO: 41379 - DNA, 1410 bp, Vibrio cholerae
atgtcagtagaaaatgttttatcgctgatccaagaaaacgaagttaagtttgttgacctacgcttcacagacaccaagggtaaagaacaacatatctctatccctgctcaccaaattgatgctgacttcttcgaagacggtaaaatgttcgatggttcttctgtggctggctggaaaggtatcaacgaatccgacatggtgatgatgccagatccatcttccgctgtgctcgacccattcactgaagatgctacgctgaacattcgttgtgacatcttagaacctgcgactatgcaaggttacgatcgtgacccacgttctatcgcaaaacgtgcagaagaatatatgcgctctacgggtatcgcagacacagttcttgtcggtccagagccagaattcttcctgtttgacgatgtgaaattcgccaccaacatgtctggttcattcttcaagattgacgacgtagaagcggcatggaacacaggtactgaatacgaagatggtaacaaaggtcaccgtccaggcgtaaaaggcggttacttcccagttgctcctgttgactcatcacaagacatccgctcagcgatgtgtttgatcatggaagaaatgggtctggttgttgaagcgcaccaccatgaagtagccactgcgggtcagaacgaaatcgcgactcgctttaacacgctcaccacgaaagcagacgagatccaaatctacaagtacgttgtacacaacgttgcgcacgcttttggtaaaacagccacctttatgcctaagccactggttggcgataacggctcaggtatgcacgttcaccaatctctcgcgaaagacggcgttaacctgtttgcgggtgataagtacggcggcctatctgaaaccgcactgtactacattggtggtatcatcaagcacgctcgcgcgctgaatgcgatcactaacccatccaccaactcctacaagcgtctggttcctcactatgaagcaccagtaatgctggcttactctgcgcgtaaccgttcggcatctatccgtatcccagtggtaccaagcccgaaagcacgtcgtattgaagttcgcttcccagatccagcagctaacccatacttggcgtttgcagctatgctgatggcgggtcttgacggtatcaagaacaagatccacccaggagaagcgatggacaaagatctgtatgacttaccagcagaagaagcggcagagattccaaaagtagcggaatcactgcaacaagctctgcagtatctggatgcagaccgtgagttcctcactgccggtggcgtgttctcagatgacttcattgattcttacatcgcactgaagaccaaagatgttgagcgcgtgaacgttgctgttcatccacttgagtttgaactgtactactctgtgtaa

SEQ ID NO: 41380 - DNA, 1065 bp, Vibrio cholerae
atgagtgtgagtgcagaattaagccaaaccatcattaataatcaggtcacatcagtgctcattttggacgagtcactgatgattcgctacgccaaccctgccgctgaacagctgttttcacaaagtgctaaacgcttgatgcatcaaagcttaaatcatttagtgcaacactcctctctcgatttacaactgctcacgcagccactccagagcggacaaagcattactgacagcgatgtcaccttggtgatcgatagcaaacccttaatgctcgaagtcaccgtcagcccgatttcttggcacaaagagctgctgttactggccgaaatgcgcacgattggtcaacaacgccggctaacccaagaactcaatcaacacgctcagcaacaagcggctaagttattggtcagaggcttggctcatgaaatcaaaaatcctttgggtggtttaagaggtgcggcccagctcttagagcgtatgcttcccgatccggccctgatggaatatacccaaatcatcatcgaacaggcagatcgcttgcggggattggttgatcgcttactcggcccgcaacgtccgggggagaaaaaatgggaaaaccttcacctgattttggagaaggtgcgtcagttggtcgagctagaagcgggcgcgaatttggtctttgagcgcgattatgacccaagtctgccgaatattttgatggacactgatcaaatcgaacaagccttactgaacattgtcagtaatgcggcgcaaattttgactaaccaaacgcacggcgtgatcaccttgcgcaccagaacagtgcatcaagccaatatccatggtcaacgtcataagctcgtcgccagcatcgagattatcgataacggccccggcatccctcctgagctgcaagatacgctgttttatcccatggtgagtggccgcgaaggaggcactggcttggggttatccatttcacaaaacctgatcgatcaacatcagggaaaaatagaggtgcaaagctggccaggacgcaccgtgtttaccatttatttgccaattttgaattgctgttaa

SEQ ID NO: 41381 - DNA, 1164 bp, Vibrio cholerae
atgaatacagtagtgattgttgattgcctacgtactccgatgggacgctccaaaggcggtgcgtttcgccaccaacgtgcggaagatctttcagcacatttgatgaaaggcattctggcgcgcaacccacaggtcaatccaaaagagattgaagacatttattggggctgtgtgcagcaaacccttgaacaaggctttaacgttgcgcgtaacgcagcgctgcttgcgggtctgccaattgagattggcgcggtcaccgtcaaccgtttgtgtggatcgtccatgcaagcactgcatgatgcggcgcgcgcaatcatggttggcgatgcagagatctgtttagtgggcggcgttgagcacatgggccacgtgccaatgactcacggcgttgatttccatcctggcctgtctaagaacgtggccaaagcagcgggaatgatgggactgaccgcagagatgcttgggaagctgcatggtattagccgtcagcagcaagatgagttcgctgcgcgctcccatgcgcgtgctcatgcagcaacattagaaggtcgctttaaaaacgagattctgcccaccgaggggcatgctgccgatggcacgctgtttaccctcgattacgatgaagtgatccgcccggaaaccacagtggcgggattagctgaactgcgtcccgtgttcgatccggccaacggaactgtgactgcaggaacctcttcagccctttcggatggtgcttcagcgatgttggtgatgagtgagcaaaaagccaaagcgctcggtttaaccattcgcgcccgcattaaagcgatggccgtggccggttgcgatccttccatcatgggttatggccctgtacctgcgacccataaagcgctgcaacgtgcgggcttaaccatgcaggatatggatgtggtggaattgaacgaagcgtttgccgcacaatctctaccttgcgctaaagacttaggcttactggagatgatggatgacaaggtcaacctcaatggcggcgcgattgcgctcggtcatccactgggttgctcgggtacacgtatctcaaccacgctgatcaatttgatggaagccaaagatgcgaaatatggccttgctaccatgtgtatcggcttaggtcagggtattgcgaccatttttgagcgcccataa

SEQ ID NO: 41382 - DNA, 1362 bp, Vibrio cholerae
atgaaattcagtacggtaattctcgcggcagggaaaggaactcgtatgcactccaatatgccgaaggtgctgcatacattggcgggtaagcctatggtcaaacacgtcattgatacgtgtaataacctaggcgcgcaaaatatccatctggtttatggccatggtggcgaccagatgcagcaagctctggcgaacgaaaacgtcaactgggttttgcaagcgcagcaactgggaacagggcacgccgtagatcaggcctctccccatttccaagatgatgaaaaaatcttggtgttgtacggggatgtaccgctgatttctgaagacactattgaaagtttacttgaagcacagcccaccgatggcattgcactactgactgttgttctggaagacccaacggggtacggccgtattgtgcgtaaacgtggccctgtggtggcgatcgttgagcaaaaagatgccagtgaagagcaaaagctgatcaaagaagtcaacacaggggtgctggtggcgactggccgtgaccttaagcgttggttggcagggctaaacaacaataacgcgcaaggcgaatactacctgactgacgtgattgcggcagcgcatgatgaaggtcgtgccgtcgaagcggtgcatccttcacactcaatcgaagtggaaggggtaaacgatcgcattcaattggcacgtcttgagcgtgctttccaagcgcgtcaggccaagaagctgcttgagcaaggtgtgatgctgcgcgatcctgcacgttttgatctgcgcggaacactgcagtgcggttcggatgtggaaatcgatgttaacgtgattattgaaggcaatgtatcgatcggtaataacgtagtgattggcgcgggctcaattctcaaagattgtgagattgatgacaacacggtgatccgcccatacagcgtaattgaaggggcgacggtcggtgaaaactgtacagttgggccgtttactcgtctacgtcccggagcagagctacgcgatgatgcgcatgtcggcaactttgtggagatgaaaaatgctcgtcttggtgaaggctcaaaagccaatcacctgacttatcttggcgatgctgagattggcaaaggcgtgaatgtgggcgctggggtgatcacctgtaactacgacggtgccaataagcacaaaaccgtgattggtgatgatgtgtttgtgggttctgattgccagctcgtagcgcctgtaaccattggtaacggtgcgaccattggtgccggtacaaccctgacgaagaatgtcgctgaaggtgagttagtcatcactcgcgcgccagagcgcaaaattgctggctggcagcgtccggcgaaaaagaaataa

SEQ ID NO: 41383 - DNA, 1572 bp, Vibrio cholerae
atgcattgcagtcttgatggggattggagcatgcaacttaattccacggaaattagcgatctgatcaaacaacgtattgaatctttcaacgttgttagtgaagctcgcaacgaaggtactatcgtatcggtaagcgacggtatcattcgtattcacggccttgcagatgttatgcaaggtgaaatgattgaattaccgggcaaccgttatgcactggcactgaaccttgagcgtgactcggtcggtgcggtagtaatgggtccatacgcggatctgcgtgaaggcatgaaagtaacaggtactggccgtattttggaagttcctgttggtcctgagctgctaggtcgtgtagttaacactctgggtgagccgattgatggtaaaggcccaatcggtgcaaaacagacttcaccagttgaagtgatcgcaccgggtgttatcgatcgtaagtcggttgatcaacctgttcaaactggttacaaatcagtggactcgatgattccaatcggccgtggccagcgtgagctgatcatcggtgaccgtcaaacaggtaaaactgcgttggcgattgatgcgatcatcaaccagaaaaactctggtatttactctatctatgttgctatcggccagaaagcgtcaaccattgcgaacgtagttcgtaaattggaagagcacggcgcactgaaaaacaccattgttgtggtggcttcagcgtctgaatctgctgcactgcaatacctcgcgccttactcaggctgtgcgatgggtgaatacttccgcgatcgcggtgaagatgcgctgattgtatacgatgacctgtctaaacaggctgttgcttaccgtcaaatctcactgcttctgcgtcgtccaccaggccgtgaagctttccctggcgacgttttctacctccactctcgtctactagagcgtgccgctcgtgtaaacgaagagtacgtagagcgtttcaccaagggtgaagtgaaaggtaagaccggttctctaaccgctctgccaatcatcgaaactcaagctggtgacgtatcggcattcgtaccgaccaacgtaatctcgatcactgatggtcagatcttcctacaaactgaactgttcaacgcgggcgtacgtccagcggttgacccaggtatctcagtttctcgtgtaggtggtgcagcgcaaaccaagatcgttaagaagctctctggtggtatccgtactgctctggctgcttaccgtgaattggcggcgtttgctcagttctcttcggatctggatgaagcgaccaagcgtcagctgactcacggtcagaaagtgactgaactgatgaagcagaaacagtatgcaccaatgtctgtctttgatcaggctctggtgatctttgctgcggaacgtggctatctgacagacgtagaactgaacaaggttctcgacttcgaagctgctctactatcgtatgctcgtgctcattacgctgaattggcagcgcaaatcgacaagacgggtgcttacaacgatgagatcgaagctcagctgaagaagctggttgacgatttcaaagcaacccaaacttggtaa

SEQ ID NO: 41384 - DNA, 534 bp, Vibrio cholerae
atgtcggatttgactacaatcgcacgcccctacgctaaagcagcctttgattttgcggtagaaaaacagcaacttggccattggagccagatgcttgctttcaccgctgaagtcgcaaaaaacgaacaaatgcacgagctgttaaccagctcgggctcagctaataaattggctgagatttttattgcagtttgtggcgaacagcttgatggtcatggccaaaacctgattaaggtaatggcagaaaatggtcgtctgttggcgattcctgcgctttatgagcactttgctgtgctaaagcaggaacatgagaagaaagtagatgtggaagtgatttccgctactgaactcagtgaacaacagcgttcagaaattggcagcaagcttgagcagcgtttagagcgcaaagttcagctgaattgcagtgtagatgagactctgcttggcggagttattattcgagccggagacttagtcatcgataactcagcacgcggacgtttgaagcgtctgagcgatgcattgcagtcttga

SEQ ID NO: 41385 - DNA, 258 bp, Vibrio cholerae
atggaaactgtattgagcttctctgcaatcgctgtagctattattgttggtctatgtgcggttggtactgcgattggtttcgctgtattaggcggaaagtttttggaaggcgctgcgcgtcaacctgaaatggctcctatgctgcaagttaagatgttcatcatcgcaggtctgctggacgcggttccaatgatcggtatcgtaatcgctctgctattcacattcgcaaacccattcgttggtcagctagctggttaa

SEQ ID NO: 41386 - DNA, 813 bp, Vibrio cholerae
atggctgcgccaggtgaagcgctcacaccttccagttatatcactcaccaccttactaacctttcaacttacaagttggggctagtggcggaagagtcgagtttctggaatgtacacatcgatagcctgttcttctctgttttaactggactgatattccttggagtattccgtgcagtagccagaaaagcgacagcgggtgttccgggtaagctgcagtgtgctgttgagatggtggtagagttcgttgacaaaaacgtcaaagacactttccatggtcgcaatccactaattgctcctttggcactcactatcttttgttgggtatttttaatgaacttgatggaccttgtgcctatcgatttcttaccttacccagcacagcattggcttggtatcccttacctaaaagtggtgccgtcagctgatgtgaatatcaccatggctatggctctaggcgtatttgctctgatgatttactacagcatcaaagtgaaaggtctgggcgggtttgcaaaagagttggcactacacccgtttaatcactggatcatgattccgttcaacctattgattgaagttgtttcgctgctggcgaaaccgctatcactcggtatgcgtctgttcggtaacatgtttgcaggtgaagtagtgtttattctttgtgcggctatgctgccatggtacctgcaatggatgggatccctaccttgggctatcttccatatcttggttattttgatccaatcgtttgtatttatgatgttgaccattgtgtatatgtcaatggctcatgaagataacgatcattaa

SEQ ID NO: 41387 - DNA, 774 bp, Vibrio cholerae
gtgggtaaaatcgtagcaatcgccaatcagaaaggcggagttgggaaaacaacaacttgtatcaatctggccgcctctatggccgctaccaaacgtaaagtactggtggtcgatcttgacccacaaggtaatgccactatggctagtggcgtcgataaatatcaggttgactccacggcttatgagcttttggttgaagatgcgccgtttgaccaagtggtatgtcgcaaaaccactggtcactatgacttgattgccgccaatggcgatgtcactgcggctgaaatcaaactgatggaagtgtttgcccgtgaagtgcgcttgaaaaacgcactcgcctcagtgcgtgataactatgatttcatctttattgattgtccgccttctttaaaccttcttacaatcaacgccatggcagccgccgattccgtgttggttcctatgcaatgtgagtattttgcgttggaaggcttaaccgcgttaatggatacgatcagcaaactggccgccgtggttaacgataacctcaaaattgaaggtatcttgcgtaccatgtacgacccacgtaaccgcttggccaatgaagtttctgatcaattgaaaaagcactttggtagtaaagtgtatcgtacggttattccacgtaatgtccgactggccgaagcgccaagtcatggtaaaccagcgatgtattacgataagcaatcggccggggctaaggcctatttagcgttagctggtgagatgttacgtcgcgaagagattcccgcataa

SEQ ID NO: 41388 - DNA, 633 bp, Vibrio cholerae
atgaatccgttacgagtcaaactcgacgccttgatcagcaaaaccagcttaacggtgacagagcagcaacgtgagcagctcgttgggtatgtgcagctgctcgacaaatggaacaaagcttataacctcacttccgtgcgggatccgatggaaatgttggtgaaacacattcttgatagtttggtggtcagtccgcatcttgtcggtgagcgctttattgatgtgggttctgggcctggattgcctggtattccgcttgcgatcatgcacccagataaagagtttgtgctgatcgatagtcttggtaaacggatccgttttctaaaacaggtgatccacgatctcaagatcaacaatgtgttacccgtgcagagtcgagtggaagagtttgatcctgaatccggttttgatggcgtattaagtcgcgcttttgcgtcgatgaccgacatggtcaactggtgtcagcatctaccaaaaccgaatgctggggtatttttagccctcaaaggagtacggcctgatgatgaaatcaccctactccctgagtggtgttctgtgaccgatatcaaagctttgcaagttcctgagttggaaggtgagcgtcatcttgtaatcttatcgcgcaagggataa

SEQ ID NO: 41389 - DNA, 1896 bp, Vibrio cholerae
atgctttatcacgaaacatttgacgtcattgtggttggtggcggtcacgcaggaacggaagccgctctcgctgcagcacgtacaggacagcgtacgttacttcttacccacaatattgacaccctaggccaaatgtcctgtaaccctgccattggtgggatcggtaaaggtcatttagtcaaagaagtggatgcaatgggcggtttgatggcgcaagctatcgatcacgcaggtattcaatttcgtacactgaacgcttcaaaagggccagccgtgcgtgcaactcgtgcacaagccgatcgtgctctgtacaaagcctatgtgcgtaatgtgttagaaaacaccccgaatctcaccctgttccaacaagcggtagatgatgtgatcgtcgagcatgatcatattcgtggtgttgtgactcagatgggcctgaaatttcatgccaaagcggtagtgttaaccgtcgggactttccttggcggtaagatccatatcggccttgaaaactatgctgggggtcgtgctggggatccaccatcgatcgctttggcgcaccgactgcgtgaactgccatttcgtgttgatcgcttaaaaaccggcacaccaccacgtatcgatgccaatagcgttgatttctcggtattggaagcgcagcacggtgataatccgaccccagttttttccttcatgggcaagcgtgagcaccatccacgccaaattccgtgttacatcacgcacaccaatgagcgcacccatgatgtgatccgcgctaaccttgatcgcagccctatgtatgccgggatcatcgaagggatcggcccgcgttactgtccatcgatcgaagataaagtgatgcgttttgccgataaagacagtcaccaaatttttattgagccagagggtttaaccaccactgaactctatccgaacggcatttccaccagcttgccatttgacgtgcaagtgcagatcgtacgttcaatgaaaggttttgagaacgcacatatcgttcgtccgggttacgcgattgaatacgacttcttcgatccacgtgatttgaagcaaacgtatgaaaccaaatatatccatggtttgttctttgcaggacaaatcaacggtactacaggttacgaagaagccgctgcgcaaggcttgatggcgggtctgaacgccagcttgtacagccaagacaaagaaggctggagtccacgtcgcgatcaggcgtacatgggcgtgttgatcgacgatctttcgaccatgggcactaaagaaccttaccgtatgttcacttcgcgtgcggaatatcgtctgctgctgcgtgaagacaacgctgatctgcgtttgaccgaaaaagcgcgtgagcttggccttgtggatgatgcgcgttgggcacgtttcaaccaaaaaatcgacaacatggccaaagagcgtcaacgcttacaagaaacttggatgaatccaaactcggttggcgtcgaacagctcaataccctgctgaaaacgccgatgtcgcgtgaagccagtggtgaagacttactgcgtcgccctgaaatgacctatgagctgctgaccactttgccggcttttgcccctgctttggaagatgcagaagccgccgaacaggtagagattcaagttaaatacgatggctacattcagcgccagcaagatgaaattgaaaaatcgctgcgccatgaacataccaagctgccagctgagcttgattataagcaagtcaaaggtctttcaaacgaggtggtattgaagctcaatgcggctaaaccagaaaccattggaattgcatcacgtatttcaggtatcacgcctgcggcgatttcgattttgctggttcacctgaaaaaacacggcatgctgaaaaagggagaagcggcgtaa

SEQ ID NO: 41390 - DNA, 720 bp, Vibrio cholerae
atgggaagaagttttgaagtgcgcaaagcctcaatggcgaaaactcaaggcgcaaagattaaagtttactcaaaatacggtaaagagatttacgtttgtgcgaaaaacggcggtactgaccctgacatgaacttatcgctgcgtcatctgatcacgaaagcgaaaaaagaccaagtacccgcacacgttatcgaaaaagcactggataaagccagcggtggagcaggtgaagattaccaaccagcacgttacgaaggtttcggccctggtggcgcgagtgtgatcgttgactgtctaacggacaacggtaaccgtacctaccaagacgtgcgccaatgcttcgtcaaaacgggcgcgaaaattggtactccaggtgtggttgcacacatgtttgatcaccaagcggttttccaattccaaggcgatgatgaagaagctattcttgaagcgctgatgatggctgacgcggaagtgacagacatcgagcatgaagatggtgtgatcactgtatttgcacctaacaccgaattcttcaaagtgaaaactgctctgaacgaagcattcccagatctgactctggatgtggaagagatcactttcgttccacaaaaccgcactgttgtaagcggtgaagacgcagaaaaattccagaagttcctcgatatgctggatgactgcgatgacgtacagcaggtttaccacaacgcggatatcgaataa

SEQ ID NO: 41391 - DNA, 2085 bp, Vibrio cholerae
atggcgacattagcgtacagcattgaggtggaagggctggaagatgagactctggtggtcagaggctttcacgggcaggagtcactctccaacagtgtttttttagggcaagcctgttacgggtttcgctatcaaatgcaactggcgagtcgggtatccaatctgactgccgaccagatggtcgataagcgtgctgagctcaagctttaccgcaactcacaattggtgcagcgtgtgcacggcattgtacgtgcctttagccaaggcgatatcggccatcaccacaccttctaccaactcactttagtgcctgccttagagcgcttatccctgcgccacaatagccgcattttccaaaagcagactgttccagaaattctctctatcttgctgcaagagatgggcatccacgattacgcttttgcgctcaaacgtgattgcgtgcagcgtgagttttgtgtgcagtaccgtgaaagtgatatcgactttctgcaccgcctcgccgctgaagaaggcttggtgtacagctttgtccatgaagcgggcaaacataccctctatttcagtgatgccagtgacagcctaagtaaactgccggagcccatcccgtacaacgccttagcgggcggcacgatggatacaccgtacatccacggcttaacctatcgcacccaagcggaagtgagcgaagttcagctcaaagattacagcttcaaaaagccggcgtactcgtttttacaaaccgtgcagggtactgagctggattatcagcaaacgcgctaccaacattttgatgcgccggggcgctacaaagacgatgtgaacggcgccgcctttagccaaatccgtttagactacctgcgccgccatgcccacaccgcaacagggcagagcaacgagccgctgctgcgtgccggctataagtttgacctgcaagagcatcttgaccctgcgatgaaccgcgattgggtggtggtctctattaaccatcaaggtgagcagccgcaagcgttacaagaagagggcggcagtggtgcaacgacctacaacaaccagttcagcttaattccagggcatctccactggcgcgccgagccacaacccaaaccgcaagtcgatggtccaatgatagccacggtcgtcggtcctgaaggcgaagaaatcttctgtgatgaacacgggcgggtgaaaatccattttccgtgggaccgctactcgaacggtaacgagcaaagctcctgttgggtacgggtgtcgcaaggttgggcgggcagtcagtatggctttatcgctattccgcgcatcggtcatgaagtgattgtttctttcttaaatggcgacccagaccaaccgattatcactggccgcacctatcatgcgaccaatacgccgccatacactttgccagagcacaaaaccaaaaccgtgctgcgcaccgagacgcaccaaggggaagggtttaacgagctcagttttgaagaccaagcgggcaaagagcaaatctacctgcatgcgcagaaagacttcgatggtttgattgaaaacgaccacaccacggtcattcgccacgaccaacacctgaccgttgaaaacgaccagttcactcagattaagcacaaccaacacctgacggtcgagggggagagtcgtacgctcgtcaaactcgactgcagcagcgaaatcggcggttcattgcagcaaaaaatcggcagcaaagcgatttacgatgcaggcacagaggttcaccttaaagcgggtaacaaactggtcttggaagcaggcaacgagcttaccatcaaagccggcggcagttttattaaagtcgatgctggcggtgtgcacgtcgtcggctctgctattaacctcaactccggcggcagcgcaggcagcggctcaggctatggcggtaaaatggccgagttgccacaaggggtggataaagccaaaacgccgcaagagattgagctagccgcggtaactcccactcagcagtctatgtcgcctttacttaaggcgcgacaaattgaagcactcaaaggtcctgcacctgtgtgtgaagtgtgtgaagaggccaagggaaattaa

SEQ ID NO: 41392 - DNA, 1041 bp, Vibrio cholerae
ttgccgagtgtcgttatgtcaaaccatcagaaaatcgccagccttgaacttgggcgagtgatcgccatgctggccattattgctttgcattgccaactgtttaccacttattggttcctcgatgatgaaccgtgggtagcttatttatttaaccaatccacccgctttgctgtgccactgtttttccttatttcaggctatttaattcaacccaaactcagccacaacccaatgcaaaccttgcgtaattactgctcgccattactgaggatatgggtgatttggagtgtaattagcctattaatgcccttcaatctcgaagtgatggtcaatcaaggctaccttgccgaacgctctggctattggggatttttgctgcaacacccgcttaactcactgtttgaaggcggactggtacacctttggtttttacccgcactgatgattgcggttgccatcatggcactgttgatccgccaacaaaaaacacactggatgctaccgattgccatcgggttatacctctacggtgaatttgcaggaagcagcgccgtcgtcactggcatgagcgcgcccatctatactcgtaacggcccatttttcagcaccttgtttgtcgtggtcggttatctgattcgtgaaaggcacatcctgtggcaatcgcgctctgcgttgttattggcgatgctgggaatggcttttcacttcgtcgaagcctatggcttacatcagtatgggcaggtgtttaacaccaatgattatctgtttggcaccactttgtgggcgattgggctgtttcttttcctactcgctaaacccgatctaggccggaagccttggggattttcactgtcacaaagcatcctcggcttttacgtcagtcacttgttagtggtgatcatgatgatgaaccttgccagatttttagggcttgctggattagaaaaagacacactggttctatttggcactttgctcaccacttatctactcgttaaaggcttagaacgtacaccacttaagcacctgttatttcgatag

SEQ ID NO: 41393 - DNA, 921 bp, Vibrio cholerae
atgtggtggaaagtttgggtaatcggttgtgcattggcggtcagttggagtatcaatgccgccgtgtttgatctacctatcgaaggcagtagcatagtcggtaacacgcaatatcataaagttgagaaaggcgagactttagccgacattgcaaaaaaatacgatattggcttcctagcattaatggctgccaatcgtggagtcgaccctttcttaccccaagaaggttttgtcatctctatccctgcaaagatcattttgccgaaagtggcctatgaaggcattgtgattaaccttgctgagttacgcctttactatttccgtcctaatgaaggtaaagtgcatatcttccccgtcggcattgggcgtatcggccgcgatacgcctgtgatgcaaacgtcaatcagcagcaagcgcaagtacccaacttggacgccgccagcatcgattcgcaaagaatacaaagctaaagggattgatttgccgccagtcgtgcccgcaggcccagaaaacccgctcggtgattacgcgatgcgtttggcttatggttctggagaatatctgattcatggaaccaacaaagattttggcgtaggcatgagggtgagtgctggttgcattcgtatggatccgaaagacattgagtggctttaccaacaagttgaacgtggagaaaaagttcggattatcaacgaaccgatcaaagttgcgcttgaacctgatcgtagtgtgtttattgaagtgcatgagccgcttacccgcagcaatggcgtgaagaaaaacttggtggtaccagaagagctgagttggtggctgcaagagcataaaatctctgatgcaaaagcgcgcgccgcagttttagcacaaaatggggttccggtcgaaattgctccaccacagtgggaaactatcgcccagtaa

SEQ ID NO: 41394 - DNA, 2142 bp, Vibrio cholerae
atgaagctttctccagtatcagctgcggtacttagcgtactcgcggcagggttcgctcatgccgaaactgagcctagccactacgaagaagtggtggtgacggccaatcgcattgagcagcctttgtcagaagtggcgggctcagtggcagtgcttgaaggggaaacccttgaaaagcaaggcaagaccgagttgtacgatgcattgaatcaagagccgggtgtcagcgtgactggcggagcgggacgcccacaaaatattacgattcgtggcatgaccggcaaccggatagcgattgttcgtgatggcattcaaagtgcggatggttatggcgctgcagatattaacgacaagtatggccgtaacacatttagcctgagcaatgtgaaacagatccaagtggtgaagggcgcgagttcaaccctatacggttctggtgcgattggtggcgtcgtgatcatcgaaagtaaagcgccggaagattatttgtaccaccgtgattattacgtggatgccgcattgacctactcaggcatcagcaaccgctaccaaggtaaccacgcgttagccatgcgtcacggtgatggcgaggcgctgctcacgatcgactactggcaaggtgaagagacacgtaactttaatcaagatctgtataaccgcgaagtggatggttacaaccttgggttctcccatcattattggttaaacgatgcgctgcgtttaaaaacgcacttagagtattttgatgattatgccaagcgtcgcgaaggcacctcttctatccaaaaagatgacaagtgggatctggtcagcttttacgagtatcaacgcagccaaacgcgtctggccagcgttggtgccgattacacggctaatctaagttggatggatacgctggaaggaaaattctactggcgcagtacagaaaacatcacacagacgaaccgtttgatggcgaatgatcggtctggcgctggcatcctctcctatcgtcgtgaactgcgtgatgaagggttcaatgatgaggcgttaggagccacgctcaatgcgcaaaaagagtggcaacaaggtgagtggctgcatcagtttgcttacggtatgagcgttgatggtcatgattaccagcgtccgaaatcgattcgacggatggaatcttcaggtgacgatttacaagccgatgagccgtttgctcctgcgcgtgagtaccgttttggcgtctacggacaagacaatctcctcttaggcgattggacgctggctgcgggtttgcgttttgatgcgcaaaaattgagccctaaaaataccgatcgtattcatggctacaaagtggtgaccatggggagcagtgagtggtcacccagtgcctcaatctcttatcaatggcatccagaatggaatacttacctgagctacaaccacggcttccgtgcgccaagttatgacaaagcgtatggcgcaagcgatcacagttttgtcccgctaacgccatttattatcaagcccaacaataagttacgcgctgaaaccagcgacagtttcgagttgggcagcaaatacgacaatggtcagacgcaattttacgtggccgtgttttattccatcttcgataactttattgatgtcaaacaagtcggttatgacaacgccacagggtcggtgattcagcagtaccaaaatatcgcgggcgtcaaaacctacggggctgaaatgtcggtaatgcatcgtctagatgatcgttggagtgtcgaaaataagctcggatacgtggatggtaaagatggtgaaaaccaatacgtgcgcaccttaaccccactagaagggagtgtgcagctcaactaccaaagagagcgatgggacgcttacagccgcctgaactgggcgagtgccatgagccgagtgccgacttgcaccacagagcaaggcaaagaaactgaatgtgccacgaccacaggttgggtgagttgggacatcggcctcaactaccaatggaacgcacagctgagtgccagtttcaacgtggttaacctgctcgatcgagaatacacgcgctatcaagatgtcgctggtgtgacgccaagtgacaccctctattccacggagccgggacgctatttcaccgtgcacgctaagtatgtgttctag

SEQ ID NO: 41395 - DNA, 984 bp, Vibrio cholerae
ttgcccgacccaaattgggtcgggtactttgtttacatcgaccttagttcgataggtgattttatgaccatcgcaacaaatagtgacaagcttatggataatacctctatgcgtagtttgcgtgagcaacgacgtgttgactggaaagaacgtatctttcacggtttgtttatgaccagtgccgtaatcggcattttatctctagccatcattgcttacttcattgttcgtgaaagtatccctgctttccaagaagcgggagtcactggcatagtgcttgggcaagactggttaccacctgccctatacggtgtcgcgaccatgattgtcgcttctgtcgtctcaacctttggggctgtgattgtgggggttccggttggtgttctcacggctatttttatcgctgaagtggctcccaaacgggtggcggatgtgatacgccctgcagttgaattgctcgccggtattccttctgtggtctatggcttctttggcttggtgatcatcgttccgctgattcaagatgtctttgatgtacctgcgggtaacacgattctggcaggtatcatagtgttgggcgtcatgatccttcccaccgtgattacggtctctgaaacttcgattcgcgcggtaccgcgtgcttacaaagaaggttcactcgcactgggtgcttcaagcatctacaccatcttcaaactgctggttcctgctgcgcgctccgggatcatgacgggcgttatcttgggtattggtcgcgctctgggtgaaaccatggcgatcatcatggtgatgggcaatgctcctgcgatgccagaaggcctacttgattcggcgcgtaccctgacagccaacattgcgattgaaatgtcttacgccagtggcattcatgctaacgcactctacgccacaggtgtggtactgctggtgttcatcatgatgctgaacggtgcgttgctgtatttaaaccgtgagaaagcgaggtaa

SEQ ID NO: 41396 - DNA, 1662 bp, Vibrio cholerae
atgtttgccatctatgaatcctataaagccggtcagttgcaacccaaacaatgggtcaacaatattacagcggggttgatagttggggtggtggcactgccgttagccatggcgtttgccattgcatcgggagtaaaaccagaacaaggaatttataccgctatcatcgcagggattattgtttccctgtttggtggttcacgcgtacaaatcgccggcccaaccggcgcgtttattgttattcttgcaggcatcgtagccgaacacggcgtggctggattacaaattgccaccatcatggcaggctttattctcgtggtattggggctcgcacgattaggtagcatcattcgctatattcctgacccggttatcgtcggttttacttcaggcattggggtgatcatttgggtggggcaatggcgtgacttctttggccttcctgaaattaaaggtgagcactttcatcaaaaactggtggcgatttttcatgctttcccacaattccatctcacaacaacactgctggctttactgtctctggctttagtgatttttgggccaaaaattcccaaactctcaaaaattccggggccgcttttagccctggtggtggtcacgtcgctgcaatatgtggtggggtttgaaggcgtcagaaccattgggtcagcgtttggcggtattccacaaggcttacctgagtttgcgctaccggatcttagcctaagccaaatgattcaactgattggtcctgcctttgcaattgcgatgttaggtgcaattgaatccttactctccgccgtagttgctgatggcatggctggcaccaaacacaactcgaaccaagagttggttggacaagggattgcgaatattgtggcccctctatttggtggtattgctgcaacgggtgcgatcgcgcgaaccgcgaccaacattcgtaatggcggcaatagcccaatcgctggagtcatgcacgcgctgacgctggtcattattctgctcgtactcgcacctttggcggtgaatattcctctcgcgacgttgagcgcgattctatttgtggtggcttggaatatgagtgaagcgccgcactttgtccaactggctaagcgcgcaccgcgtgctgatgtggcgattctactgctcaccttcggtttgaccgtgtttgccgatctggtcgtggcagtcaatatcggtgtgatcattgcgatgttgcactttgtaaaacgcatggcatcgagcgttgaagtaaaggccaacggctcgcaagagatgagctacgaactggcacaacacggcagaagtacactgcctcgtgaactggcggtgtacgcgctggaaggccccttcttctttgctgcagcagaaacgtttgaacgtgtgatgggcagtattcaagaaacccctcagatcttaatcttgcgtttaaaatgggtgccttttatggatataacgggtattcaaacgctggaagagatgattcaaagcttccacaaacgtgggattaaggttttgatttcaggtgctaatagtcgagtctcacaaaaattggtcaaagcaggcatagtcaaactggtcggcgagcagaatgtctatcccgtttttgaaggcgctctcagcgcagcattaacggaaattgaagcccaacccaccgagtga

SEQ ID NO: 41397 - DNA, 1293 bp, Vibrio cholerae
gtgatatctaaatctattattttgcgattttctgagctttcaatgcgaaagaaagcgacactagtaggtttgccgcttttggctgtggccgcgatatcttcttcgctaaacagtcccacgcggcaacaacgtattgagttgtctcttccagaatctccgctcgtacagttctcttcagcagaacatactgtagaagtggtcaaagtgggccatccggattatgaatatgaaatcaagccgggtgataacctaagtactatctttaatcagcttggttttgcttataccgagctaatgaaagtcatggaaactgacttaaactacctcgctcttgatacgttacggccgggtaacgtgctgcgtttttggaaaggcagcgataacaccttggccaaaatggagctggaatttagcctcgttgaccgcgccgtttatacgcgtttaaacgatggtagctacgaatttgaagagcgtaaaattcctggtacgtggaaggttgagccgctgattggtgaagtggacggtagcttttctctctcggctaatcgtgctggccttggtgccgccgatgttgatcaaatcgtcactctgctgaaagacaaaattaattttggccgtgatttgcgtcgtggcgatcgctttgaagtcgtactatcgcgtcagctcgtcggagaaaagctcaccggtaattctgaaattcaggcgattaaaatcttcaaccgtggcaaagagattaccgcgtatctgcaccaagacggtcagtattacgataagaatggtgatagcttgcaacgcgctttccaacgttatccggtggacagcaagtggcgtatttcatcaaactttgacccgagacgtctgcatccagtgaccaagcgcgtagcgccgcataacggtacagactttgcgatgccaattggtactcctgtgtatacctcaggtgatggtgttgtggtcatgacacgtaatcacccttatgcgggcaactatgtggtgattcagcacggtaacacttacatgacgcgctatctgcacttgagcaagattttggtcaagaaagggcagaaagtatcgcgtggtcagcgcataggattatcgggtaataccggccgtgtgaccggtcctcatctgcactatgagttaatcgtgcgtggtcgtcctgtcaacgccatgaaagccaatatcccgatggcaagttcagtgccgaagaaggagatggcgcagtttattgccaagcgcaaagagcttgaccagatgttagctcgccaagaaagcatgctagcagcgcaataa

SEQ ID NO: 41398 - DNA, 717 bp, Vibrio cholerae
atgattgtcaccattgatatgatctgtttgcgccttgcccccaagggcattgagaccttgttggtcaaacgcagcaatccaaaccgccctgattgcggtctttgggcgattcccggtggttgggtgtttgatgaggatctcagcgcacaaggtggcgaacccgctgacaaagattttgattccgcgcgtcggcgcatctgccgccagaaaatccatacttaccccaacttcatcagtgatcctttggtggacggtaatcctaaacgcgatccaagcggttggagcatcagtatttctcactatgccctgctcaatcattccaacgtcacgcagattgaagaggctgagatggataagagccgtgttaattggtttgcactagagacgattttgcaaggtaaacaagttctggcgtttgatcatgtggcgcaaattcagcatgcatggaaaaaactgcgcgcagcggttgagtacacttctgtagtgctgttctcacttgagctggagtttttggtggcggacattattgaggcttacgccaaatttggagtggacgtcaatcgcatgacggtaaaacgtcggctgatcgataccggggtaattgtcagtaccaataaaattgccgcctctagcaaaggtaaaggcggcaaacctgcgacggtttatcgcttagccagtaacgaagtcatctattttcagacttgcttgcgtggctaa

SEQ ID NO: 41399 - DNA, 1308 bp, Vibrio cholerae
atgaatccacgcctgttttctccccacatcattcgtagcctgctcgatcttgatgcttataaaatcaatatgatgcaagcgatacaccatttttatccggatgtgtcggtgcgctatgaattgattgtacgcagtgaagaggatgccagcggacttcttgatgccatccgtcaagagatagctcatcttggcacattgcgtttttcggatgccgatattcattatttgactcagcatgcgccacatctcaaggcgaccttcttgcaatcgttgcgttatttccattttgtgcctcaagagcaagtagaaatggggattgtcaaacaaggcggaaaacagcaactgcggatcagtattcgtggcagttggcgtgacacgattttgtatgaaaccttagtcatggcgatcgtatctgaagtacgcagccgtcagcgttgggctgaggtgcctgctgatttaccactgaaggtgctcaaaaccaagcttgaccaattaaaagcggagattgagcgtcgtgggatcaacaacttttctttgaccgaaatggggacccgccgccgcttttctagccaagtacagcgtgatgtgttggcttgtcttaagcaagagatcccacaatgggtgctgggtaccagcaactaccatttcgctcgtgaatttgatttaaagccgattggcaccatcgcccatgaatggtttatggggcatcaagctttggttaatgagcgcgattcacaacaagtggcgctagagcgctggttgacggcgtttgatggtatgctcgccattgccccgaccgatactttaaccatcgatgcctttttaaatgatttcaaccgtcatctggcaaacgcttatgatggagtgcgccatgattcgggctgcccattccgttggggcgataaaatgattgcccactaccagcagttgggtattgatcctaccaccaagcttttcattttctcggatggtttagatttcgatcaagctctggaactgtgtgaatattttgctggacgggtgaagatttctttcgggatcggcacctttttaaccaatgatttagcaaattggcgcaacgcggcgggtgtggagtatcgcccactctcgattgtgattaagcttgctgagtgtcaaggtcgcccggtggcgaaaatcagcgatcaaccggaaaaagccatgtgtgaagatccaatctttttggccaatctcaaacggcgctttaacatcgaattggatgtggatgcgcttatccaagagctgcgtcatcaaaagcgttcaccacgacactatatttcagcggcctaa

SEQ ID NO: 41400 - DNA, 1041 bp, Vibrio cholerae
atgcccaataccccacttaaggttggcgttatcggttatggatactctgcaaaaacgtttcatttgccgtttattgacacgttagaatcgctcaccttaagcgcgatcagctccagccagcagcaagtggtacaagaagattggccacagatcgcctactttgattcggcgcagcggctcatcactgaaagtgatgtcgacttggtgattatcaccgcgccaaataatgtgcattttcctctggcgaaactcgctttagagcatggtaagcacgtgattgtcgaaaagccgtttgtgacgcagattgaacaaggccgcaccttaattgaacttgcgaggcagcaagggctgctattgagtgtcttccacaatcgtcgttgggacggggattttttgacggtcaaaaagctgattgagcaaggacaactcggtgacgtgaaggtattcgaatcgcactttgatcgctatcgtcctgtagttcgtcagcgttggcgggaacaagcgcaagaagggggaggcattttgtttgatttagccccccacttactggatcaagccctagtgttgtttggtcttccgcagtcgttatccgcagattgccggatgatgcgaccagacgccaccaccctagattactttgatctgcaattgtattacccacagcatgtggtgcgcttacacgcgaacttgtatagcccagagcctaatgtgcgttatcaagtcctcggcagcctaggtaaatacgtgaagtatggattagatccgcaggaagatcgtttgaaagccggagagcgtcctactcaccctcagtggtcgcaggaaatgcccgaacaatatggcatcttgtatcacgcagaggggaatgaaaacgtcatcactgagcttgggggctatcagcactatttcacacaagtggttgaggcaatccgaaatggtgcatccaatcccgtgagtgcagagtcggcgctgcaatcgatccaactgattgagctagcgttagaaagtagcgccaaaggccaacgcttagcggtgactctctaa

SEQ ID NO: 41401 - DNA, 3054 bp, Vibrio cholerae
atggcaaggttacagtttcaattaaaggtggatggccttgaggatgaatccctcgtcgtacgcggatttgaagggcaagagtccttgtctgattctgtatggcgctgtgaaccctgctatggttttcgctatcaggttgatttagccagtgcgctaagcaaccttactgctgagcaatttgtcgaccaaaccgcgcatttaaccattctgcgtgacgggcaagtggtgcagcaaattaacggtatcgtacgccaattgagtaaaggcgatactgggcatcggcacacgttttattctcttacgttagtacctgcgctggagcggctttctttacgcagtaatagccgtattttccagcagcaaagcgtgccggaaattatctctattttactgcaagagatggggattgaagattacgcctttgcccttaagcgtgagtgtgcccagcgtgagttttgtgtgcagtaccgtgaaacggatttgcagtttttacaccgtatcgccgccgaagaaggcttggtatacagtcacctacatgaagcgcagaaacacacgctactgtttaccgatagctcggacagccaaccgaagttagccaagccagtaccttataatgcgctggcgggtggcgagatcaatctcccttatgtggtcgatctgcaattcaagaccaccgcacaagtcagccataccgagctaaaggattacagctttaaaaagccagcttacggatttactcagcgcacgcagggtaaagatatcgcttatcagcagccaaattatgagcattttgatgctccgggacgctacaaagacgatgcaaatggcaaggcctttagccaaattcgcttagagtatttacgtcgcgatgctttgcttgctgatgcgaagagtgacgaacctttgctgttggcgggagtgcgttttgacttgcaagatcaccttgatcacgcaatgaatcgagattggctcgtggtacaagccaatcaccaagggacgcagccacaagcgttacaagaagagggtggttcaggcgctaccacttacagcaatcagctaaaacttattcccgctcacatcacttggcgagcaaggccttgtgctaagccgcaagtggatggtcccatgatcgccaccgtggttgggccacaaggtgaagagatttattgcgataactttggtcgcgtgaaagtgcatttcccgtgggatcgctactcaagtagcaacgaaaaaagctcttgctgggtgcgagtggcacaagaatgggctggtagccaatacggtagtatggcgattccgcgagttggccatgaagtgattgtttcgttcctgaatggcgatccggatcaacccatcatcacaggtcgtacgtatcatgcgaccaataccgcgccttacgccttgcctgaccacaaaaccaaaaccgtgctgcgcactgagactcaccaagggcaaggctacaacgaactgagttttgaggatcaagcgggcagcgaacagattttgctgcatgcacaaaaagattgggatgcgttgattgagcatgatcacaccgaagtgattcgccacgatcaacatctcactgtggacaatgatcgctttacccgcattcagcgcaaccaacatttaacggttgaaggtgaagtccgtagcaaaatcgcactcgatagcagccatgaagtcggcgcgtcactacaacacaaagtcgggcagcgcattgctgtcgaggcgggtaaagagatttcactcaaaagcggcgcaaaaatcgtggttgaagccggagcggagttaaccctaaaagctgggggcagttttgtaaaagtcgatgctggtggcgtgcacttagtcggtcctgccattaacctaaacgcgggcggcagtgcaggcagcggtagcgcttatggcgggcaattagcggcagcaccgagaatgttagcgcaagctaaaccagtagcagaattggttcagccggatattgcggcctcaatgcaatcaggcgcggcgcgtgttattgatgtggcatcactccccacaatgatgccgagttcagccaataacacggcaaatgatgagcctgtggccgaagagaaaacaccggagcgaattttaaaatccgatctcctcaaaccatccgatgagttagagaaactcgccaagcgacaagcgagtgcttatcgtcaaggtaatcacagcgatgaggttaagttactacaagaagcgctcataaaattggggtttgatctcgggaaagcaggagctgatggtgactttgggagcaaaactaaaaccgcgattgagcagttccagaaaagctatcaaccaagccaccaaacccacccgtcttacagcattggcgctgttgacggtattgtcggcaaaggtacactactggcactagacgaagccttgatggatgggtgggtgtatgagaataatatttatcaaatatggcctctaggtaaaacgtcagagaaatatgagtcggcaggaagaggcccaggggttatatcaacaggaaatggagattatggtggggcttcatatggttgctatcaaatgtcatcaaatcttggtgtggtacaaaaatatattcagtcatcaaaattcaaagaattctttagtggattaaatcccgctacgaaagagtttaatgttgtttggcaggatatagcttcaagatatcctcaggaattcagagaagaacaacaccaatttattaagagaactcattatgatatacaaataggacatcttagagggaaaggacttttgtttgaacataatcgagctgctgtacatgatttgatctggtctacttcagtacagtttggtgggagaactaatttgattttcaatgcattgaatggacaaaatatggaaagtatgactgataaggacatcattattctggtacaagattacaagcttgttaatacagaaaggctttttaagtcttcgccatcatggtggagtgatttaaaaaaacgtgcggtatcagagaaaaaagctttacttgaactagaaattgacggtttggaggttgatataaaatga

SEQ ID NO: 41402 - DNA, 471 bp, Vibrio cholerae
ttgaaagtgatgctgtcgttattcaaacgtgaatcaataaaaggtatcaccatgaaaaaaagtaccctactaaactctgaactctcttacttggtggcaacactcggccataccgatgaaatcacgatctgtgatgctgggctgccaatccctgatgaagtgacgcgtattgatctcgcgctgactcacggggtgccttcttttttggaaacagtacgggtgattttgtctgaatcgcagattgaaagtgtcatcgtggcacaggagtttgctcaagtaagcccggtgttgcatgaagccttatatcgcgagctgaaagcagaagaacagttgtgcggtaagccaattgccatccaatacatcagccatgaagcgtttaaacaacgcacgctgcaaagccgcgcggtagtgcgcaccggtgaatgtacaccttacgccaatgtgattttccaagcgggtgtcgtgttttaa

SEQ ID NO: 41403 - DNA, 999 bp, Vibrio cholerae
atgaaacaaggatacagcatgagtacccgaaccatgactaatacgacatctgataaccgtaaaaaactgctcagcaaagagtggttgattgaacaaaaatcgctgatcgcactgctgtttttagtggttgtcgtctctttcttaaacccgaattttttcacggttgataacttactgaatattctgcgccaaacttcggtcaacgcgatcatcgcggtgggtatgaccttggtcatcttaaccgcagggattgatttgagcgttggctcagtattagcactgtgtggcgcttttgcggccaccttagtggcgatggaagttcctgttctggtagctgtgcctacggctttgctggctggtgctgcgcttggcgcaatcagcggcatcatcattgccaaaggcaaagtgcaggcctttatcgcgacgttagtgacgatgactctgctgcgcggtgtcactatggtgtacaccgatgggcgtccgatttcgaccggattcactgatacggcggacacctttgcatggtttggtacaggctacacattgggcattccggttccggtatggctgatggtcgtggtatttgccggcgcttggtacttgctcaatcacactcgctttggccgctatgtgtatgcagtgggcggcaacgaatcagcaactcgcctttcaggtatcaacgtagatcgcgtcaaaatcggcgtgtatgccatctgtggtttactggctgcgctagcaggcatcatcgtcacatctcgcctttcttctgcgcaacctactgcgggtatgggctatgagttggatgcgattgcggctgtggtgctagggggcaccagtttgatgggcggtaaaggtcgcatcatgggcacgctgatcggcgctctcatcatcggatttttaaacaacgcattgaacttgctcgatgtttcctcctactaccaaatgattgcgaaagctgtggttattttgctggcggtcttggtagacaacaaaaaataa

SEQ ID NO: 41404 - DNA, 885 bp, Vibrio cholerae
atgagaatgaaaaaactgaccactcttatctctgctgctctactttccacttcggtttcttttgttgcgcaagcgcaagataccgtggcgattgttctttcaacgctgaacaacccgtttttcgtgaccatgaaggatggagccgaagcgaaagccaaagaacttggctacaacctgattgtgctggactcgcaaaatgacccaagcaaagagctttcgaacgtggaagaccttactgtgcgcggcgtgaaagcgattctgatcaacccgactgattcggatgcggtttctaacgcgattcgtatcgcgaaccgctccaagatcccagtgctgacgcttgaccgtggcgcgagccgtggtgaggtagtgagccacattgcgtccgataacgtagtcggcggcgaaatggcaggccattttattgaagcgaaaattggtagcgatgccaaagtgatccaactggaaggcatcgccggaacttcagcggcgcgtgagcgtggtgaaggtttcatgaatgcagtgaaaggcagcaagatgcaactgctggctagccaacctgcggatttcgaccgcactaaaggtttgaacgtaatggaaaacctactggcagcgaaccctgatgttcaagcggttttcgcgcaaaacgatgaaatggcattgggtgcactgcgtgcaattcaagcgtcaggcaagtcggtgatgattgttggctttgatggcaccgatgatggcatcgcagcggtagagcgcggtcaattagccgccactgtcgcacagcagccagacatgattggcgcgattggtattgaaactgccgacaaaatgctcaagggtgaaaaagtggaagcttacatcccagtcgctctgaaagtgattgcaaaataa

SEQ ID NO: 41405 - DNA, 1212 bp, Vibrio cholerae
atgacttatgattacgtgattgttggtggtgggattgtcggtgtctccacgggttggcaactgaaacggcgttatccggaaaaatcggtgctgttgattgagaaagaggcggggttttcccgccatcaaaccggtcacaacagcggagtgatccatgcgggggtttattatgctcccggcagtttgaaggccgatttttgtaagcgaggagtcgaacgcaccttggcattttgcgcgcaacacaatattccagtggaaaactgcggcaagttactggtggccaccaatgagcaagaactcgaacgcatgcacgcactctatgatcgctgcttacaaaatcagattgatgttgaaaaactggatgccgcacagttgaagctggcggagcccaatattcgtggcttgggggcgatcttggtgaaagcgaccagtatcgtcaattatcgtctggtgaccgagaaaatggccgaagcctttatgcagttgggtggggatgtgaaaataggcacggaagtggtgggcttggaagaaacgccatcctcgatcacgctaacttgccaacagaagaaccaacgcgtgagttatcaggccaaatttctggtcacctgttcaggcttaatggccgatcgcttaaccaagatgctcggtttgccgacggattttcagatcatcccttatcgtggcgaatactatcgtttggcacccaagcataaccaagtggtgcgtcatcttatctacccgattccggatcctgaattgccgtttctcggcgtacatttaactcgcatgattgatggctgcgtgaccgttggtcccaatgccgtacaaggttttaagcgtgaaggttatggcaaatggaatgttagcctccgcgatgtgtgggagatggtttgcttccccggcttttggaaagtgagtgccaagcactttaaaacgggtatggtcgaaatgaaaaactcatggtggaaagcgggctacttacagttggtacgtaaatactgcccaagtatcgaactgaccgatcttgagccttaccctgcaggcattcgtgcccaagcggtattaagtgatggtacgctagtgcacgattttttgtttgccgaaagtccgcgcagtttgcatgtgtgtaacgcgccttctccagcggccacttccgcaatgccaatcggcgaatatctgtgcgacaaaatcgcggaaaaatcgcttgcttga

SEQ ID NO: 41406 - DNA, 2676 bp, Vibrio cholerae
ttgaagacaggactcgataagcatacatccctcatcccaaatacagtgtcggcgagattacttcctttcgccgttttacccatccttctatttgggtgggtgttttattggcatcaaaccggcggtaacgcttggcaagtcacttgggttcctgggctggatctgaatctcagtttccgacttgacgggctctcttttctttttgcctcgttgatcacaggcatcggtgccttgattcaaatctatgccctcgcttacatgaaagagaaagcggcgcgcttctcatttcatctctacctcactctcttcatgctcgccatgcttggcgtggtggtaagcgacaatattttactgctgttcatcttctgggaactgaccaccatcacttcctatctgctgattggttttaatcatgacaaaccagtctcacgcaaaaatgccctacagtcacttttagtcacgggggccggaggactcgcgctgttagccggactgattttacttggcttgatggccaatagttatcaaatcagcgtcatcattgagcacgcggatcacatcgcgcaacatccgtggtttatgccttcgctgattttagttttactcggtgcattcactaaatctgcgcaatttccattccatttctggttacccaatgccatggccgcaccgacaccggtgagcgcttacttgcattcagcgaccatggttaaggcgggaatctatcttttggcccgcttatcaccgatttatgccagtagtgatttttggttctactgcttaaccattgtgggcgcggtaacggcactttggtgcgcgctactggcgttcaagcaaaccgatctaaaactgatgttggcctacagcaccaatgttgcattaggcaaattaaccctgctgctgggattaggtaccgaggtcgcgctgaccgctgctgtgttgtttattttcgcccactcattttacaaagccgcactctttatggtggtcggcaatattgataaagcgacgggcactcgagagcgagaaaagctcggcaacttaaaatccgtcttgctgctgagccttattgctgcggttattgccgctttatccaaatccggtgttgcgcctatgctcggatttttgagcaaggagtacatgtacaaatccagtgtggaatctggcattgcgtggatttcgctggtcttattactgattaatgcgctgatggtggcgttagccatcgcactactttacaaacccttttttggccaagcgaccaaggagagtgaaagccacccacccaaagcgatcgaacagaaaaaatccctttggctacctgcgatgggattggctatcgccagtttcctactgcctgtttttgccctggattggattaaccagcatttagtcataccagcagtcatggcgatggatccaaacagcgttccacaagccgcaaaattatggcaaggcttcaatatcccgctggctttgagtggtatcacgcttgtgttagggggcgtgctgtatctgaactacgcaaccctagtcacatggctcacgcgcttagtgaagccgctgcccaaagctgagcaaatgtttgatgccgtgctggcttatttagcgacattggcaagctggcaaacgcaaatgctacaacaaaaacgctcaagcggttatatgctgctattttttgccgttttagccttaatactgatctatcagccgctacctttaccagccactttcagcgcctcgctgtttgatgttcatttttatgaagtcgcaattgcgctcgcactcatcgcttctgcgctgttgtgtgtgctgagcacgtctcgtttgctgtcggtattagcgctcggcatggctggatttatgacgacgctggtctttatgatttacagcgctcctgatgttgccaaaacccttttgctggtcgaaacactgatggtggtgtttgtggtgcttttgatgcgtcatgtgccctacttgtcgacggtcgctcgccattctgtaccgcgtcgcacattgaatgcggtgatagccagtgtgattggcgcatccgtaaccttaatcctgctcaatatcacagcgcatcctatcgataccactttgtctgactattttgcgcagcagagcgttcccggcggtcatggccgcaacatcgtcaatgtcattttggtcgattttcgtgcctttgataccttgggagaggtcattgtggtcgtcatggcgagccttgtcgcgattagcctcttgcctaaacgaaccgaacaaccacagaagattcattctctaatctttgccactaccgcacatattgtgactgccttgatgctgatgttttccctctatctactgctgcgaggacacaatgctcccggcgggggctttatcggcgcattgatcgcggtgatcggcttttcgctgctcctcttcgccgaatcgccccaatacgtaagagatcgtctgcacttctcgccactcaatattgctctgtttggcatcctgctcagttttatggcaggagccatgagtgtcgcggtcggtttacctttcctaactggattatggtggaaagaaattttaccgcttggcaccccactgctctttgatgtcggcatctatctggcgatcatcggcggtgtcatgagcatgttgctgcgcgttaaggaggaactcgactaa

SEQ ID NO: 41407 - DNA, 1935 bp, Vibrio cholerae
atgattaggcgggagaatatgttcaaactgcatcagatgagtattaagcaaaaggttgtgttaggggtcactctcgccgtactggcatccaccctgattgtgggtgtgatggcacagcgccaagcgcgagaggtgctagagcatcgcttagtcgatttagaactgcccaatattttgaagttgattaaaagcgatattgaccatgaagtgctacaactgcttgcttctgctcagcaaattgccagcaatgagtttgtgcagcaagcgattgctaccacagaaagagatccagcaacagaagcgttattagtgaagcagttgaacaacttacgcgatcaataccgcctgaatgatgcgtcggtagccaaccgaaaaacggcatattactggaaccagaatggctttttgcgtgagctgaatcagcagcaagacggatggttttttggctttatcggctcaggaaagccgaccatggtcagcatgttccaagaggcgaatggcgaagtcaaaatgtttgccaactaccagttggtgaatggcaataccatgtctggtatgtctaagtcgatggatgacatggtgcgtctgctcaacagttttaaaattgaagacaccggttttgtgtttttgaccaatgcacagggtgaggtacaaatccaccggcagaaagagcaagtaaaatcgagcttacagcaaatttatggttcaggggcgagtgcgctgctgaacaaatccggcttcaacttgatttcgacggactatcaaggtgaagaagtcatggtagcgagcatttacatcgagagcatggattggttcttggtcggcaccgtgcctgtgcatgaggtgtttgcggaattggatgctgtagcacagcgtatgatgctcacgacgctggcggtagctgccatctttatttttatggggattttcctggctaacagtatcgctatgccgatcaatcagatagccaaacgctttaccgatttgggcagaggggatggtgatctctcgcagcgtattgaagtgaaaggcaatgatgaaatcgctcagctttccaaaggctttaatggttttattgagaagatccatcaatcgataaaagacgttgcccaaaccagccgtgagttgcaagtggccgccgaaggggtatcacgcaaagcgttagtcacccacgataatagccagcagcagcgcgaccaaacgatccaagtggttaccgccatcaaccaaatgggggcgacgatcagtgaaatcgcctctaatgcggcgactgcggccgaaacggcgaatcaagcgtctggtaatgcggatcaagggcgtaatgtcgtcaataaagccaaagaggcgatcagccgcttagctcacgatattgaaaacacgggcaaagtggtggagcaattggcgtcgaccactcaagagattgggtcgatcttggatgcgatccgcggcatttcagagcaaaccaacttgctggcactgaacgcggcgattgaagccgcccgtgctggcgatcaaggccgcggttttgcggtggtggccgatgaagtgcgtaacttagcgagtcgtacggcatcctcgacggaagaaattcagaagatgattaaccaactgcaaaatgatgctaagaatgctgtatcggcaatggatgcgggtaaaacggtgactcatcaaggggttgccgcttctgatgaagcagtacaggtgctgatgagtatttcggatcgaatccacgatatttcagatcgcaacacacaagtcgctacagcaaccgaagagcaatcgaccgttgtacacaccattaaccaaaatatcgaagagattaacgcgattaatgaagtgaccacctcaacggcagaagagctggctgatgcgagcaaatcattgcgtgaactctctggccgtttagataagttggtgggcaactttaaactctag

SEQ ID NO: 41408 - DNA, 1233 bp, Vibrio cholerae
atgaaaaatcttgttgggcgctttatgcgctatgtcacttttgatactcaatcgaaaccgaaaaaccatcactgcccaagctctacgggtcagaaagtctttgcccaagcgctgtatgaagagctacttgaattaggcttaagtgatgtttcgctggatgatcatggctatgtgatggccaaactcccatcgaatgtgaactacccagtgcccgcgattggctttattgcccacatggacacctctccagatgcttgcggtaagcatgttaaaccgcaaatcgttgaagattatcaaggtggtgatattgcccttggtaaaggggacgaagtgttgtcgcccattcaataccctgacttgcatctgctgcatggctataacctcatcacgaccgatggcacaaccttattgggtgcagataacaaagcggggattgcagaaattatcaccgcgatggaaatcttgcttgctgatccttcgattcctcatggcgatatctcgattgcattcacgccagatgaagagattggccgcggtgccaatcattttgatgtggcgaaatttgcggcgcagtgggcatataccatcgatggcggcccgattggagagctggagtatgagaacttcaacgccgccactgcgacggttgtttgtcatggagtgaatgtacatccggggacagccaaagacaaaatggtcaacgctatgcacattgcagcgcagtttattctgatgatgccagaaaacgaaacgcctcagcataccgaaggctatcaaggtttctaccatctttctggtgcgaccatgagtgttgccaaatcagagctcaaatacattttgcgtgactttgaggcgatcggtttacaagctcgccaagcattaatgcaagctaaagtggccgagctcaatcagcagcttaaaaaaggtcgtgtcgaggtgagtttcgagcagagctactccaatatgaaggagaaggttgagccgcatccacatattattgagttggccaaacaggcgatggtggcttgcgatgttgagccgaaaattaaaccgatccgtggtgggacggatggggcgcggttgtcattcatgggattgccttgtccaaacattttcactggtggctataatttccacggcattcatgagttcatcaccattgaagggatggaagccgcggtacaagtgattgtgaaacttgcagagaaaacggcactgcattatcggcaataa

SEQ ID NO: 41409 - DNA, 843 bp, Vibrio cholerae
atgaaactcacccttcgcaaaaagctgttagaaaaagtagaaaacacgacagaaactccgatgctgatcctttctgtcgtttatgttgtcgtcgcgttgctgcctgacattgccgttttatctcccgatgatcttgagtttcttgatggcttactctggattgtgtggggcatttttgcgacagagctgttagtcaaaatcttcgtcagccctaaaccactgcaatatatgatgcaaaattggccggacgtacttatcgtggcgatgccgtttctgcgtcccctgcgtttcctacgtattttgttggtgctgcccaaagcgtggagacaaaccaaatcggttctgcgccaaaaaaccttcagctttatcggtctgacgagtctttctactgtgctgctctctgcggcgtttgtatatctggtagagaaaggaacccctagccccatcaatagctatgccgacgcgctgtggtgggcgatgtcgaccattactacggtaggttatggggatatgtacccggtcacagggtttgggcgtggagtcgcggtatttttgatgctgacagggatcaccctgtttggtctattaaccgcgagtgtggcttctttttttgttgaggatgatacggccaaacaagatcatctctccctcaatctcttgcttgaaaaaaaccagcagttagaaacacagttgaatcaattggttgaaactcagcaaccgagaaagcgttttcatctagcgagctaccgtcggcagctcgcagaacgtgaaacagtacggaaaaatcagaaaccaaagcgtcgtcgaataaaacttccgtcgcaagacaatcgcaacgcctaa

SEQ ID NO: 41410 - DNA, 831 bp, Vibrio cholerae
atggaacacaagatccgtgaagaaatgcgcgtactgccttcgatcgatccacagtttgaaatcgaacgccgcgtagcttttattaagcgtaagctcactgaagcgcgctgcaaatccctcgtattgggcatcagtggtggcgtcgattccacaacctgtggtcgcttggctcaacttgcggttgaagaactcaaccagcaacacaatacgacggagtaccaatttatcgcggtgcgtttaccttacggcgagcaaaaagatgaagatgaagcgcaactcgccctctcctttattcgcccaactcactcggtttccgtcaacatcaaagccggagtcgatggtttgcatgccgcctctcaccacgcactggcgaataccggacttatcccaagcgatccggctaaggttgatttcatcaaaggcaacgtgaaagcgcgtgcgcgtatggtcgcgcagtatgaaattgccggctatgtcggcggtttagtgctaggtaccgatcattctgcagaaaacatcaccggtttttataccaagtttggagatggcgcgtgtgacctcgccccactgtttggcctcaacaaacgccaagtacgcttgctcgcaaaaacgttaggcgcacctgaacagttggtttacaaaacccctaccgctgaccttgaagagttagcaccgcaaaaagccgatgaagccgccttaaacctgacctatgaacagattgatgatttcttggaaggtaaagccgtacctgccgaagttagccagcgtttagtggcgatttatcacgcaactcagcacaagcgccagcctattccgaccatttacgactag

SEQ ID NO: 41411 - DNA, 1245 bp, Vibrio cholerae
atgtttttaataagatattgtttttatctggagataacgatgtctgcctcactttctgtcgcaaaactgaccttctttatcgctattctggctgctgtcggccaagcgacacaaaccatgtatgtgccttctattggttacatggcgcaagagtttttggtttcaccagcagcgctgcaagctgtgatggcgtgctacctgatcccttacggcttgtcgcaatttgtttacggtaccctttctgatcgtattggtcgcaaaccgatcattattgctggattggcgatctacattatcggttctttgattgcgctcttcgcccatcagtattcatggtttttgatcggtagctttgtacaaggtcttgggattggttgtggcggtgcgatgtctcgtacgctctctcgcgactgtttcgaaggcgctgagctgcataaagtcaacagcttaatcagtatgtgcctgattttctcaccgttggtcgcgccggtcttaggtggctacttaaccgaaagttttggttggcgttcaagctatttgtttctgtcactctttgccattgccgtagtgatcaccatgatgacgagcatggtagaaaccttgccagcgacagcgcgtaaaaaagagcccgtgctgcgcagttatcattacgtgctgtcggatcgtcgcttccaaggttacttaatctgtcttgtcgcgacctttgcaggcttagccgtgttcgaagcggcggctggcgtgttattaggcggtgtattaggcctacctgcgacgaccgtaagtttgctgtttgtgttacccatccccggctatttggcgggcgcttggctctctaacgtgattgctcgccactggcgtgaaaaaaccgcgatgcatgtcggcttactcgcgatcttaacgggctcactggtcattatgctgcccggcttattgggtatgaccacggccttatcactgattggcggcgcaaccatttacttcttaggggctggcattttattcccagccgctaccacaggtgcactttctcctttcccttatcacgcgggaacgggcggtgcaattttaggtggaatgcaaaatttaggggcaggtctggctacgctgtttgccgccatgttcccagcatccgatcaactaccactcggtattattatgcttctgatgtcagtactggcgttgtggggacttaaacgcgtttacaccaaacagccaccgtcagatgagatgccgattgcgatctga

SEQ ID NO: 41412 - DNA, 939 bp, Vibrio cholerae
ttgaaaaagttattgcttgttttagttgttattagtttttgttccctgtttgttggcgtgggcaatttatccctcgcagccttgtttcaaggtgatgagtcagcttggcagttactgctgactagccgagtcccccgattattagcgattttgctctccggtgcgggtttaagcatcgcgggtcttatcatgcagcaagtgagtcaaaaccgatttgcctcaccatcgacttccggcacgattgagtgtgccatgctcggttacgtgcttagcctagttctgtttggccatggtcaaaacctctggttgattttcggcgtctccatgttgggtacgctggtctttgtgtttttcattcagcgcattcagtttaaaaacgtcattttcgtgccgctgatcggcatcatttttggcaatgtgattgactctttggcgacctttattgcctacaaatatgatgctatccaaaatctttccggttgggctgttgccaattttgccaacctgcttaaaggggattttgaactgctctatatcgcaatcccagtggctattttcagctatttgtacgccgcacgcatttctgccgtggggatgggaaaagattttgcgaccaatctgggtttgaattatcaacaggtcatgatcatcggtgtggccttagtctccatcatgtcggcgaccgtggtcatgattgtcggtcaactgcctttcttgggtttgattgtgcctaatctagtcagcctctattacggcgataatttgcgtaaaaatattccgcgcactgccattttcggggcgatgttcgtgttgttatgtgatttagtggggcgcgtcatcatcttcccgtatgaagtccccatctctatgatcatcagtattttaggtggttcggtgtttattgccttgattttgcgagggcagcgtcatgcaggatag

SEQ ID NO: 41413 - DNA, 1077 bp, Vibrio cholerae
atgataacgattcgcatatatgttaaattgagctcaaccaatagagaagttgaattgattatgcaaaatcgcacatcagttatggaaaacacgcaaaatcaacataaggtattaaccaaaaacggcgcacgccaaacggtcaccttgtcacgtcatgtggtcaaggagcgagatgagcaaattgttgcgcaaaatttgaatcaacctgtgatggcacaaggccactttgtggaatacgtcagtccaaacgggtttaccttgcatggagggtctagccttgaattggccgattgcgatgtgatgaccaccagcgcgccagcccttgtcatcattctcttgctggaaggcaccttacgctttgcctatgatgatctcaaacttgaattgtgtgccaatcagcatccacaagctttaatggtcaatttggagcagccgtgcatcttccatcgccgtctgcatcaagggatgacagtacgcaaactcaacatcgttttatcgcccgatacattgcaaaaattcgcgcaacactcctgcccattgcaacattttctgcaacaagacaaagcactggttccactttcactgaacgaggaaagttggcaagccgttgagtctctgctcaaccgtcgtgtgatccacaccatcagtgcgcatattgctcgggaagccacggtttggcgcttggtgcatgacgccgtgttgcaatgccctaaacacgccacctcgttatctcagcaccaagagggacaatctgagcaatggattaatcagttgctgcactatatcgatcagcatttgcatgaagagatttgcttagagcaactggcagaacgccatgcgatgagcgtttccaacttacaacgcaaatttaaaactcgcctgaatatgacgattgcacactacatccggcaccgacggttacaactggcgcgtcagcaattagagcgaggtttggtcaccatcacagaggccgcgtatgaagcaggctacctgcacccttccaactttaccgcagcgtttaaaaaagcctttggtatctctccgcaggcttttgtggaattaaaacaggcgggttaa

SEQ ID NO: 41414 - DNA, 693 bp, Vibrio cholerae
atgtacagcgaactgaaacagcgcgtattcaacgccaatctcaaattgcccaaatacggcttagtgacttttacttggggcaatgtgtcggaaattgaccgcgaacgcggcgtactggcgattaaaccgagcggcgtcgaatacgatgcgatgtgcgccgaagatatggtgattgtcgacctcacgggcaaagtggtggaaggcaaattgaacccatcgagcgataccgcaacccatattgaactttaccgcgcctttcccgacatcggcggcgtagtgcacacccattcgcgcagcgccacgatttgggctcaagcgggcattgatattcccgcgctcgggacaacccatgctgattacttttacggcgacattccctgcacgcgtaagctttcgcacagcgaaattgctggtgagtatgaaaaaaacaccggcctagtgatcgtcgaagagtttcgtcatcgtcatatcgatccgatggcggtaccgagtgtgattgtggccggacacgcgcctttctcttggggcaaaaatgccgaagatgcggtgcacaacgccgtggtgctggaagagatctccgcaatggcactcgccactcgctcgctcaatagcggcatcaaaattcagcccgaattgtccgataaacactacctgcgcaaacacggcgcgaacgcttactacggccagaggtaa

SEQ ID NO: 41415 - DNA, 507 bp, Vibrio cholerae
atgggactcaaacaatccttaatcgaaaacaactcaatccaactgcaagccaaagccaataactggcgtgaagcgatcaaaattggtaccgatatgttgattgcctcaggcgcaatcacgccagcctatcacgaggcgatcatcgccagtgtcgagcagctcggcccctacatctgcatcgctcctaatcttgccctgccccatgcgcgccccgaaaacggcgtgttgagaactgcttttgcgctggtgaccttacaagagccgatctatttcgaaggcgaagatgagccagtggatgtgctgattaccttagccggcagttcctccgatgagcatatggaaggactgatggaagtgacgcaagtgctggatgatgaaaacagcgccaccggagtggatctggataagctgcgccgctgccgcgataaacagcaagtgtatgcggtgattgaccaagccctctcgcaacaagcttctgcccaacaagaattagcgcacatcgcgtag

SEQ ID NO: 41416 - DNA, 1761 bp, Vibrio cholerae
atggagttcttgtacgacgttttctatattttttacagccaagtaatgaccaaagcccctttgctgctagggctagtcaccttaatcggctattggctgctaagacgcgatgcgacaaccatcattaaaggttcaatcaaaaccattgtcggttttatgctggtacaagtgggcgcaggcacactggtcgctggctttaaacctgtgattgaaaagctgtcgcaataccacggtttaaccggatcagtgattgacccctacacctcgatgatggccaccatggaaaccatgggcgacaactattcatgggtcgggtacgccgtgctgctagcactggcgatcaacattctgttggtgctgtttcgccgctacaccggcattcgtaccatcatgctgactggacacatcatgttccagcaagcgggtttgattgcggtgttctactttgtgctcggcgctggcatgtgggaaaccatcatttattcggcggtattgatggcgctctactggggcatctcttctaacatcatgttcaaaccgaccgaagaagtcactggcggcgcgggtttctccatcggccaccaacagcaagtcgcttcatggatcgccaccaaaatcgctcccaaactgggggataaaaaagacagtgttgatcacctgcaactgcctaaatggctgcatattttccacgacagcatcgctgccaccgcgattgtgatgacggtgttcttcggcatcattctgctctctttcggtctggataatctgcaagagatggcgggctccacccactggactatctacatcctcgaaacgggccttaagtttgccgtcgcgatccaagtgattgtggccggtgtacgtatgtttgtcgccgagctgtctgaagcgtttaaaggcatctccgagcgcgttattcctaatgctgtgctcgcgattgactgtgcggcgatctacgccttctctcccaatgccatggtgtttggctttatgtggggcgcactcggccaatttgcagcagtcttagccatgctggcgtttaatgcgccaatcatgatcatccccggcttcattcctatgttcttctccaacgcaacgattggcgtctttgcgaaccatttcggcggttggaaagcggtgatgaagatctgttttgtgatgggcattatcgaagtgctcggctctgcatgggcaattcacctcttcacccaacaaggcaccgaattcagcggctggatgggcatggccgactgggctttggtcttcccaccgattatgcaaggtttgtccgcctcgaaactcttcttcttcgtactggttgccctggcgttggtctacatgttctttgcttccaaacagttacgcgccgaagaagatgcacaaggtagtatcacggtcagtgacgagccggaagtgattgaagcggttgaacaagctctacaagctgcgcaaggcactcgtccagtgagcattctggcagtgtgcggtaacggccaaggttcatcgatgatgatgaagatgaaaatcggcaagtatctggagcaaaaaggcattccacatgtgatggattcttgcgcggtgtctgattacaaatccaaactcgcgaccaccgacatcattgtctcctcgaaacacctctcagccgagatggaaccgggcgaaggcaagtttgtgctcggggtgcagaacatgctgaacccgaattcctttggcaatgaactgctcgacattatccataaccattttgtgaaaattcgctag

SEQ ID NO: 41417 - DNA, 756 bp, Vibrio cholerae
atgaatgaagtccaacgacataacggtattttgtctctgcttgaagagaatcaagcgattaacgtttcgcacattattgagcgctttaatgtctcaccagccacggcgcggcgcgatatcgccaagcttgatgagctaggtaaactgcgcaaagtgcgtaatggggcagagcgcattgaaaatcaaaaaagaaaatggtcaccgctcaatatcaacagcacagagcattatgaagagaaatcgctaattgccttgaaagcggctgaactctgccaaccaggcgatagtgtggtgatcaactgtggttcgaccgcctttttgctgggccagcagttgtgtggcgaaaacgtacagatagtgaccaactattttccgttggcgagctatctgatcaatgaagatcacgatgatgtgatcatcattggcggacaatacaatcgagcgcaaagtattttcctcaaccccgcgccagattctcttggcggttatgcgggaaactggatgtttacctctggcaaagggctaaccgaagcgggattgtacaaaaccgatatgctcacagcggttgctgaacagcagatgctagagcagatcgataagctagtcgtagtggtggacagctcaaaagtcgggcagcgtactggcatgctgttttgctctaccagcaaaattgacatcgtcatcaccggtaaaaatgcgaatgctgaagtggtgaaagccattgaggcacaagggacgcaagtgattttagtgtag

SEQ ID NO: 41418 - DNA, 1932 bp, Vibrio cholerae
atgaaaacggcagggggagtcatgactctaggattcaaaggaagaatatacgccagtgtggtcattttagtgaccatatcgctgatggtgttaggtacgattaatatgctctctctcaaacgagagatgattgattcattaacgaccgaaacgcaaaacaagctcaattaccatgtgtcagaactcgagttttgggtgaaaagtcgttacgaggccgtatctcgtggtgcgaacttgtttactccagagttatcggataccgataacctcaataaagtacgacttttggcggaagcggcgcagatcaccaatgtgattgcggcctacgaagatggtcgctcttatatgtcgatggacaaagaggggggagtgacgacaaatcggtttaaatttactgaccgtgactggtatcaacaggccaaaagtcgtcgtagcccatttttgactgagatttatcaagatcaagtcactggcaaaaaagtgatcagtgcggttagcccgattcttcatcaaggccaatttgtgggggctttgctgggtgacttccagcttgatgacatcatcactcaagtgagtaacatgcgttttgccggaggcgcagcgacactgaccgataaaaatgcggtgttttttgccagtgatgatcccaacgatattggccgcaccccttcccaagtcagcccatcgtttcgcgaaatggaagctgggtttcaccgtcaagagagtggacatctttcgttcccgtacctagggattgaatttgatggttactacaaacgtgtcaatctaaccgatgatatgtactggaccttgatggtgtttgttgataaagccaccgcattagcggatgtcgatgtcgccgtagcgaatgcgatcacaactgggatagtacttatcgggatcagtgttggggtgattatcttcattatcaatcaaatctataaacctttgctgcgtttgaaagtcgcggttttggatttggctcaaggcagcggggatttaactcgtcgcttagaagtgaatggtaatgatgacttggcgcagatcagtgaaggcttcaaccgtttttcaggtaatttacaaaacatgatgctgcagatttccgatgcaacacagatcatatcaagcagcattgagcagttaagccagacggcgaaagagaacgaacagatgttgatttctcactcttccgaaaccgatcaggtggttactgcgatcacgcaaatgagtgagagtgcgcgcacggttgcggaaagcgtcacgcaatcaaatcagatcacagaagccgcgagcaaagaagcgcagcaatctttggtgattgtgaataatgccgtatctacggtgacttctttggtcaacgatgtggaaaatatgtccgaaagcatctctaacatgaatcgtgatgcaaacaaaatcagcgaagtgttgagtgtgattggcgcaatctcagaacaaacgaacctgctggctttaaacgctgccattgaagcggcgcgagcgggtgaacaaggtcgcggttttgcggtggtggccgatgaagtgcgtgccttagcggcaagaacgcaaaatagcaccacggaaatctccgatatgttgacgaaattgctggaaggtaccgacagcgtcgtgggtgcaatggagcgtactaagcagcagtgtcaaacgacggcggataaaacctctgaagtgtcaggcagcctgaatatgatgagtgcatcggtgagcgacattgatgatctcagcacacaaattgcggcggcgacagagcagcaaagtacggtggccgcagagcttagccgtaacatgctctcaatccgtgagatagtcgagtctcttgtggtcagcggaagacagaccgtaggcgcgacagaatcgctttctcactcgaatcatgaattagaacagctagtaggcaaatttaaactgcgttaa

SEQ ID NO: 41419 - DNA, 1308 bp, Vibrio cholerae
atgaatgcaaatctaaacaaagcttatcccaacgttagccttgagaacttcttctctaccccactggcggcgaccaacgatgcggtatttgccgccattcaagctgaatacacccgccaaaatgaacagatcgaactgattgcctctgaaaacatcgtctctaaagccgtaatgcaggcgcaaggcacttgcctgactaacaaatacgccgaaggttatcccggccgtcgttactacggcggttgtgagcatgttgacagcgttgagcagattgctatcgaacgcgccaaaatgctttttcagtgtcaatacgcaaacgttcaaccacactcaggcgctcaagccaatggcgctgtgatgcttgctctgctgcaaccgggcgacactattatgggtatgtcgctagatgcaggcggtcatctcacgcatggtgcgcgccctgctctttcaggtaaatggttcaatgcggtgcaatacggtgtggatcgccaaaccctcgaaattaactacgattctgttcgtgcactggcgttagagcacaaacccaaaatgatcatcgcaggcggcagtgccattccccgcactatcgattttgctcaatttcgctcaattgtggacgaagttggcgcgctgttgatggtcgatatggcgcacattgccggattggtagcaactggcgcacatccaagcccattgccgcatgctcatgtcgtcaccactaccacacacaaaactctacgtggcccgcgcggcggcatgattttgaccaacagcgaagagatccacaaaaagatcaattctgcggtgttccccggtttacaaggtggcccactgatgcacgtgattgccgctaaagcagtggcatttggtgaagcgctcggccctgaattccgtacttatattgattcggtgatcgataacgcaaaagtgctggctgaagtgttgcaaactcgcgggtgtgacattgtgactggcggaacggatacgcatctcatgttggtcgaccttagacctaaaggtttgaaaggcaaccaagttgaacaagccttagagcgtgccgggatcacgtgtaacaaaaatggcatcccatttgacgaagagaagcctatgattacatcgggcattcgtttaggtacgcctgccggaaccagccgtggtttcggtcgtgaagaattcaaactcatcggtgagtggattggggacgttctggatggtttggtggccagcccagaaggcaacccagacgttgagcaacaagtgcgtaaacaagtgaaagcactgtgccaacgcttcccgctctatcaatag

SEQ ID NO: 41420 - DNA, 981 bp, Vibrio cholerae
atgagtcatcaactgactttcgcagacggtgagttttccaataaacgtcgacaaacccgcaaagagctcttcctcgccagaatggagaagctcctaccatggtctcagttgctcgcggtgatcgaacccttttatcccaaggcgggcaatggccgccgcccttatcctctcgaaaccatgttccgcatccactgtatgcagcagtggtacagcttaagtgacgaagcgatggaagatgcactctatgagatcgcgtccatgcggttatttgcccatctttcgctggacagagccattcccgaccgcactaccatcatgaacttccgccacttgttagagcagcatcagctgggacgcagtgtgttcgagccgatcaatcaatggctcagcgagcgcggcgtgctgatgaagcaaggcacgttggtcgatgcgacgattatcgaagcgcccagctcgaccaagaacaaaaccaaccaacgtgatcccgaaatgcaccagaccaagaaaggcaatgagtggcacttcggtatgaaggcacatattggtgtggatgccaaaagtggcctcactcatacactggtgactactgccgctaacgagcatgatctgaatcaattgagcaacctgctacacggtgatgaagaattcgtctccggtgatgcaggctaccaaggtgcacacaagcgcgacgagctgaagggggcagacgttgattggctgatagccgaacgtcccggtaaagttcgcgccctgaaaaagcaccctcgcaaaaacaaagtggccatccatatcgaatacttgaaagccagcattcgggccaaagtcgagcacccgtttcgcatcattaaatgccagtttggttttatcaaagcccgctacaaaggcctgatgaaaaacgacaaccaattagccatgctattcaccttggcgaatctggtcaaagtcgaccaactgatacgacgacaggcgagatctgcctga

SEQ ID NO: 41421 - DNA, 1929 bp, Vibrio cholerae
atgcctattattactcttcctgacggtagtcagcgtcattttgacaacccagtatctactctcgaagttgcccaatctatcggcccaggtcttgcgaaagcgaccattgccggtcgtgtgaatggtgcacgcgttgatgcttgcgatctgattgaacacgatgccagcctagaaatcatcaccacgaaagatgaagtcgatggtttagaaatcgtgcgtcactcatgtgcgcacttgcttggccatgcactgaagcagctttacccaaatgcgaaaatggcgattggtccaaccatcgacagcggtttttactacgacatcgatctcgagcagtctctctctcaagaagatcttgagaaaatcgaagctcgcatggttgagttagcgaaaaccaaatacgcggttgtcaaaaagaaagtgagctggcaggaagcgcgcgatacctttgaatcgcgtggcgaaagctacaaaatggaaattcttgatgaaaacgtggcgcgtgatgatcgcccgggtctttaccatcacgaagaatacattgacatgtgccgtggtccacacgtaccccacatgggcttttgtcaaaactttaaattgctgaacattgcaggtgcatactggcgtggtaacagcgataacaaaatgctgcagcgtatctacggtaccgcgttccatgataagaaagctctgcaagcgcatttaactcgccttgaagaagccgcaaaacgtgaccatcgtaaaatcggtaagcaacttgatctgttccatatgcagcaagaagcaccgggtatggtgttctggcaccacaatggttggtcaatcttccgtgatctggaaatctttattcgtcaaaaattgaacgaatacggttaccaagaagtaaaaggtccattgatgatggatcgcgtactttgggaacgttcaggtcactgggataaatacgctgatgcgatgttcaccacttcatcagaaaaccgtgaatacgcgatcaagccgatgaactgtcctggtcacatccagattttcaaccaaggtttgaaatcttaccgtgatctgccattgcgcatggctgagtttggttcctgtcatcgtaacgagccatcaggttcactacacggtatcatgcgtgtgcgtggctttactcaagatgacgcgcatatcttctgtactgaagatcaaattcaacaagaagtgacttcgtgcatcaagatggtgtatgacacttacacgacttttggcttccaaaatatcgtggtgaagttgtctactcgccctgaaaagcgcgtgggtagcgatgaaatttgggacaaatcagaacaagcgctgatcgattctctgaaggcaatggacattccatttgaaattcaggaaggcgaaggtgcgttctatggtccgaaaattgagtttacactctacgactgtttagatcgtgcgtggcaatgtggtacagtgcagctcgatttcaacttgcctacacgtttaggtgccacttacgttggtgaaagcaatgaacgcttaattccggtgatgatccaccgtgcgattttgggttcacttgaacgctttatcggtattctgattgaagaatacgcaggattcttcccaacttggttggcgccagagcaggctgttgttgtaaatatcacggataaacaagccgactatgctcatgaagtcgctcaaaagctacaaaaatgtggcattcgagcaaaagcagacttgagaaatgagaaaataggctttaaaatccgcgaacacactttgaagcgtgttccgtacatgttggtttgtggcgaccaagagatggaagctggcgaaatcgcagtacgtacacgtaaaggtaaagatcttggtaaatttaaattggatgattttattgcacatatccaagctgagattgcaagccgtaagcttaatctggaggaataa

SEQ ID NO: 41422 - DNA, 195 bp, Vibrio cholerae
atgcctaagatgaaaaacaacaaaggtgctgctaagcgtttcaagaaaactgctggtggtattaagtacaagcacgctactaaacgtcacattctgactaagcgtactactaagaacaagcgtcagctgcgtccaaacgccattctgcctaagtgcgaactggctgctgtagcacgtatgcttccatacgcttaa

SEQ ID NO: 41423 - DNA, 354 bp, Vibrio cholerae
atgcctcgcgtaaaacgtggtgtacaagctcgtgcacgtcataagaaagttttaaaacaagctaaaggttactacggtgcacgttcacgtgtttatcgtgtagcgttccaagcagttattaaagctggtcaatacgcttaccgtgaccgtcgcgctaagaaacgtcaattccgtcaactgtggattgcacgtatcaacgcagcggctcgtcaaaatggtctatcttacagccgtttcatcaacggtctgaagaaagcatctatcgagatcgatcgtaagatccttgctgatatcgcagtattcgacaaagcagcattcgctgttctggttgaaaaggcgaaaggcgctctgtaa

SEQ ID NO: 41424 - DNA, 630 bp, Vibrio cholerae
atgaacttctttacgtctccattttctgggattcccttagatcagcaagtaacaaatccgaacattattgtgggaaaacacagttattattctggttattatcacgggcacagtttcgatgattgtgtgcgatatttacatccagaaagagatgacgttgataagttagtcatagggagtttttgttctataggctctggtgctgtatttatgatggccggtaatcaagggcatcgcagtgattggataagtacattcccatttttctatcaggataatgataattttgcagatgcacgcgatggttttacgcgttcaggagacacaattattggtcatgatgtgtggattggcactgaggctatgataatgcctggggttaaaattggacatggagcgataatcgccagtcgttcagtagtgactaaggatgttgcaccttatgaagtggtcggttcaaatcctgctaaacatatcaagtttagattttctgatgtggaaatagcgatgttacttgaaatggcatggtggaattggccagaatcgtggttgaaagagagtatgcagtctctgtgttcatcagacattgaagggctttatctcaattggcagtcaaaagcacgcacataa

SEQ ID NO: 41425 - DNA, 981 bp, Vibrio cholerae; identical to SEQ ID NO: 41420

SEQ ID NO: 41426 - DNA, 669 bp, Vibrio cholerae
atgagtaaacagtacgataaagaagaatacataaagaaatttgagacagataaatcgcactctattttattacagtcggcatttgctcaagcttcagatatacgaaagtttgaaatcgagctttactggaaaagagcgacgtatttttgggcattgatagcggttgcctttgccggcttctttgccgtagcttcaggagattttaaaggtggtggtcagtcgctgttcctaacaataattgcttcaactggttttgtttttactttcgcttggttttctgcgaataaaggtagcaagtattggcaggaaaactgggaaaatcatctagatcttctagaagatagcgttacagggccattatacaaatcctttttggaacgaccgcctgaaagtgagttctgtaaaaaatatataacaggccctcaacgatactctgtttctaaaattaaccaatgggttgctgtctttacgttgtttatctggtgtgtgttagtgatcttttcactatcgacatacaaagaaaattgttcagttgggtttgtttttcatgtgttaattcctattactgcgttagcactgtgccgaataatgatctcaaaaggcaaaactcatgatggctcgcataaccctaagttttggttgcgagaagttaacgtgacgaaagattaa

SEQ ID NO: 41427 - DNA, 258 bp, Vibrio cholerae
atgaaagtagaacttgtgacgtcactaaaacgtcaggccactaagatccttgccgatcttcatgatacgaaagagccagtattgataactgagcacggaaaaccgtcagcttaccttattgatgtagacgactatgaatttatgcaaaatcgtttagcgatcctggaaggtattgctcgcggagagcgagctttagcggatggtaaagtggtcagccatcaagatgctaaggacagaatgtcaaaatggttgaaataa

SEQ ID NO: 41428 - DNA, 468 bp, Vibrio cholerae
atgaattaccatcaatattatccgattgatgtggttaacgggccggggacacgctgcacgctgtttgtctccggctgcgttcatcaatgtaaaggatgttataaccaaagcacgtggtcgctgtcgtctggacatcgctatacccaagagatggaagataaaatcattgcggacttgaaagacacacgtatcaaacgccgtggattatcgctctcgggtggcgatccgatgcatcctgccaatttatcagcggtgttacagcttgtgcagcgggtaaaaaccgagtgcccagataaagatatttggctctggacgggatataccttggcggaattggatgatagccaacaagctttactgccatacattgatgtgttggtggatggcaaatttatccaagagcaggctgatcctgggctagagtggcggggcagtgcgaatcaagtgattcatcgctttaccttgtaa

SEQ ID NO: 41429 - DNA, 1743 bp, Vibrio cholerae
gtgaagatgaaaatagccattgtaaccgcatgcccaagtggcgttgccaatagcattattgcggcgggtttactgcagcaagccagtaaaacgttagggtgggaagcctatatcgaatgtcactcaacagtgattgcaggccacaccttaagcgaagaggaaatcaataaagccgatctggtcatactggccgctaacggcaagattgatatgcagcgttttgtcggtaaaaaagtctaccaaagccctattaccgcctgtacttccgatcccgtcggttaccttaagcaagccgcagaacaagcgactgaactcagctccgagcaggcaacacgctgtgactcccccgccacagcgtctgtttctgccaaaaaaatcgtcgccattactgcttgcccaacgggggttgcacacacctttatggcagcggaagcactagaagcggaagcgacacgtcaaggccatcagatcaaagttgaaacgcgtggttcagtcggtgctaaaaaccaactgacggagcaagaaattgctgccgccgatctcgtgatcatcgcggccgatattgatgttcctctggatcgcttcaatggtaaaaaactctacaaaaccagtactggcctcacgttgaagaaaaccgcgcaggagctcagtaatgccttcgcgcaagcaaaaactttctcaagctctgccaacagcgcgactaacgagaaagcagaagagaaaaaaggcgtgtataaacacttgatgacgggcgtatcgcacatgctgcctgtcgtggtcgctggcggtcttatcatcgcgctctctttcgtatttggtattgaagcgttcaaagaagaaggcactttagctgctgctttaatgcagattggtggaggttcagcatttgcgctgatgattccggtgcttgctggttacattgcattttctattgccgatcgtccgggactggcaccgggtttaattggcggaatgctcgcaagctcaacgggcgccggtttccttggcggtatcgttgcaggtttcctcgcgggttacagcgccaaatttattgccgataaagtgcaactgcctcaatcaatggccgcgctaaaaccgattttgatcatcccgtttattgccagcttatttaccggattagtgatgatttacgtcgtgggcggccccatgtcgagcatcatgagcggtatgaccagcttcctaaacaacatgggatcaaccaacgcgattttgctcggtattgtgcttggtgccatgatgtgtttcgacttaggtggcccagtgaacaaagccgcatacaccttcggcgtcggcttactcgcctcacaaacttatgcgccaatggccgcaatcatggcggcaggtatggtgccagcattgggtatgggcttagcgacctttatcgcgaaagacaagtttgaagcgggagagcgcgaagcaggaaaagcctcttttgttctgggcctatgctttatctctgaaggtgcaattccttttgccgccaaagatccaatgcgtgtgatcccagcgtgtatggtgggtggagcagtgacaggcgcactctctatgctatttggcgcgaaattgatggcgccacacggcggtctgtttgtgctcttgatcccgaatgcgataagcccggtgctgctgtacttggtcgcgattgctgtcggtacggcgattaccggttttggctacgctatgctgaaaaagtcggcacaagccaaagcggtcgcggcttaa

SEQ ID NO: 41430 - DNA, 1140 bp, Vibrio cholerae
atgaagtttctacatacttcggattggcatcttggtcgccaatttcatcaagtctcattattagatgatcaaagcgctgttctcgcacaactgatcgactttctgcgcgacaatccggtggatgccgtgattgtcgccggtgatatttatgatcggtcgattccacccacggcggcgattgatttattggatgaagtggtcagcgtgatctgtggcgagttgaagacacctttattgatgatcccgggcaatcacgatggtgcgaagcgtttaggctttgccgcgaagcagatgaaaaattcgggcttacatatctttgctgattttgaacagatgatgcagccacttgtgctgcattcaccgcaagcgggcgaggtcgctttctggggaatgccgtatcacgaccctgagttagtgcgccactactatcacaacgacatcaccacgcatgacgctgcacaccaatttttgtgcgagagtattcttgctcagcgcaatccgtcacaacgtcacgtattaatcagccactgttttgtcgatggcgcgatggagtctgaatctgagcggccattatcgattggtggatcagatcgtgttgaccatcgccattttttgccttttgactacgtcgcgcttgggcatttacaccagccgcaaatgaaaggcgcggaacacattcgctactctggctcattgatgaaatacagcttcggtgagcagcaccaaaacaaaggcgctaccttggtagagctgggtcagcaaggttttattagcgcaacgcatattcctctcatcgcgcctcatcaaatgcgcattatcgagggagagttggaggcgattcttgcagcgggagccaccgacccgcaggcagacgattacctgctagtgcgtcttttggataagcatgccattctcgacccgatggaaaagctgcgtcaggtttatccgaatgtgctgcatcttgaaaagccgggcatgttgattggtgtggatcaagagatgggcaaggcacgattggcgcgaggggaattggatatgtttcgtgattttttccttgaggcgaaacgtgaacctctgagtgagcagcaagagaaagtggtgattgaggtgattgcgcgcctgaaagcggagggcatttaa

SEQ ID NO: 41431 - DNA, 3042 bp, Vibrio cholerae
atgcgtccgttaaaacttatcctccaagctttcggcccttttgccggacgagaagagattgactttacgaagttgggtgatgctccactgtttttgatcaatggggcaaccggtgcaggaaaaagctcgattctggatgcgatttgctacgccttgtatggcgaaaccacaggcagtgagcgcaccggcgaccaaatgcgctgcgattatgcggcccctgagtctctcaccgaagtgatttttgagtttgagctggcgggggcgcgttaccaaatcacccgtcagcccgatcaagagatcccgaaaaaacggggtgaagggatgacgaagaaatcccattccgctactttggttgcactgaaatcggatggaaacgagctgattgccaacaagcccaatcctgtcgcgaaggcggtggtcgaattgatgggacttgatgttaagcaatttcgccaagtcatggtgttgcctcaaggcaagtttcgtgagcttttaaccgccaattcaaaagagcgtgagcagatttttggtcagctctttcaaacccagctctacagccaaattgaacgggcgctgtttgaacgagcagcgggtattcgtaaagagaaagaagagtttgatcagcagatcaaaggtacgttgagtgtcgtcggactggaaagtgaagagcagttacaaaccgagttgaccgaactggctccagtattaacccatgcgcaatcacaactcaaagctgagcaacagcagtgggatgaaacaaaagcgcactatcaagctgcgcttgagttagaacaacaatttatccgcaagcagcaattggtggtagaaatcgcgactcaccaagagcaggctacacacatcgaaatgctgcgtcagcaacgccagcaagcccaaaaagcagcgcgtttaaccgccgtccatcaacagtggcaccaagctcaaaaaaacctacagcaagccaaacttaaggttgagcagcagcagactctgttgcaacaggcgaaagctcagcagcaacaggctcaacaggccagtcagcaagccagtttagcctgtgaagaagtacccaaattaaacgagcaacgcataacgtggcagcgtgctgagcaaaaattgctggcacaagaaaatgttcagcaagcggtggccaaggctgagcgtgaactgcaactggcgacacaaaatgcgcttaatttgcagcaagcgagcgaaaagctagagcaagagctacaaaaccaacgactcgaatgggaacagcaacagcgccaattgacgcgcttagaagttcaaaaagcgcgaatgaatcagttggtgcagcaagttcaggctcgcgagcgagaacaatcgttactgaatgaattacaaactgctcaacaagctttattgcgctttgagcagcaacatcaccacatccaaactcaggccgaacaagcgaaactgaccgcggataaactggagttcgcatggcatacccagagggctgcggagcttgctctcgcactcacacaaaatgaaccttgtccggtgtgcggcagtttagagcatcccaataaagcgcaatattcgggtgacgttgtcaccaaggttcaggttgaacaagccagacagcagcaacaagattgggtgcagcgtcagcaagaggcattccatgcttggcaacaacaagggtttaaaaccgagcagatagcgcaaaatctcacgactttatcgagtgagctaactttgcagcaagtggctttattgaatgagctcattgaacagcaacagatacttcacagtgatattgctgcgctacaacagcttaaccctgatttgctgaaacggcagattgaagagggggagcagcggttagcgcacaccaaaatgacgctcgaaaaacagaatcaaaaccagcaacaagcttggcagactttggctcagttacaggcggaattggcgagtttgcgccaagaaatcccaccggagctgtccgatcttgatactttacgaagcgcgattgggcgtgtgcagaaccaaatagaaatcttacaaaaagcggagcatacggctcgtgaacagtgggtgcaggcgcaaaagcagtttgccagtgtgcaggcggcttatcaggcggcgattgaagcgcaccgtgagtctcagcgtcagcaggaggaaaccacaagcgcatggcagcaagggttactccattctggatttagcgatgagtccgcctatcttgccgctcgtttaaccgatgaggctatcgtcaatatcgagcgccaaatcgcccagtatgaagagcgcagtgcgatgctcagtggcgaacagcaagccttatcacgtaaattagcagagaaaaatcgcccagagttggaaccacttcttgtcaaagtaactcaagctgaagaaaaaatggcactggcgttgcaggcgtttacgcaacatcaatcgcggatggatggtttgcaacgtgtcgccaagcaactggcggatctgtaccagaaaaatcgtgcattagaagccgaatatcaggtcgtgggcaccttaagtgatattgcgaatggcaaaacgggcgctaaagtcagcttacatcgctttgtgcttggtgttttgctggatgatgtcttgttacaagcttctcaacgactgatgaaaatgagccgaggccgctatttactcaaacgtaaagaggaacgcgctaaaggtaatgtgggctcagggctggatttgatggtcgaagatagctacagcggtaaatggcgtgatgtggcaaccttgtccggtggtgaatcgttcatggccgccttatcgcttgcgcttggtttatccgatgtggttcaggcttacagtggtggtatccgtcttgatactctgtttattgatgaaggttttggcagtttggatccggaatctttagatttagcgatccaaaccctaatcgatcttcagcaaggtggtcgaacgatagggatcatctctcatgttaccgagctgaaagagcagatcggtctaagattggatgtgttggcgacaagaatgggtagcacgctgcgtttaatcacataa

SEQ ID NO: 41432 - DNA, 963 bp, Vibrio cholerae
ttgaattggcatagatttacccaagtacagaacgtgcccccttcacaagccgcattagcgttaggcatgattgggctcggccatgcttgggtgctctattatcctgccgttggcatggtgattcgcccctacttagcattcagcggagccttgttactactccctgtactgctcaaatatcttcattggcgtactttcattaatgatcttcggcaccccgtatcagggagtttaatggctccgatgagtatggctttactcattctatgcgactatctcgcgattctatctcctttcattgcctatcccatctgggcggcagccttattactgcatttaaccatgatgacgctgttcttctattttcagttgcgtcaattcaagctcgcaaatattgtgcctagctggtttttgtatcccgtcggcgtcatcagcagttcacttgcaggcacccaatttggacacaccctgttttcggaaaccatggttaacgtctgtatcgctatctatttcgtcatgttgccgctcgtactttatcggttggtgtttgcgggtacattaccgaaaagagctcgccccacactggcgattatggccgcacccattaacctgaccttagccacttatctggtcaattttgcgcagcccgacccgattctgacaggggctttagcgggcattgccataaccatgactttactcatctacctctgttacctgcgtttactgcgactacaatttcagccctccatcgcggcagtcactttcccatcggtcatcagtgcggttgccatgcaaagattgaccgagtttttcgctaccgatcatccacactggtattggctacactatttcggctttttagaggtcacgattgcaactttgttagttgcctgggtctcttggggatatatcaaaatgtattggcctgaattatttaaaaatcgctcagtaaactcctaa

SEQ ID NO: 41433 - DNA, 945 bp, Vibrio cholerae
atggttaacaactcaatccaatggtttccggggcacatgcacaaagcacgcaaggaaatcgaagaagcgattccgcaagtcgatgtgattatcgaagtgcttgatgcgcgtattcctttcagtagcgaaaacccgctgatttcgcatatccgtggtgaaaaaccttgtgtgaaggtactgaataagcgtgatcttgcggatcctgagttaaccgagctgtggattgctcatcttgagcaagaaaaaggggtgaaagcgatggcgatcaccacatccaatccgcaggaagtgcacaagatcctcgaactgtgccgcaagctcgctccacagcgtgaagagatcggcaaaaacattcgcaccatgatcatgggcattccgaacgtagggaaatcaaccattatcaataccttagcgggccgtgcaattgctcaaaccggaaaccaacccgcagtgactcgtcgtcaacagcgcatcaatctacaaaacggaattgtgctctctgatactccgggaattttgtggccaaaagtggaaaaccctcatagcggttttcgtttggcggccactggcgcggtaaaagataccgcgatggaatacgatgaagtggcgttttacaccgtcgagtatctggctaagcactacccagaaagattgaaagagcgttaccaaatcgatgaacttccagaaaccgatgttgaattgatggaagagatcggtcgtaaacgtggcgcgctacgtgcgggcgcgcgagtggatctgcataaagcctctgaaatcctactgcatgagctgcgtcaaggtgtgcttggacaaatcaccttggagcgtccagaaatgatcaccgaagagttacaacaagttgaaattgatgaagcgctgaaagccgaagagaaagccaaacgtaaagaagagcgccgtaagcgttatctgcgtaacaagcgttaa

SEQ ID NO: 41434 - DNA, 1863 bp, Vibrio cholerae
atgaaacctgcaaaacaaacgacagccagcttggcatttctggcaatgggtatcgtctatggcgatatcggaactagtcctctttacgcttttaaagaagtgttcttcagtcatcatccactcgcgattaaccctgacaatgtgttggggattttatctttggtgttttgggcatttgtcctgatcgtttccattaaatatcttttgttggtgacacgcgccgatcaaaatggtgaaggcggtattctgactttatccgccattgctcaacaaagtgcccccaaaccttggcagaggattgccatgttacttgggattttggcgacgggctttttctttggtgaagcggtgataacgcccgctatgtcagtactttctgcggtggaagggattgcggtggcgcaaccagacttagctccttatgtactgcccattgccatgatgattattgtggcgctgtttgcggtgcaagcgatgggaactgagcgtatcgggcgctttttcgcgccagtgatgttgctgtggtttttagtgctggctttactcggtgcccatgcaatttggcacgcgccccaagtattacgtgcactcaacccagcgtatgcggtgcattttgtcttgctttatggacagcacaccctgtttattttgggcttagtcgtgctttcggtgactggggttgaagcattgtacgccgatatggggcactttgggattaagccgatccgcattgcgtggtttgcactggtgatgcccagtttgctgctcaactattttgggcaaggggcgtatctgcttaccctgtctgcgcccacaggttctactttctttagccttgcgcctaaagcttggttgtggcctttgatcttgctggcgacgtttgccactgttattgcttcgcaagcggtcatctctgggatcttttcgttagcgagacaggccatcaactatggctatttgccgccgatgaaaattgcgcatacttcagagcattcacaagggcagatttatgtgcccgcggcgaacatgttgttgtttgtggccgtgatttttgtgatgttacgttttcgctcatccgccaacttagcggctgcctacggtattgcggtcacggcgatcatgatgatctcttcgctactgttggttttggttgcgcgttatcaatggcagtggagatggccgcgagtcgtcacgattgggatcgtgtttattggcatggatagtttgttgttagcgtcgacctcaaccaaattgatggagggtggttggctgcctctgcttttaggatgcgtggtgtttatcgtcatgtatatctggcagcagcagcgccaacgcttgctggaaattgccggtaacgagctctcggtttcggcgatgattcagtcattggaggaagagtctttccaacgcgccgcaggaaccgccgtttatttgtctcgctcgctgaaccatgtgccgcgctcgctgctgcacaatatcaaatacaacaagaccttacatgaaagaaatgtattgatgacctttcaatatgaagcggtaccaagggttcacccatgtcgcagagctgagatagagcaggtctcggccagtttttggcaagtagtgatccatatcggttatcaagaggagccagatatggcgcaagtgatgcattgctgcggtctaaaaggcttgtatttgcatcccaatgaaacgctctttttgctctcttcagagcgattgaaagtacaaaaactggggatgtggcatgacctgaaagtctggttctttattcagatgagcaaacatgcgctgagaacgtcggaaagattgaatattcctcccgatcgcctaattgagatgggtgtgtatcgagagatgtaa

SEQ ID NO: 41435 - DNA, 1494 bp, Vibrio cholerae
gtggtgacaagacttaatgaagcacacaaagcgctgattctggttgcgctgtacgccatggtcactgtcgtgggagtgatgtaccgcaaagatatgattgagactgatgtggctatgctgtttttgttgctcaatatcttgagcgcatcagtactcaaaccgcgcaacgcttacgtgatgatgggattaagcatcatcgattatcactactttctgctaccggattatcaatcgttccgatttgagaatgcgcagtacgtgattacctatgcggtgttagcttttagtgggattttcgcggtgaatataacacaggctcagcgcaagcaaatagagaaaaataagcgcctgcagcagcaacacaagaagtactatgaacttgcttgccatctttctgcactcagtaccagtgaagacattgctcaagccaccgtcaaatttttaagtaaagagaaggggattgtcagtgcgatcgcgctataccagccgcagtggcaatgggtcgcgcagcacgctgatttccccgttgcagcaattgaactaccgcagcctcctttgactgataacacatcaaccttggtgcaagatgagcagatcaatgccttcaccttggtagatcgtgggacgatccttggggtcatttatttcctacgttatccccatgagcgcttcgcatcgccagaggctttgcggcgtgaatctaaaatcgcaccttgggtacgctctcttctgactctttctctagcaagggctcatgcgcatcgcaccttggcccatgtggaagcggagaaacagctggaaagtacgcgtacaacgttactcgcgtctgtctcgcacgatctaaaaacgccgcttggcgcgatcattggctctgctaccactttaaccgatccgagtcttcacctctcgacggaaacccagcaagagctgctgacgtcaattgctgagcaaggcgagcggttaaatcgcagtttgaccaaactgctcgatatcacccgctatacggcatcggcgctagtacctaagttagattgggttgaaccggaggagttgattggaacggtgctcagtcgcttggctccgcgattaacccatcacaaagtacagattgagagtcaaccgatgttggttgagcttgatagcttactgattgaacaggtgttgattaacttagtggaaaatgccgcgaaatatacacctagaggcagcgaaattgagatcgcttgtgcttatcaagagcagcagtttacgctggcggtgatggataacggcgcgggcatccccgatgaggcattgcctagaattttcgaccggttttatcgtgtggaaggcaaccatgctgatggaacggggcttggcttggcgatttgccaagtgattgttgcagctcaccaaggttcgattcgagtacataatcgagagtctggtggcgcatgttttacggtgacgattccttgccgccaatacaatttaaaggaactgtatgaacagtga

SEQ ID NO: 41436 - DNA, 570 bp, Vibrio cholerae
atgaaaaaaacactaatggcagttggtcttgctgcagtcatgtccatcccatttgcagctaatgccgctgactatgtgattgatacaaaaggcgcgcatgcttcaatcaacttcaaagtgaatcatttgggttatagctacattaagggacgcttcaataaatttgatggtgagttttcttacgaccctgccaacattgccgcttcgagtgttgtggtgaatgtggatacacgcagcctagattcaaaccatgcggagcgtgacaagcacattcgcagcgcagattttatcgatgcttcgaaatattcgaccgcgaccttcaagagcaccgaagttgttgataaaggcaatggtcagcttgaagtgaaaggtgacttgactctacatggtcaaactaaacccatcgtgatcaatgctgagtttatcggcgctggacaagatccatggggtggtcagcgttctggttttgcgggtacgacccgtcttgagctgaaagatttcggcattcaagtgatgggtgcttctagctatgtcgatatggaactgcatgtggaaggcgttcaaaaataa

SEQ ID NO: 41437 - DNA, 1665 bp, Vibrio cholerae
atgggccctggtgaggaatctaaggagcagcctatgcatttagagcgaattgaaatcgctggtttccgtggcatccgccgactatcactgacctttgatgaaatcaccacactgattggagaaaacacttggggtaaatcgtccttgctggatgccctgtcggtagtattgccggcggatggcactctatacccattcaccctgcaagatttccacgttgattactcgattgccgatgcgcagacgcaaaatttgcagatcatccttgttttcgccgccaacgacctccatgagcccaaggctgggcgctatcgcaaactcaaaccactttggcaaaccgatgaacaaggggcgcaaaaaatcatttatcggatcagcgcctcaagggtcaaatatgacatcagcactcaatacgcttttctagatttagagggcaactcactcactctgcatcactcagaaaaattggcgcaagagttgatgagtttacatccagtgatccgcttaaaagattctcgacgttttgaaaaatcgctcgccaatggcaacggcaagaatgctcgtgtcgagaaacggatcagcaatacgtggcgacgtttaatggcgacgcccggacacgttaacaaaggcgagatccgcagcagtttgagcgcaatgaactctctggttgagcactacttttcgttcaaaagtcaaagccggaaaaatccgcgccgcgaacgcgacagcttactgtatgcggcctctccgagtgagaaaagcctcagccaaatcattcatgaaaccaaaaataaacagactaagctgctgcttcttggtttactcaacgcgtatttacaaggcaaaggacccaaagagctgcgccgctgcgctcggccgattttgatcattgaagatccggaaggtcgtttgcaccctacgcaccttgcccgagcttggagctttttagatttgctccccatgcagaaaattctcaccaccaacagcagtgatttactgggggcggtgcctttgcattcgattcgtcgtttggtgagaaaatccgatcgcaccattgcgacctccgtttcgcagcgcagtttaagtcgagatgagttgcgccgcattggtttccatatccgctttcaccgttcgggagcgctctttgctcgctgctggctgctggttgaaggtgaaacggaagtgtggctatttaacgaactcgcccatcaatgcggatacaacttagctgcagaaggtgtgcatatcatcgaatttgctcaatcagggctaaaatccttaatcaaggttgcacgtgcgtttggtattgactggcatgtggtgaccgatggagatccagcggggaaaaaatactcggcgaccgtacgaggattactgggacatgatcaagagcgacatcgcttaaccgaattgcccgatcgagacattgagcacttcctttactcgcacggctttgaatacttcttcaaagagctggttaaaattcctcatgaccacccaatccccgccaaaaaagtggtctctaaagttctgaaaaaacacgcgaaaccggatttggctttggcgatcgtttcacattgtgaaagcaatggaacagagtgtattcctgtactcctgcgctggacgttaaaacgggtcatcacaatggcaaacggcaatacctag

SEQ ID NO: 41438 - DNA, 957 bp, Vibrio cholerae
atgtccccaatcacttatcttggctttggcctacttaccttaactcttgtagccgttgatctctggcaaacccgtggtgggaatgtcacgatcaaaaaagcggccatctggagcatcgcctggtttcttctcgcgtttgtctttgcgattagcctttattacggctggcaatggtacgcccctcacagcagctacagtgccgagaaagccactctttcttttattaccggctatttgctcgaaaagtcgttaagtgtcgataacttgttcgtgtttgcgattatttttcatcaatattcagtgccagagcacttacgcccacgagctttactttggggggtgatcggcgcgctggttttacgtgcgatcatgattgccgtgggggcgcaactgctcagtcaatatcactggatcttatacgtgtttgctctgtttctgatttggacagggatccaattggcgcgcgataaaggtgaagagtcgattaacccactgcctgaacgttggattcgtcgttgcttcaacgtgacgaaagagtatcaaggcaatgcattgatctgtaagcagcaagggcagtggtgggtaaccccgatgtttattgtgattggcgtcattgcgttcatggatgtgatgtttgctttagattcgattcctgcgatttttgccatgacccaagagccatttttagtgctggcagcgaacgtgtttgctttattggggctgcgctctctgtattttgtacttcaaggcatgatggataaatttttctatcttaaaccggctttggctttcattatgatgtttatcggggtgaagatgatgttagttgattcagcatgggcaattccaacgccgatctcactctgcgtgctactggtgaccatgagcacggcggtgatcgcgtctgtactccgtgagcgttctcaatccaaacccatcgcagagaaagtctcttaa

SEQ ID NO: 41439 - DNA, 1539 bp, Vibrio cholerae
atgcaaattggtgtaccaagagaacaactcgctggtgaaacacgagtcgctgcttctccctcatcggtagaacagcttattaaattaggatttgaggtttgtatcgaatcaaaagccggagcgcttgccagtttcgatgatgccgcttataccgcagccggcgctacgatcggctcacgtgaagagatttgggcttgcccacttatcctcaaagtcaatgctccttcagatgacgaaattgctcttcttaaggaaggcgcgacactcgtaagttttatttggccagcccaaaatcctgctttgatggaaaaactctcaagtaaaaacatcaacgtactggcgatggatgcggtgcctcgtatctctcgtgcgcaagcattggatgcactctcgtcgatggcgaacattgcgggttaccgtgcagtggtagaagccgctcatgagtttggtcgtttctttactggtcaaattactgcagcaggtaaagtatcgcccgcgaaagtctttgttgctggtgccggcgttgctggcttagcggcaataggggctgcgggtagtttaggcgctatcgtccgtgcgtttgacgttcgtcccgaagtaaaagagcaagtgcagtctatgggggctgagtttttggaagttaacttccaagagactgctggctcaggcgatggttatgctaaagagatgtcggatgaattcaaccgtaaagcggctgaactttacgccgctcaagcgaaagatgtcgatatcattattactaccgcgctgattccaggaaaacctgcaccaaagcttatcaccaaagagatggtagatagcatgaaagcgggcagtgtgattgtcgatctggcggcagcgaatggcggcaactgtgaatacacagtcaaagatcaggttattaccacagacaacggcgttaaagtgatcggttataccgatatggtagggcgtctgccgacccaatcatcgcaactgtatgcaacaaacctagttaacttgctaaaactactctgcaaagaaaaagacggcaatatcgacatcaacttcgaagatgttgtgctgcgtggcgtcaccgtagttaaagccggcgagattacttggccagcgccgcctattcaggtatccgcacagcctcagcaaaaagccaaagtgcaaccgactaaagcgcagaagaaagagccagagccgacttctcctgttaaaaaactggttggtttagccgtgggtgtcggtctgtttgcgtgggtagcttctgtcgcaccagccgcattcttaggacactttactgtgtttgtcctggcctgcgtcgtgggttactacgtggtatggaatgtaactcatgctcttcacacacctttaatgtcagtgactaacgcgatttctggcatcattgtagtaggggcattattacaaattggtcaaggcagcggtattgtgactttcttggctttcatcgccgtcttaattgcaagcatcaacatctttggtggctttaccgttaccaaacgtatgcttgaaatgttccgtaaaaactaa

SEQ ID NO: 41440 - DNA, 1005 bp, Vibrio cholerae
atgactaagacaacaatcctacttttgtgcggtggcggctcatctgagcacgaaatttctctcgtatcagccaactacatccaacaacagcttgaactgactccagagtttcacgtgattcgagtcgagatgaaaaaagagggatggttttccgaacaaggagcccttgtatacctcgatacaaatagcgcaacattaaatagcgataaggcttcctacccaatagattttgttgttccttgcatccatggtttcccgggagaaactggggatattcaatccatgttagaactggcaggcattccttatctaggctgtgggccagaagccagtgcaaacagctttaacaaaatcacgtccaaactatggtatgacgcattagatattcctaacacaccgtatctatttttaacccaaaatacaccaagctcgattgataaagccaagcaagcttttggtcattggggaagtatctttgtcaaagctgctcgtcagggttcttcagtcggatgctacaaagtaaccacagaagatcagattgcccccgccattgaggctgcttttggtttctcagagcaagttcttgtcgagcaagccgttaaacctagagagttagaggtttctgcttatgagatgaacggaaaactctatatctcaaaaccgggagaagtgattgcaccagaaggtacattctattcatatgaagaaaagtacagtgcgaatagccacgccagaaccgtcttagaagctgaaaatctaaccgagaaacacaaagaattaattcaaacatatgctgaacgtgtattcatccatatgaagcttcgtcatttatctcggatcgactttttcttgactcaagagggacaaatttacctcaatgaggtcaatacatttccaggaatgacaccgatttccatgtttccgaaaatgctagagcataacggacaccgatttagtgaattcctcgtgcaatgtgtcaccaacacattagtaaatgcgaagtag

SEQ ID NO: 41441 - DNA, 2097 bp, Vibrio cholerae
ttgcaggtagttcaaatgtataaaaagtctctgctctctagcgcgatcatgctagcactcgtgccttcagcatacgcggatgattatgcctcattcgatgaagtagtagtatctacaactcgcttgaatactcaaataactgacaccgcagcatcagtcgctgttatcaatgcctcagacattgaacagcagatggctgaagatatcgaaggcctattcaaatatacccctggtgtaacattaacaacgaattcgcgtcagggcgttcaagggatcaatatccgaggtatcgaaggaaaccgcatcaaggttatcgttgacggtgtagctcaacccaaccagtttgactccggaaattcatttttaaactcatctcgagttgatatcgatacagatatggtgaaatcggttgaaattgttaagggtgcggcatcatcactacaagggtcagatgcaattggcggtattgttgcttttgaaaccaaagatcctgccgatatactcaaaggccgtaatatgggtggctatgcgaaactgaattattcgtcatcagacaaaacatttagtgagtctatcgctttagccaataaatctggtgatttagaatcgttagtcgcatatacgcgccgtgatgggcaagaaatccaaaactttggttcgccagaccaacaagataacaatgctaataatttactagtcaagttacagtatcagctaaatcctaagcatagacttgaattttcagggaactatattcgcaataaaaatgatttagaaaacttagaattttctggctacaagaacgcttctggtactgatgaaacgactcaatatcagttaggcattaaacatatatgggatgccgagttttctcttgctgatcgtataacatggcagtttgatgtcgtaggtaaagaagagactggtattactgatcgcacaagcaaatcaaatggaaatattcagaaaaaagattatttatactccgataagggtttttcatttgatagccagttagacaaatcatttatggtttccaatacagaacattatatcgtatatggtttttctttaagtgataaagatatagaaaatacaaaccaagagtttaactcaattgggaaaaacaacgttattttctacatacctaatgcatctgaaaaacgttatggcttttttatccaagatgaaattgcattcgataacttaatcgttactccagggatccgtttcgattccttcgaaacaaaacccggagatacaagtgctaacccgagcctaaatgatgcaagtgaatacaagaaatattcagactcagcattaacagcgagactaggtactgtttataaattgaaccaagaaaatcgtctgtttgcacaaattagccaaggtttcagagcaccagacttccaggagctgtattactcttttggtaatccagctcatggatatgtttttaaaccaaaccctaatctagaagcagaagacagtgtttcttatgagcttggatggcgttataacgcagatagtgtaagtaatgaactatctattttctacagtgattatgataactttattgatagtcaaattgtatctggtagcttcaaaacaagggatgctgtacaccaatcaattaatattgataaagcaacaattaaagggattgaactttctaaccaattcttttgggatagatttatgcctattgtaggctttagctctcgtattgctgctgcatatacggaaggcaaagatggcaatggaaaaccactcaatagcgtaagtccttggaatgctgtcactggtatcaattatgattcagaaaataattggggtactgcagttaatctgacttataccgcgaagaaaaaagctagtgagatcaatggtgactaccaaccaatctcttcagcaacggttattgatgttacagcctactacaaacctattaaagatttaacactacgtgcaggtgtgttcaatcttacagatgaagaatattataactggaatgatgttcgcggtttacctagtgaagataaagataagactcaggctaagcgtaactttggtattacagctaagtatgaattctaa

SEQ ID NO: 41442 - DNA, 1698 bp, Vibrio cholerae
atgagcagcccgcgtttacgtgtacagttcgaaacactctttgagcattttcaaggtcaagacgttgaaacccaactggaagatgtcaccgatattcttttttgcactcgacgtaatgcgcgtattgttctcaataaaatggaagaagaggggtggattgagtggcatcctgcggcggggcgcggcaaactctcgcaactgatctttaaacgcagtcgcgcggatgtcagtgagaaccttgcgcgccgttatctcaatgaaggaaagataggccaagcgtttgccgtgcttgatcaggacgccgcaaaattaactcaagtgatagaaagctaccttggcgttcagcatcaagaaggtctgcaagttgtcaggttgccttactatcgtcagctatcgatgttgaacccacaaaagccgatgcgccgctctgaacagcatattgcgcgacaggtgtttagcggccttacgcgtcttgatgaagaagagcaattacagcctgatttagcacacgcttggcaggcgctatcagatactcactggcggttttacttacgccccggagtgcgctttcataatggcaatctcctcaccaccgaactgattgtgcaaaatctttggcagctacggttgcttaatctttttgcccatattgaccgagttgactcaccttacccttgggcggtcgatgtgcatctgcaaaagcccgatacccgcttaccgctattgcttgccgaagcctgtgccaaaatcctcccagcggagtccgatcgcaatcccgattttgatttaatgccagtaggaacggggccctacaaagtggttctaaacgatgaaaaacgtttggttttgcaagcgtttgatggctattttggttttcgtccactgctggaccgagttgaagtttgggtgattgatgaagtgcactcttccatggtttttccaagcttatccaatccgatgaaaactgctcgaggatcatcaacggaagaggtagagctggatcccggctgcacctatttactgcttaatcgtcgcaatggcgttgccaaagatgaacattgggcgcgctatctcactgacaaacttaatgcgctcaacctgtttcgtcttctgccggaagagaaaatcattgaacttggggtgttgccagcctatgggttaaaacccgggtggtatcaccactcagcggcagcgcaaagaacgttaccgccagaatccaaagaacttacgattgcctatcacgctcagcatcctatgtttccgactgttgctaatgcgattaaacaattgctcagccaagatgggatcacagtcaatgtcatcaaatatgaacacacggtcgttgaaactgaaaatgtggatatttggattaagccaatgggtattgctaatcaccgtgatgatgcgttagcggggtggttactcaattactccgatattgagtttttgagcaaaggagaggatttcaatcagtgggtgagtttgattgatgcttggcgtgctgactcttctgcgctcttccctgcgaaagaactggggaaatcactggtggaaaaacaccaactgatcccgatgttccactgctggttaggcatcagtaaagatcagtgcggtgcgttacaaaatgcgaaatgcaatgcgctaggttggttcgattttagccaagtctgggtaaagccagacttgtcagaacactag

SEQ ID NO: 41443 - DNA, 1836 bp, Vibrio cholerae
gtgttgagggagaaagccatgcgcagttggaagccgattgctttaggagtgacgctcgcgttatcgagccaattcagttgggcggccgtgatagaaaccactcggctggttgggtttggggaagctaaatacccagaaaactttacgcactttgattatgtcaacccacaagcccccaaatacggcaaagtgaccttcggtgagttgggcacatacgacaactttaaccgttttgcttcacgtggcgtggcggcggccaataccgcagagctgtatgatcctctcatgttttctcctgcggatgaaattgactcttactatcccttgattgccagtaaaattcgctattccgatgatttcacttggctggaaattgatctcaatccgaatgcgcgtttccatgatggcaaaccgatcaccgcgcaggatgtggagttctcttttgagaagtttatggccgaaggtgtcccgcaatatcgagtgtattatcaggatgtaaaatccgtgaaagccattgctgagcggacagtacgcattgaaatgaagcagccaaaccgtgaacagttatttagcttggcgcaatcgacccgagtcttacccaaacattactggcaatacaagaatttggccgagccgctcaatgagcctcccgttgggagtggggcttatcaaattgtcgatttcaaacccggtcaaagtgtgacctataaactgaatccggactattgggcaaaagatttgcctgtcaacgttgggcgcaacaacttcgcccagatccagtacgactactatcgcgatgacaccgtgatgctggaggcgtttaaagcgggtgagtttgatttacgtgaagagaaccaagccaagttctgggcgacctcttacactggtcgtaattttgaccaaggtttgattaagaaagaggaaattgctcaccaagcgccagcctctactcagggatttattttcaatacacagcgtcctgtattccaagatgttcgagtccgtgaggcactcaactacgccttggactttgaatggatgaacaaaaacctgttctacgatcaataccagcgaacccgcagctatttccaaaacaccgaatacgaggctcaaggtctgccgaatgccgcagaacttgctgtgctcaccccttacaaagaacaactacccgctcgggtatttacggaaacttatcagccttccgtgaccgatggcagcggacgaattcgcacccaaatgcgcgaagcatttgccttgctgaaagaagcgggatgggagctgaaaaataaggtgatgaccaacgtcaagactggtgagccactcagttttgaactgctgatttacagtccaacaacggagcgaattgcgattcctctgcaaaaaaatctgcaactcatggggattgagatgaagatccgcacggtcgacaccacgcaatacaccaaacgtctgcgtgatcgtgattttgacatgatatcgcacggctttagcgcgaatccttacccgagcccgaatctactgattgtctggaattccaattatatggactccagctacaactcagcgggggccaatcatccggtgattgatgctctgaccgaacaaatagccaaaagccagcaagataccgaaaaacttcgcgcattgggttcagcactcgatcgcgtgttgcaatggaatttctacatcattccgcaatggcatttgagtatgtaccgtgtggcgatgtgggataaattcagccgcccaagtgtgctaccgaaatattctcttggtttagacacctggtggatagatcaagagaaagccgcgcggctacctgaaaaacggcgttag

SEQ ID NO: 41444 - DNA, 765 bp, Vibrio cholerae
gtgatggtggatattctcagcgatgcagaaatgctgcgttacaaccgacagatcattctcaaagcgtttgattttgaaggacaagagaagctaaagcagagcacggtgctgatcctcggtgcgggtggtttgggctgcgcgagtggccaatacctcgcgactgcggggatcggccacatcacattggttgatgatgatgtggttgagctctctaacctccagcgccaagtgctacaccatgatgcggatattggccgcgcgaaagtcgattcggcggccgattcgctgcgtctgctcaatccgcatcttcaggttgagacgatacaagcacgtttgagtgatgacgaattggatgcgctgatcgcacgccacgatctggtgctggatgcttgcgataatgtgggcacacgtaatcagctcaatcgcctgtgctttaaacacaaaacaccgctggtttccggagcggcgattcgcatggaaggccaagtgagcgtgtttacgtatcaagatcccgcgcagccttgctatcaatgcttaagcgccctgttcggctcatcggcactcagttgtgttgaagcgggtataatggctccggtggtaggcattattggtgcagttcaagcaatggaaaccattaaggtactgactgaattaggcacacctaagcaaggtaagatcttgattcttgacgcgatgagcatgtcatggcgtgaaatgaacctgatgcagttgcctcagtgtccagtttgccacccgcaaagctaa

SEQ ID NO: 41445 - DNA, 996 bp, Vibrio cholerae
atgagccaaattccagagatttcggttgaaagtaccgatctgctgactgaaatcgccgtctcttattatcaagatggcgcaacacaggaagagatttccaaaaaatacaccatttcacgcgccaaagtggggcggttgctcaagcaagcccgtgatgaggggattgttgaaattactgtgaaataccatccggtgttcagcgccaaaatcgagcagcgcttgatcgaacgttttggcgtgcgccgcgccttgattgccctcgatcaacccaatgatgaagcacagcgccaacaagttgcaggtttggtatccaactatctcaccagcacgctaaaaaacggcatggtagtgaccgttgggcaggggcgtaatgtgtcagccgtggcgcatcatgttggggtgatcacgccgcgagattgcaaatttgtgtgcagcatcggcggcattcacccacgtggcggtatgtttaatgctgaccacatttgtcgtcagctagccaaaaaatacggcggcagttcggaaaccttgtacgcgccagcttacgcagaaaacccggagcagaaacgggtgttcatgcaaaatagcacggtgaagcaaaccctcgatcttgctcgtaaagcggatatcgcactggtcggaattggcgatatgagtgaaaacagctacatggttgatcttggctggtttacgccggaagaggtggtgcaatcacgcctgaatcaaggtgtggtcggtgatttcgccgggcatgacttttttgatgtgcatggacgtatcgcgaataccgtgatgaatgatcgcgtgattggcttggggattgacgagttccgcccaattgctgaagtgatcgcaattgccgcagaaaacagtaaaccgcttgctcttttgggtgcactgcgcaccggcgcgattgatgtgatcgcgaccagtgtgagtaacgctttgaccgtgctcaacttagatgagcagatgcaaacggcattatctgcgtcttaa

SEQ ID NO: 41446 - DNA, 951 bp, Vibrio cholerae
atgagcaataaattagcgcaacttcgtaaactgaccacagtcgtggccgacactggtgaaattgatgcaatcaaaaaataccagccagaagacgcaaccactaacccttctctgattcttaaagctgcgcagattgctgaatacgcacctctgattgatcaagctatcgcctacgcaaaaactcaaagcaacgacaaagcacaacaagtacaagacacttgtgacatgctggcggtcaacatcggtaaagaaatcctaaaaaccattcctggccgtatttcgactgaagttgacgcgcgtctttcttacgacaccgagcgcagcgtagcgaaagcacgtcagctagtaaaaatgtacaacgatgcgggcatcagcaacgatcgtatcctgatcaaactggcttctacttgggaaggtatccgcgcggcggaaattcttgaaaaagaaggcatcaactgtaacctgactctgctgttctctttcgcacaagcgcgtgcgtgtgctgaagcaggcgtgttcctgatctctccattcgttggccgtatcatggactggtacaaagctaaagaaggtcgtgatttcgcggcaagcgaagacccaggcgtactgtcagtcaccaagatctacaactactacaaagagcatggctacaaaacggttgtgatgggtgcaagcttccgtaacatcggcgagatcctagaactggctggctgtgaccgcctgactatcgcaccttcgctactggctgagcttgaagcggctgaaggcgaattggttgcgaaactggttgactcaaaaggctctaaagctcgccctgctccaatgacgcacagcgaattcctgtgggaacacaacctagacgctatggccgttgagaagctggctgaaggcatccgtaacttcgcggttgaccaaggcaaactggaagcaatgatcgcggctaagctgtaa

SEQ ID NO: 41447 - DNA, 2043 bp, Vibrio cholerae
ttgttgaacgcactccgttcaacctcctttattgaaatgagtaacactatgaatcgcaaacaacttgccaatgctattcgtgccctgagcatggacggcgttcaaaaagctaactctggccacccgggagccccaatgggcatggcggatatcgccgaagtgctgtggcgttcacacttaaaccacaacccacaaaacccaaactgggctgaccgcgaccgtttcgtactgtctaatggccacggctctatgctgatttactcgctgctgcacctgagcggttatgagctgtcgattgacgatttgaaaaacttccgtcaactgcactccaaaacaccgggtcacccagagtacggttacgcaccgggcatcgaaaccaccactggcccactcggccaaggcatcaccaatgccgtaggtatggcgattgctgaaaaagctctggcggcgcagttcaacaaaccgggtcacgacatcgttgaccacttcacttatgtattcatgggtgacggctgtttgatggaaggtatctcgcacgaagcctgttcactagcaggcacacttggccttggcaaactgattgcattctgggatgacaacggtatttctatcgacggtcacgtagaaggctggttctcagacgacacaccaaaacgctttgaagcgtacggctggcacgtaattccagcagttgatggccacgatgcagatgcgattaacgctgcgattgaagcggcgaaagcagaaacgtctcgcccaacgctgatttgtaccaaaaccatcatcggtttcggctcaccaaacaaagcgggctcccacgactgtcacggtgcgcctctgggcaacgatgaaatcaaagccgcgcgtgaattcttgggttgggaatacgctccatttgaaatcccgactgacatctacgccgcgtgggatgcaaaacaagcaggcgcaagcaaagaagccgcttgggatgagaaattcgcggcttacgcgaaagcttacccagccgaagctgctgaatataaacgccgcgtagcaggcgagctgccagcgaattgggaagccgcgaccagcgagattatcgctaacctgcaagctaaccctgccaacatcgcatcgcgtaaagcatcacaaaatgcgctggaagcgtttggcaaactgctaccagaatttatgggcggttctgctgacttggcgccttctaacctcaccatgtggtctggctctaagtcactgacagcagaagatgcgtcaggcaactacatccactacggtgtgcgtgagtttggtatgacggccatcatcaacggtatcgcgctgcacggcggttttgtcccttacggtgcaaccttcctgatgttcatggaatacgcgcgtaacgcgatgcgtatggcagcactgatgaaagtgcaaaacatccaagtgtacacgcatgactctattggtctgggtgaagatggcccaactcaccaaccggttgagcaaatcgcttctctgcgtatgacaccaaacatgagcacatggcgtccatgtgaccaagtagaatcggcagtggcttggaaactggccatcgagcgtaaagatgctccatctgcgctgattttctcgcgtcaaaacctcgcgcagcaaccacgcagcgcagagcaagtcgcgaacatcgctaaaggcggctacatcctgaaagattgtgcaggccaacctgaactgatcctgattgcgacaggctctgaagtggaactcgcggttgccgcttacgagcaactgagcgccgaaggcaaagcggttcgcgtagtttctatgccatcgaccgatgcatttgataagcaagatgcggcttaccgtgaagccgttctgccagccgccgtgaccaagcgtatcgcgattgaagcgggcattgccgacttctggtacaagtacgttggctttggcggtcgcatcatcggtatgaccagctttggcgaatcagcaccagccggtgaactgttcaaactgtttggtttcacaactgaaaacgtagtgaaacaagccaaagaactactggcgtaa

SEQ ID NO: 41448 - DNA, 318 bp, Vibrio cholerae
atgccagaacccaccaccatcaagattgaaatggatgaaatgaagaaaaatgccgaagaagtggctgaattactgcgtgtgatggctcatccagaacgattaatggtgctgtgccaactgacgcagagtgagatgggcgtcgggcagcttcaacaaggttcgacgttgagtcaatcggccttttcacaacaccttactgtgctgcgaaagcacggcattatccaagcgcgcaaagaatcgcaacaggtgttttatcgcttggcggacagtcggatcacggcgttgattcaaagtttacagaatgtgttttgtcgataa

SEQ ID NO: 41449 - DNA, 1296 bp, Vibrio cholerae
atgaccaccaaaaaacacatgagcgaagttcctatgattcaaagagtagccgcctatctggcgatcttggttggttactttttctattgttataactttgtaattattgactacgtacgcccttacatcgttgaggcttatgagggcattagcctttcagatactgctcaattctatacatggcaatccgttggggcgctgattggcgcattaagttgcgcttggtttgctggccgctttggcaagaaatacaccttgatcacgattactgcactcaacggcggtgcaaccatagtgaacatgatgtttactgactacgcgacatgggcagcgatgcgtttcatcataggtttgtcactgggcggctactttaccgtcgctgtcagcttaatgattggcctctttaccccaacggttcgcggcaaactgaccgcatttgcctcatccatgttctctgtagctttaatggtaatgggggcatacgcggcctttatctctagcatagatgccccctgggaaagtttgatgtgggttggtggaattccgcctttagctgccgcatttgccatggtatttgtcttacctagcgataaaaacgtcatcgcttacggcgaagaagattcctcagctaatacagggcaaaacacacctgcgaaaaaaggctcttggggtgaaatgctcagcaaaccttatcggctccttaccatcacctgtttgcttctagctggccttaatttttacggttttcaattctttagcggtttcgtcaccacgtatttgaaagaagttcgtcagtttgatggtgcaacaatcggtgtgatcttctcaatctccgcttttggttctctatttggagcttgggtttggggcgcggtcgccgacaaatttggacgtaaagtgaatgcgtttggcttcattcttgcgggcatcatggcttctatctttttcatcgcaccgagcgatctgatgattggcagcctcaatatgctggcaatcttgggcttaatttataactttggcctctcgtcttcagcggtttggggtggctacttctcagaattattccctgctcatttgcgcagttatggtgctgcactcttccacggcgggcgaattattggaatgtgggcacctatggttctcatttttatcaaagagcgcaccgacttacagactgcaatgtggggctcaccgattgtgtggatagtggctggcttattatggctatcgcttccagaaacattaaaaggcggtttattcgataaacgtaagagcaaccaaccggctaacgcgtaa

SEQ ID NO: 41450 - DNA, 1752 bp, Vibrio cholerae
ttggttatcaatcagagagagactgcattgttcactccagtacgacattcattaacccgtactatggcgaaagccatgttattgattttgtttctctcggcattgacgactggggtcgccattgtcactttggcgtcttctttgaatgatgcagaagcggtaaacgtctccggctctatgcgcatgcagagttatcgtttggcgtatgacatccaaacccaatcccatgactacaaggcgcatatttttctgtttgaaaactcactgtactcaccctccatgctcgctttgctcgactggacggtacccagtgacattcaacaagattactaccagctgattgagcgctggcatgagctcaaaaaagtgcttaatagtgaccaaaaagcgcaatatcttgaccaagttgcgccttttgtcagcttagtggatggctttgtactcaagttacagcgcttttctgagcgtaaattgattgcgttagctgcagtaggcagttttggtttaggcgggatttttgcggtatccctctttgtggtgtattacatccgggagcaggtcgtgcggccgctcaatgccatggttgatgccagcgaaaagatcaaaaatcgaaattttgatgtcatgctggaggagaccagcagcactgaaatggggatcctcagccgaacgtttaacagcatggcgggcgatcttggcaaactttatcgcgggctagagcacgcagtgaatgagaaaaccaacaagctgcaaatggccaatcaatcgctgcaggtcttgtatcactcttcgcaagagttgacggcttcacggatcacggcgagtaacttccaaaccattttgcgccattgggtcgcgttggaagggatttgtgctcttcgattagaaattgaagaggaagctggcaagccattgattttgcaagaaggaaagccaagcggtgccgtgatgttgcaaacaccactcaccttagatggtcatcatcttggctttttgtattgggaagcgggttcgcctgagccagatcgggctttgattgataactttgcgctgatattgtcgcgcgcgatttactacaatcaagcgcagcgccaagcagagcaactgctgttaatggaagagcgagccaccatagcgcgagaactgcatgattcgcttgctcaatcgctctcttatttaaagatccagttaaccttgctgaaacgttccgtcacgccgttaaagtcggatggcgatttaagtaagacggaaaacatcattcgcgagatagacaaaggtctgtcggatgcttatacccagttgcgtgaactactcaccaccttccgcctgaccttaaccgaaggcagttttggtcaatctctactgggtatgctgactcaactttcggggcaaaccgatgcgaaaattgaactcaataacgcgctttcctcaattgcgctggatgctcatcagcaagtgcatttggtgcagttgattcgtgaagcaacgattaacgcgataaagcacgccaaggccactaaaattaaggtcaactgccaagagcagcagggacgagtccaagtcacgattgaagatgatggggttggcttcgatctgcaagatcacaagatcaatcactatggtatgagcataatgcaagaacgcgccgcccgtttacgtggtgaattaaaggttgaatccgctccgggtaaaggctgcaaagtggtgctgacttaccaacaaagcgaggagaaaaataagaatgagttgtag

SEQ ID NO: 41451 - DNA, 2490 bp, Vibrio cholerae
atgaaaatgaccagacgtgcgtttgtgaaagcaaacgcagccgcctcagctgcggcggttgcagggatcaccctccccgcatctgccaccaacttgatcgctagctccgatcaaaccgcaattcattgggacaaagcaccttgccgtttttgtggtacaggctgttctgtgctggtcggaacccaagatggtcgcgttgtcgccacacaaggtgatcctgaagctccagtaaacaaaggccttaactgcattaagggctacttcctctccaaaatcatgtacggtcaagatcgcttaaaaacgccgctgctgcgcatgaaagatggtcaataccacaaagacggtgaattcaccccagtctcttgggataccgcatttgatgtgatggctgaaaaatggaaagcttcgcttaaaaccaaaggcccaaccagcgtgggtatgttcggttctggccagtggacagtgatggaaggttacgcggcggtgaagctgatgaaagcgggctttcgttctaacaacattgaccccaacgcacgtcactgtatggcttctgcggtagtgggctttatgcgtacctttggtattgatgagcctatgggctgttatgacgactttgaacacgccgatgcgtttgtgctttggggttccaacatggcggaaatgcacccagtgctctggacgcgcattactgaccgtcgcctaagccatcctcatgtcaaagtgaatgtgctctcaacgtattaccaccgttcctttgagttggcggatcatggctacattttccacccacagtctgacttagcgattgccaacttcatcgccaactacatcattcaaaacgatgcggtgaactgggactttgtcaacaagcacacccatttcaaacaagcggtcacagacatcggttacggtctgcgtgacgatcaccctctacagaaaaaggcgaaaaacgccaactccggtgatgtcagcgatatttcgtttgaagagtacaaaaaatcggttgcgccttacacggttgaaaaagcgtctgaaatttccggagtatcaccggataaactgatcacgctcgcgaagcagtatgccgatccaaacaccaaagtgatgtcactctggaccatggggatgaaccaacatactcgcggtgtctggatgcaaagcttggtgtacaacctgcacttacttactggcaaaatcgccactccaggcaacagcccattctcactgaccggtcagccatcagcctgtggtacggcgcgtgaagtgggtacctttgcacaccgtctgccagccgacatggtggtggctaaccctaaacaccgtgcgattgccgaaaaagtgtggaaattgcctgaaggcacgattcctgagaaaccgggcttccatgcggtgcagcaagaccgcatgctcaaagacggcgtactgaactgttactgggtgcaatgtaataacaacatgcaagccggtccaaacatcaatgaagagcgtttaccgggctaccgcaaccctgaaaacttcattgtggtatcggatgcttacccaaccgtaacggcgcaagcggctgaccttgttttgccaaccgccatgtgggtagaaaaagaaggcgcgtacggcaacgccgagcgccgtacccaagtgtggtatcaacaagtgaagactgtcggtgaatctcactccgactcatggcaagtgattgagttttcaaaacgcttcaaagtcgaagacgtgtggccggaagaactgctggcaaaagcaccgcaataccgcggcaaaaccctgtatgacgtgctgttcaaaaacggtcaggtggacaagttcccactgagcgaagcacgtgaactcaacgatgatgcgcaccactttggtttctatatccaaaaaggtctgtttgaagagtatgccgagtttggccgcggccatggtcacgatttagcgccttacgatgtttaccaccaagtacgcggcctgcgttggccggttgtcgatggcaaagaaactaaatggcgctttaaagaaggctctgacccttatgccaaagccggttcaggttgggatttctacggcaaaccggatggcaaagcgtggatcatctcctcaccttatgaagcgccgccagaaatgcccaatgaagagtacgatttatggctctgtactggccgtgttcttgagcactggcacactggcactatgacccgtcgtgtccctgagctgtataaagcggtaccggatgcgctgtgctttatgcaccatgaagacgcgcaagcgcgcggtttacgccgtggcgatgaagtgctgatctccaactcgcgtggtgaagttcgagtgcgcgtagaaactcgcggtcgtaataagccgccaaaaggcttggtgttcgtgcctttctttgatgctcgcattttggtcaacaagttaatcctcgatgcgaccgacccactctcgaagcagactgacttcaagaagtgtccggttaagatcaccaaagtcgcgtaa

SEQ ID NO: 41452 - DNA, 2103 bp, Vibrio cholerae
ttgaccatgcatgagccttctcaagcgctgaaactgacactccaccagccagtcaaaaccgatccggttttttactggctggctgcggtgctgtttagctttattcttctgccatcctttgctctggattatgggctatttgaatccactccagatgaattttatgccgccatgggttggagtgaaccaaacatttcttggttctggtttagtttgcctttattgctcgcctttcgacctcggcaagctcagggacgtcagtccacaaaccgccactatctcgatattgcctactctagcttctgtatgctggccattttgctcagcgcttggctaagcggtaaaggattgggttattccagcatcattctgttcactgcccttggcgctattatgacgctggccttcgcccgcttggaatacctcggtggcgaccattttgtcattggctcactgatcagcatcattctgctgattgtgatttttattgtttatccgagcatcgccattttcctgccgatgtttaaagatgacatgggcaactggactgcatggcagttcatgacgatcctgtcccagtctcatacccttaccgtcatttacaactcgattgcactaggtattgcggtaggcgttggcgccaccttcttcggactgatttttgccatttacaccacacgtattgccaaacgctccgcctttatcgcacgtgtattttccattttaccgatcgtcacaccgccctttattgtcgggttgggcgtgactttaatgctgggtcgctcgggttatatcactgagttgatggtcgatgggtttggtttacagaaaaccaactggctgtacggcttcacgggcatttggctcgcgcaagtgctggcgtttgcgcctatgtccttcatgattttggatggcgcactcaagtcactgcatccttcgttggaagaagcttcctacacgctcaaagccaaccgttatcaaaccttcttcggcattatcatgccactgcttaagcccgcgttagccaactcatttttgatcatattcgtgcaatcattggcagatttcagtaaccccttggtactgggcggcagttttgatgtgctcgcaacacaaatctatttctatattgcaggggcacaactggattacgcttcagccagtacactcggctcggttctgctgctgttctcacttgcgatttttgtggtgcagtatctgtggatcggccagcgctcctacgtcaccatttctggtaaagcctaccgcggcgatgtacaagagatgccagcctcactgaaattgggcgtcactgtgactttgtatgcgtggatgatctttaacgttctgctctacggcagcatcttcttcggcagctttacggtgaactggggcgtcgattacaccctgaccttcaaaaactacctcaatctgtttgggaatggcatgtctgatggtgcttggccttcactcatcaccaccatgatttatgcaggtgtggcggctccgattactgccctgttcggcttattgattgcttatgtggtggtgagacagcagttctacggcaaaaaagtgatcgagttttccaccatgctctgctttgccgtacccggtacagtggcaggggtttcctacatcttggcgtttaacgatgcgccgatttatttaactggcaccgcagcaattgtggtgatctcgatggtgatgcgaaacgtgcctgtggggatccgctctggtattgcaggactcgggcagctcgataaatcattggatgaagcgtcactgagcttacgtgccagctcattacaaaccattcgctacattattttgccactgctgcgccccgcgattctttctacgctggtgtacagttttgtgcgggcgatgaccacggtcagtgcgatcatctttctggttacaccggaaacccgcgttgcaacgtcctacattctgaaccgagtagaagatggtgagtacggcatcgctatcgcctacggttccgtgctgattgtcgtgatgttagccatcattttgttgttcgatttactggtcggtgaagctcgcgtttctcgttccaaagccaccaatcaagattcttag

SEQ ID NO: 41453 - DNA, 1206 bp, Vibrio cholerae
atggaaaagatctatatcgtgggcgcaaagcgctcagctatcggagcctttggtggttcacttaaagagtgttcagcaggcgctttggcagggcaagtcatccaagccgctcttgaagccgcacaactcaaacctgaagctgtggatgaagtgattgttggtaacgttgtgagtgccggacaaggcatgggtgttgggcgtcaagcggctttagcggctggtgttccacagtcggttccagcttacagcatcaacatggtgtgtggcagtgggatgaaatcggtgatggatgcggttgcgcacatcaaagcgggagatgcttctgtcgttgttgccgctggtgttgaggtcatgtcacaaatcccatttgttacgcctgccagcttacgagatgggcagaaaatgggcgcgtttgaagtgaaagatctgctcatccatgacggtctgaccgatgtcttcaatcaataccacatgggtgtgacggcagaaaatatcgctaaacagtacgacatcgctcgtcaaacacaagatgagtttgcgttggccagccaaatgaaagcgacagcggccattgaagccggacattttaagcgagaaattgtgcctatttcggtcaaaaaacgccgtgaaaccgtcgtgtttgatacggatgaataccctaaaccgacgaccacgttggcagcattgcaaggcttacgcgccgcgttcgatgcacaaggtacggttaccgcaggtaatgcttctggaattaacgatggtgccagtgcggtgattatcgccagtgaaagtgcggtaaaaaaactaggcttaacccctatcgcagaaattatgagttatgcacaaacagggttggatccgaaagtcatgggcttagggcctgtgagtgcagtcactcaagcattagcgaaagcagaattatctatcactcaggttgatctgtttgaacttaacgaagcgtttgccgctcaagcattaggtgtcgtttacggtttagctgagcaacacgcgattcaacctgaggcgattttagaaaaagccaacgtcaatggcggtgccattgcgttagggcatccattaggggcatcgggtaaccgcattctggttactctgcttcatgaattacagcgtcgccaaaaacattatggcgttgcttcactctgcgtcggcggtggcatgggtaccgcgatcgtgattaaaacagtttaa

SEQ ID NO: 41454 - DNA, 3063 bp, Vibrio cholerae
gtgcaaacgcagatttggcatgaggttattcgttggcgaaccggagtaaacactgcacaatatagcccaatccgccacgcagaagaagtcaacaagaaggttttccccatgcgtctcgccaaagccagtattggtcgcaagctcttattttcttttagcgcgatggcgttgctcgtgcttctctcggcgctgatcggcgttctaggtttttctctggttgccaaaactgaacgtgatgtggtcaataatgccattccttcgatgatcgaggcgcgccaagttgctgagctcagtcatcaaatcattgcttctgtacagactctttcaaacgccaaaaatgagcaagaacaccaagccgctgggcagaaggttttctcgcaattagaaacgttgctcactcatatccagcaactgggagaagaggcgtttgatagcgtgttgctggataggttagagcaagacgtacagaacgtgattgatactctcgcgcaattaggaaggcgcgttgagcaccgactcacgttggagagccaattgagtacaagcgtcaaagagatgcgcaaattggcacaagagctggagcagctaacccgtacccaagtgctcaacaccagcacgattgcaatcgccaatgtcacgcacatctacgatttattgcaaaagcagcagcaagcgcaggtttatcaggcgttagacaatctggtggaagtcgatttggatttagcggaacgcttacatgagctgcatctgttggcgtttaaagtgctcaatgagattgaagagacgcaaaccgtgactgatttagagcggattttggcgttagatagcgaatttgctgccaacttgagcattatgcagcgccgtgtgcaggcggtggaagacccgacgcgctccaaacaaatggttagcttgctgcgagggttggagaagcgccgaatcgtattcgaactattgaaacagcgctacagcaatgaacaagccgcgcagcaattactgcacgataccttgacccaatttgccaagctcaataacacggtcaatcagctggtggatgcgtcaaatcaagtgaccaccgcagcggtgagtaaactctctaacaccctctatgacgcgcaattgatcctcaccgtgctggggttactcggccttgtgattgtggtgtggatcgtgtggaaggtcgtttatcgctcggtcatccagcgtctcgatcaacacaccgccgcgctgctctcggtggcaaaagggcagctcgacgtcgacgtttcaactcaaggaaatgatgaactgggtcagatggggcaggcgattgcccatgcgcgcgataccgccaaagcgctcaaagtggtggcagagagtgaagtattagccaaacgcgagttgcaacagcacaaagaacatttggaagagttggttgaacagcgtacatgtcaattgagcgagatgaaccataagctcaatcaagaggtgctgaaccacgccaaagcgcgccagcaagcggagcaggccagccgtgccaaatctgccttcttggccaccatgagccatgaaattcgcaccccgatgaatggggtgttaggtacggcgcgtctactgcaagataccacgctgacttccactcagcagcactatgtacaagtgattaaccgcagcggacggtcgctgctggcgatcctgaacgacgtgctcgattactccaaaatcgaagcggggcatctggaaatccatcacactcattttgatttgtatcgattagtgagtgaaacccatgagctgatgcaaagccgggcgcgagaaaaaggcatcaccctcacttaccacattgatgaggatgtcacccaatactggcaaggggatgagattcgtatcgggcaagtactcaataatttggttggcaacgggatcaagtttactgaccagggcgaagtgcgtattcgtatccgcctcgcccccgatgggcaaggcattcgctttgcagtagaagattcgggtattgggattgctgaggaagagcaagcgaccttgtttgatgcctttacccaagctgacgccggacggcgcaagcttggagggacaggtttaggtttagcgatcagccgtaagttggtgcaggcgatggggggcgagttacaactcgcttcgcagctcggtcaaggcagctgtttttggtttaccttgccgctaccagtgggagagccagttgaaacgcccgccctagccgtagatgatgtgcctgtggctaacgtgctgctggtcgaagataacgaagtcaactgtttggttgcgcaaggttttttaaccagtctgggtcatcaagtgactctcgcgaaaagtgtgcaagaggcgaaactctgctttcagcagcaacgctttgatattgctctgcttgatattcatctgcccgatggcaatggggtggatctgctgcgcgacctgcgacaaatggaagacagtattcacaatgcggtgatcccatttattgccgtttctgcccacgtgtttaatgaagaagtcgccggatatttagcagcaggatttgatggctatctgcctaaaccgctggtcaaagaacaattagccgccatgttgcgtcaacagttaacggcgaagagcggagatgatgccgatatgcgcgataaagcagagagccatgatacaagcagcatcttcgataatggccaaccgcagggcgagccttcgcctgaagcgcaagctgtgcgcaaagaatgggtcgcggtaatggatcacgccaaatttgagcaggatgtgcagatccttggtgtggagaaaatgcgtgagattgttggctattttgaacaagggtgtgctgagtttttcgctctgtgtgaggcagagcgtgataacgatgcacagatcaaaagccaagctcataaattgaaaggttctgctggcgcattgtggctaacgcaactctaccaactgtgccagcaaatcgagaaagccgattcgcctgccgctgcatatcaacaaacgcctctggttgatgcggtagaaaatgccaagcaggctttgcgtaatgcattggatttgctgagtaaagaataa

SEQ ID NO: 41455 - DNA, 1050 bp, Vibrio cholerae
gtggcggattgggctatattgtgcagtgtttactccggttcgccaacgaataacctcatgccaaatctgcgtttgcactcattttcactgatttctgcacttttgctgctctctgcactgccagcggctgcggcggaaaaactctgtgcgctttaccctcatcttaaagattcttactggctgtcggtcaactacggcatggtggaggaagcacgcaagctcaacctcaacttgcgcgttatggaggcgggtggctacccgaatcaccacaaacagcagcaacaaattgccctgtgcgtacgctggggagctgacgccattttgcttggcaccgtatcacccgagctgtaccaagatgatttagcccactacacccgctccgttcctgtgtttgctacggtgaatcagttgcggttgaatgagcaacagcaagagcacctaaaaggcgaagtcggcgttgattggtattggatgggattttacgcaggggaatatttagcgcgtaaacaccccaaaggcagcggtgaaattaagattgtggtgctacccggccccgcttcgagtggcgggacaaagcccgttttacaagggctggaagaggcgattagtcacagtgatgtgcgtattacggaaatcttgtgggcggacaacgataaagagctgcaacgcaatttgatacagcaagccttagagcaaccagacgtgcgttatttggttggcagtgcggtagcaattgaagcggcgatcagcgaattgcgttcactcaacaaaagtgaccaaatcggccttatcgcaacctatttgagtcatggcgtttatcgcggattactgcgtgggcgcgtagagtttgccccaaccgatcaaatggtcgaacaaggtcggctttccgtacgccaagccgccgcgtttttacgcaacaaaccgtacgcgatacaacaagcacctaagattgaagcgttaaccccccagcacctagagagaaagatcattgcagattcgttatctccgtccgaatacaggcccgtatttcaagtaaaagcggttgaataa

SEQ ID NO: 41456 - DNA, 357 bp, Vibrio cholerae
atgaaacactctcgtactggcttcagtcgcattatttacgccactggatattcgatgaaaggctttgccgctgcatggaaaaatgaagccgcgtttcgtcaggaagttaccttagcactccctttgatcgcgttgagtttttttctgcccgtaagcacgattgaacaggtgttaatggtgggcagtttagtgttgatcttgattgcggaattactcaactcagcgattgaagctgtggtggatcgcattggtgcagaacgtcacgaattgagcgggcgagctaaagatattggctctgctgcggtttttgtttcgctctgttttgccgcgtttacttggacgtggatcctactgtaa

SEQ ID NO: 41457 - DNA, 2178 bp, Vibrio cholerae
atgtgctgcgctgtgccgaaaattaaccaactgcgcctgtattgggcaaataaaactgttaactacagtgtcttgatcttattgactttactgggtgtggtgatccccgcttggtattatcagctcaacacttggatcacccctttgattctcggggtgattgccgcggcactcgccgatcgagatgaccgctttagtggccgtttgaaatccatcattctcactttgatctgctttgcgattgccgctttctcgattgagattctgtttcaaaccccgtggctgtttgcgcttggtctattcacctcaagttttggttttatcatgctcggcgctatgggggcacgctacgccagcatcgcgtttgcttctctactggttgccgtgtacaccatgctcggtgcccatcaaagcacgaatatctggtttcagccgttacttttactcagcggcagcgcttggtactacttgatgtcgatgctgtggcatgccttttggccaatgcagcccgtacaacaaaacctcgctaacgtgtttctgcaactggccaattatttagaggcgaaatccacccttttccacccggtttccaacatgatcccgcagccacaccggatcattgaggccaatcttaacgccgcgacagtcaatgcgttaaaccagtgcaaggcggtgtttctgacccgctccaaacgggggcatgtggacagcgccagcgatcgctttttaaacatctattttctggcgcaagacattcacgaacgagtgagctccagccattaccgttaccaagagctagccgatcactttggccgctcagacattctgttccgctttaaatatttattggagacgcaagcgaaagcgtgccgcgatatcgctcaatcgattcgtcttgggcacagttaccagcacgactctgcttcgattgtcgcgctggatgaactgcagttatcactcagctatcttcgccaacaagagagacgagattggaaaagtcttttgggtcaattaggctatttattcaataacttagcgaccgtagaaaaacagctcaataacgtcagtaacccggatgtggccaaacccgaagaaggggtactggatgacactgaagcgcacaccttaggcagcatgtggcaacgtattcgcgccaatctcaataaagattcgctgttatttcgccatgcgctgcgcttgtccatcacgctcaccttgggctatgcgatcatccaagggttcggcattgagcgcggttactggattttgctcaccaccctgtttgtttgccagccaaactacgccgcaaccaagcaaaaactcaccgcgcgaatcataggcaccttggccggcttgctgattggcgtgccgctactcaccttcttcccatcacaagagagccaattggtgtttattgtcttctccggtgtgatgttttttgcgtttcgcctcaacaactacggctacgcgaccggttttatcaccttattggtgctgttttgtttcaatcagttaggtgaaggctatgcggtggtattaccaagattggcagataccctcattggctgcgccttggcggtagcggccgtggtgctcattctgccagactggcaatcgaaacggctgcataaagtgatggcggaagcgattgatgccaataagcagtacttggcgcagatcattggtcaatatcggattggtaaaaaagacagcttgagttaccggattgcgcggcgtcatgcccacaaccaagatgccgcgctttctgccgcggtcaccaatatgctggcggagccggggcgttatcgtgcggcggccgatgagagctttcgtttcctgacccttaaccacgcgctgctcagttatatctcggcgcttggagcacatcgaacccggctggatgatgaaaccgtgcatcagttggtgctcgattcacatcgcgtgatccatcaacatctcgatttgctgcatcaacagttgtccaaccactgtgaagagtgtgataccagcggtattgatagctcaggactagagaaacgtcttgctgagtggcgtgaagatgatgaaggctcggcgcgcatggtactgcaacagctgcacttgatttatcgcatgctgcctgagctgcacacgctcgccagcaagtttgcggtcaaggtagattctcaatccgactga

SEQ ID NO: 41458 - DNA, 1101 bp, Vibrio cholerae
atgagtgaagtgattctgcaactgcaaaagcggttgggcgaaacccaacttgacgtggatttgcgtttacccgccgtggggatttgcgcgatctttgggcgctctggtgcgggtaaaacgtccctgattaaccttatcagtgggttaaccacgcccgatgtgggcgaaattcacctcgcagggcgcacgctctttagttcatcacaaggcattcaattgccgattgagcagcgcaaaattggctatgtgtttcaagatgcgcgactgtttccgcactatacggtgcgcggcaatctgaattacggggtgactgacgctgatcctgaatactttgccagtgtgacccgcctattggcgttagagccgctccttgtgcgttatcctcgcgatctttccggcggcgaaaagcagcgcgtagcgattgggcgagcgctactgtcaaaacccgatttactgctgatggatgagccgttggcctcgctcgatatgccgcgcaaaaaagaggtgatgccgtttttggaaaacctcgcgcagcattttcggctgccgatcctctatgtctcgcacagcatgcaggaaattttgcgccttgcggatcatctggtggtgttggagcagggcaaggtactgagcgcagggccgattgagcaagtttggtcatccaaagcgatgcggccttggcaatcattcagtgaacaaagcacactgttttctgccaccgtagccaaacatcaccaaacctatggtttgacgcaagttcgcttagcggaggatgtgtggctttgggtgcagcaagtggaggcggacgtgggcagcagcgtgcgtatgcaggtgcgcgcgaatgatgtgtcgattgcgctggataaaccgaccgcaagctcgattcgcaatattttaccggctcgtattgtcgcgattgagcaccaacagccgagtaaaaaaagtgtctcgctcaagttggagctcgcgccacactgctacttgtgggcggtggtgacggagtgggctcacgccgaactcgcgctagaggtcggtatgccggtctttgcccaaattaaaggggtgagtgtggcgcagcgtgatgtgattttaacgaactaa

SEQ ID NO: 41459 - DNA, 765 bp, Vibrio cholerae
atgcccatgttgacacgaattctgctcctgctgtgtgtggcgcttaacgcgccgctggcgagcgcgaaagagacactgcacatttacgcggcctcgtcgatgaccaatgccgtcaatgcgttagtggccgactactcacagcagcatgatgtgaagctggtgacggtgtacggcggctcttcttcgctggcgcgtcaaattgaagcgggcgcacctgcggatctgtttatttccgccaatgaagagtgggcgaattacttagtcgagaaaggcttagtgaaaccgaacaaggtggtgacgttggcggcgaatagtttggtgctgattcgcccgactgcacagccggtggcaagttttgagctgcaagatgccgcggcttggcaaacggccttggccgattctcgcttggcggttgcgcaagtggatgcggtgccggcgggcatgtatgccaagcaagcgctacaacatgcgggggtgtggcctgagctggaatcacgccttgcgcaaaccaataacgtgcgtttggcgctagcgttggtcgagcgtggtgaatcgccgcttggcatcgtgtacaaaaccgatgcgctgctcagtgataaagtgacgatcgtgacggcattttcagctcagtctcaccagccgatccgctatccgctggcgcaattgaatgataaagcggcgagcgccgaatgggtggcgtatttacgctcagacgccgcgcagcaaatcttgcaacgttttggttttgagtcggtgagtgagtaa

SEQ ID NO: 41460 - DNA, 1455 bp, Vibrio cholerae
atgaaaaaatggttaatggtgcaaggcaccacctcagatgcgggaaaaagcgtgttggttgccggcttgtgccgagtattggcgcgccgcggcattcaagtttgccctttcaagccgcagaacatggcgctcaacagcgcggtaacgcctgacgggggcgagataggccgcgcgcaagcggtacaagcgcaagcttgtggtattgcgccgagcgtacacatgaatccggtgctgttgaaacccaattcagatacgggcgcgcaagtgattttgcaaggccgcgccttatccaacatggaagccaacgcttaccacgactacaaaaaagtcgcgatggatacagtgatggattccttccagcgcctgcaacaagagtatgaagccatcatgattgagggggcgggcagccctgcggaaatcaacttacgtgagaatgacatcgccaatatgggctttgccgaaaaagccgatgtaccggtgatcatcgtggcggatattgatcgcggcggcgtgtttgcccatttatacggcaccttggcgctgctttctgagtctgagcaagcgcgggtaaaaggctttgtgattaaccgctttcgcggcgacattggcttgctgcaatcggggcttgattggctggagcagaaaaccggtaaacctgtgattggtgtgttgccttatctgcatggctttgatctggaagcagaagatgcgattgccgcgcagcaaaacctgtcggcggatcgccaattgcgtgtggcggttcccgtgtttacgcgcatcagcaatcacaccgattttgatccgctgcggctcaatcccaatatcgattttcgttatgtcgggcagggcgagtcactgtcgggcgcagatttaatcatcctccccggaagcaaatccacccgtgctgatctggcttatttacgctcacaaggttgggataaagagatcctccgtcacttgcgcttaggcggcaaagtgatgggcatttgtggcggttttcaaatgcttggagaatgggtacatgatccgcttggcattgaaggtgaggctggcagcagcgaaggtctggggctgtttgcgatgcaaaccgaactgaccgccgaaaagcgcctcactaacgtgaaaggtcatttgaccttagatggccaaaccgtggccgcgcaaggttatgagattcatgcggggcactcaagttgggcagccgatcaaaaaagcccgattatactcagtgatggcagcttggatgggttagtcagtgactgtaatcaaggctttggcacctatttacatggtatttttgaccgccctgaaacggcattgcgcatttgccaatgggctggcgcaaaagagattgaagcgtatgatcaccgagcggcgcaagagcgggcgattgaccgtattgcggatgcgattgagcagcacctcgatctcacgcttttgtggcctgacttataa

SEQ ID NO: 41461 - DNA, 1518 bp, Vibrio cholerae
atgactgagcaaaaatacgtcgtcgctctcgatcaaggtactaccagctctcgcgccgtggtgttagaccatgatgcgaatatcgtgagcgtttctcagcgtgagtttacccaaatctacccacaagccgggtgggtggaacacgatccaatggaaatctacgctacgcaaagctcaacattggttgaagcgctaggtaaagcgggcattcgcagtgatgaagttgcggccatcggtattaccaaccaacgtgaaaccacggtggtgtggaataaagagacgggtaagcctgtctacaatgcgattgtttggcaatgtcgccgtactgctgccatttgtgaagagctgaaagagcgcggtttagaaagttacattcgtgacaataccggtttggtgctcgacccttacttctcaggtaccaaaattaaatggattctggacaatgtagaaggcgcacgcgagcaagctgaagcaggacaactgctgtttggtacggttgatacatggctagtgtggaaaatgacacaaggccgtgtgcatgtgaccgattacaccaacgcatcccgtactatgctgttcaacatcaacaccttgcagtgggatgaaaagatcctcgccgaatttaatatcccgctctccatgatgccggaagtgaaaaaatcgtctgaagtgtacggtcaaaccaacatcggtggtaaaggcggtacgcgtattccaatcgcggggattgccggtgaccaacaagcggcgctgtacggccaaatgtgtgtgcaagcgggacaagcgaaaaacacctacggtacgggttgcttcttgctgatgaacacgggacaggaaaaagtgacctcgcacaacggcttgctgaccacgctagcgtgtggcccacgcggtgaaccagcttatgcactggaaggggcggtgtttatgggcggtgcatccattcaatggctgcgtgatgagctgaaactgatttccgatgctcgcgactcagagtacttcgccaccaaagtggatacctccaatggggtgtatgtggtgccagcctttacgggtttaggcgctccgtactgggatgcgtatgcgcgtggcacaattgtcggcttaacccgtggtgtgaactcaaaccacattattcgcgcaacgctggaaagtatcgcttaccaaacgcgtgatgtgttggatgcgatgcaagccgattctggcatcaagctttctgcgctgcgtgtcgatggtggtgcggtcgccaacaacttcctgatgcagttccaagcagatgtattggataccgaagtgcatcgtccgaaagtcacggaagtcaccgcgttaggcgccgcttacctcgccggtctggccgttggtttctgggatggtttggaagagctgcaaggcaaagcggaaatcgatcgcagctttaaaccgcatcatgatgaagagaagcgtcaacgccgttataaaggttggaagcgtgcggtgaaatgtgcccaagcgtgggcagtactgcacaacgaagaagagtaa

SEQ ID NO: 41462 - DNA, 1242 bp, Vibrio cholerae
atgaaccatgcctttattcactctgcaccgcaaaataccacctttgatcaatgcatcaaatgcacggtgtgcactgtgtattgccccgttgccaaagccaaccccaactatccgggtcctaaacagtgtggcccagatggtgagcgtttacggatcaaaagtgccgaatattatgatgacgcgctcaagctgtgtaccaactgcaaacgctgtgaaaccgcctgcccttcaggcgtcaaaattggcgatatgatcgccgtggcgcgtggcaaatacggcaaaaagccactcaaccctaaattggtgcgtgattttgtactcagccacaccgacttatttggctcgatcgccacgccgtttgcaccactcgtcaacgccgcaacctcgttgccattggtgaaaaagctgatgcacaaaaccattggcgtgcatgaccataaaaccttacccaaatattcgcacggcacgttccgccgttggtttaaacaaaactgcaccagccagccgctctaccaaaggcaagtggcttatttccacggctgctacgtgaactacaaccacccgcaactcggtaaagactttgtgcgagtgatgaacgcgatgaacataggcgtgcgtttgcttgatagcgaaaaatgttgcggtgtgcccctgatcgccaacggttttcacaacaaagcgcgtaaaaacgcgctgcacaacgtcaaacaccttacggctatggtcaatgattaccatgcgccggtgctttccacctcttccacctgctcgtttaccttgcagcaagaatacccgcatgtactaggggtagataacagccaagtggtggatcaaatccattacgtcacgcgttttctgctcaaagagtttatgagcggtaacgcgccgaagatgaaacccgtgcacaaaaaagtggtttaccacacgccttgccatttagagcgcagtggtaatgtgatgtttacgattgagctgctgaaaatggtccccggcttagagctggtggtgctcgacagtgagtgttgtggcctagccggaacctatggttttaaagaagagaactacgaggtatcgaagaaaattggttcgcatctgtttgatgcgattcaaacctctgatgccgattatgcggtgacggattgtgaaacctgtaagtggcaaatcgaagaaaacgcgcatttggaaaccattcatccggtgagtttactggcgatggcgctaatcgatgagcctagtgcttga

SEQ ID NO: 41463 - DNA, 690 bp, Vibrio cholerae
atggtgttaacgggctactctttatcactggtacaagcaagctggatgacgctacaaattgcgttggccagcttgctggtcggtttactgttggcactggtgtttgctggcggtgaaatggcaaaactgaaattgatcaaatggccaaccaccttgttggtcaccgtgatccgcggtttgcctgagcttttggtggtgctgtttatctactttggctcgacccaagtgctgtttttcatcactggtgaatttattgagatcagcccgtttatctctggtgtgattgcgctctcgctgatttttgcttcgtacgcttcgcagacgttgcgcggtgcactcaaagccgtgggcagaggacagcgtgaagcggccagcgcgttagggattccgcctagccatgcatttattcgtattgtgctgccgcaagcggtacgccacgcacttcccggtttaatgaaccaatggctagtattacttaaagatacggcgttagtttctttgattggggtgacggatctactgaaacaagcgcagctcacttccgcggccacccatgaagcctttacgtggtatgcaacagcggcggtggtgtatctggtgatcacattgatcacacaacgcgtcgtaaaagtcatagataacaagttttcgatacaaggcatgagccatagccaaggagccagtgcatga

SEQ ID NO: 41464 - DNA, 741 bp, Vibrio cholerae
gtgagcaaacggacaatccaactcaattgcgatatgggcgaaagcttcggcgtctggaccatgggggccgatgaagaagtgatgccttggattgatatggccaatatcgcttgtggctttcacgcgtccgatcctcatgttatgagccgtacgatagatttagcgcttgagcatgaagtgatgataggtgcccatcctagctacccagatttgcaaggatttggtcgccgctcgttggcgatgaatgagcaagaagtgagtgaaatcattctttaccaagtcggcgcactgaaggcgctgtgtgaaagtaaaaatggccaattgagctatgtgaaacctcatggcgcgctgtataacgacatgatgagcgacccgagcatctttcgtgcggtggtcgatgccgtttcctgttttaacctgcctttgatggtgctcgcttctgccaacaatcaagactatctcgatattgcggaccgttttgatgtaccactgctgtttgaagcttttgccgaccgtacctatctcgccaatggcaagctgacaccgcgctcacaacccaatgcggtactcagtagcgaagaagccattctcaaccaagtgcgacaaatcgcccgttacggcaaagtcaccagttctgatgggttcgtcatcccgattgaagcggatactttatgtgtgcacggcgataacccaaacgccgtgtcgctcattgccagaattcgtgctgcgttggatgagtag

SEQ ID NO: 41465 - DNA, 1167 bp, Vibrio cholerae
atgaaaattgccattgcaggaacggggtatgtaggattatcgaatggaatactgcttgctcaacacaatgaagtggtcgcattggatatcgtggtcagccgagtagagcagctcaatgataagatttcaccgatcgccgatcccgagattgaatcttttctacagcatcaaccccttaattttcgagcgacttgcgataaacgagacgcctaccaagacgcacagtttgtcgtgatcgccacgcctaccgactatgacccacaaaccaatcattttgatacacgaaccgtggaagcggtgattgatgatgtgttggcgatcaatccacaggccatcatggtgattaaatccactgtgcctgtgggttacaccaaacgcatcaaacaacggctctgctgtaacaacctgatcttttcgccagagtttttacgcgaagggcgtgccttgtatgacaacttatacccatctcggatcattgttggggaaaagtcggagcgcggccaagcgtttgcaaccttgttggctcagggggcaaagaaaatggatattccgattttgttgactcactcgaccgaagctgaagcggtcaagcttttctcgaacacttatcttgcaatgcgtgtatcgttttttaatgagttggatacgtacgcggaaacccatgggttagacaccaaacagatcatcgaaggcgttgggttagatcctcgcatcggtaatcattacaacaatccttcttttggttatggtggttactgcttgccgaaagacactcgccagttactgcgcaattttgaggatgtacctaataacctgatccgtgcgattgtcgatgccaataccacgcgcaaagaccatattgcgttttccatcttgaaccgcaacccgaaagtggttggtatttaccgcttaatcatgaagtcgggctctgacaattttcgagcttcatccatcttaggcatcatgaaacgaatcaaggcacagggggttgaagtggtgatttacgaacctgtgctcaatgaatcgaccttttacggctcacctgtgattcgcgatcttgcccagtttaaagcgatggccgaggtgatagtgaccaatcgccgggtggctgagctggaggatgtcgcggaaaaaatctacacccgtgacctgtttggtcaggattga

SEQ ID NO: 41466 - DNA, 2448 bp, Vibrio cholerae
atgaaggccttgcctcccgcatcgctcaatcgccgcttactgcgttggagcttaagtgaaattcgtcacgggcagttatggccggtgactgttgcgctaaccttaatcattgcctcgatttttgcattaaccgcgctcgcgcagcgtatggaacaagtgattgtgaaacaagggcgtgatgcgttaaccgctgatacggtatttgtttcgggcaacccacttcctgagtccttattgaccctgaccgcgcagcaagctagtcaaacttcacaaatgacccgttttgcgaccatggcctttagcgatcaaggcatgcagttagtcactgtcaaagcggtagatagtgcttatccactgcgtggcgagatgcgtttaagtgatggtcagcaaacctttaatcatgtggcgagcaaccaactttggcttgaaccgcgagtaaaagatcagttaggagtggatatcggtgacaatgtcacgattggtgatgcggattttgtggtcagcggtgaagtgttggaagagccaggactgagctttaatccattccagcaaatgccatcggtttacatccatgcttctgatgtggataaaactggcgcgattcagccggggagtcgggtgcaatttagcctatttatgactggtgatgactctgcgatcgaatcgataaaacaacaagtgagcttaacggcgagcgatcgctggcgtgatcaagaaagtggcagccgtactaatgaggtgtttgaacgcactcaacagtacttatcgctgactgtagcaattgtgatcttgatggccgcgaccaccttagtgctgacctgtcagcattacgtttccacccgcacgcatacgattgcgatgttaaaaagtctcggagcaagtcgccgctggttacgccgttggttagcgttgcaagtcggattgttactggtatttgcggtggtgttgggcagcgtcattggtgttgggctggagtcgctgctgcgtttgccactaaaagatttgttgcccgacccgctccccagttacggtttgcgtccgctgtggattgcacttgccagcagcttcttgattgcggtgccggctctggggatcccgctgggacgtctattgagcgtgagtgcggttgcggtcatgcagccagtgacggcgcaaactcgttggcagcgcaatctactgctgatcatggtaccgattgtgccgctactgctggtgtattggcaaaaccaactgatctggattgtgctgatcggtattgtggtgctgtttgcgatgttagcggtggtcagtgttctggtgactcgtctgctggctaagctaccgctcaatcctgctatggcattggctctgagccgaattaaccgctctggtgcagcaagtggtttgcagtttggcgcgttagctctctctttgatgttgctcgccatcatctggttagtgcgtaccgatttgctctcagattggcagcgcaccttgccggaaaatgcgccgaatgcgtttgcactcaacatcagtgaatccgaaaaagccagttaccttgcggcattagatacagcaagcattgagcgctctgctgcttatcccatcatgcgtgggcgtttaacgcatattaacggtcaagaggcgaaacaatacgcgcaaaatggtgaagagagttcagatgcactgcgccgtgagctgaatttaacctgggcagagcagttacccgattacaaccccattttgcaaggagagtggcaaagccaaaatggcgtatcggttgagcaggaagtggcgagcgacctcgggcttaaacttggggatacgctgacgtttatgatcaatagccaaacggtgagcgcgcaagtgaacaccattcgtcaggtcgagtggcgtgaaatgaagcccaatttttacttcatttttagtccggacgtggtgcaaaacttgccagtcagttatttgatcagtttccgcattcagcccgaacatgatgcgttgctcggtcagctctcacggcaacacccgacggtgagcttgatggacattcgcaccatgggagccaaaatccaagccttgttgacccaaattgtttggtctgtgacggtgttggcggcattgggtgtgctagcaggggtattgctgatttttactttgctgcgcttaagcctcagtcagcgtcagcaggagatccgcctgtaccgcacgctaggggcgagtcgccgccgagttatgcacaccatttgggctgagtatggagtgatggcgttagtcggagggttagtggccagcgtgagtgctgatgcagtcgtcgctgcggtcatgaaatggggatttagcctgactccgagtctgcatatggcgctgtggtttgtgctccctgcgttgactttttgcacacttgctgcggttgtgagcagtttgttgaaacgcctgttagcccccgtcaataaagccttcagcgattga

SEQ ID NO: 41467 - DNA, 678 bp, Vibrio cholerae
atgcaaacatccatcatttcagcgcaatcactatccaaattagtctccactaatcaggagcatttaacaatccttaaacaggtgaatctctcgattcaagcgggagaaagtgtggcgattgtcggcgcatcaggcgcgggaaaatcgacgctgatgacgctactggcggggttagatacgccaagtgaaggggaagtgtatctgttggggaaaccgctttcacaactggatgatgaagcccgcgccgcactgcgcagtgaatccgttgggtttgtgttccaaagttttctgcttattcctagcctgtcggcgctggaaaatgtcactctgccttgtttgttaaaaggcgaagcggaggatcgcgaacgtgcccagaagctgctcaaagcggtcggtttggagcatcgaatgcaccattcgcccgcacaattgtcaggtggtgagcagcaacgcgtagcgattgctcgcgcatttatgataagcccccaagtgctttttgctgatgaaccaacgggcaatttggatcaagaaacagctgcaaaagtgattgatttactgtttgaactgaaccgtgaacacggcactacactagtgctggtgacgcatgaccctaaactcgcgcagcgttgtcagcgacgattttttatgcaagcgggtgagctggaggagcgcgtatga

SEQ ID NO: 41468 - DNA, 648 bp, Vibrio cholerae
gtggagactaatttggatagtgattgcgctgaaatgatggatgtttgcatgactcgactactttcctttttgtttgttgttctcttttctgctgcagccagcagtaaaacgttattggtactcggcgacagtttaagcgcagggtacgaaatgcctatcgaacaagcttggccaagtttactggccgaagagctagtggaacagggtcaaaccgttaccgtagttaacggaagcatttctggtgataccacaggcaacgggctcgcccgcctgccctctcttctgagccaacatcagcccgataccgtactgatagaattaggagccaacgacggtttacgcggttttccaccgcaaacggtcactcataacctcaccaccatgattgaacagatccaagctaaaaacgcaaaagtcatcttaatgcagatccgtatcccacctaactatggcaaacggtacagcgatgcgttttaccagatctatcctagcctagctgagcagttttctatcccgcttatcccgttctttcttgagcaagtgatcctcaaaccagaatggatgatggcagatggtttacaccccaaacctgaagcgcagccttggatagccaagtttgtggccgaacaccttgccgcacatttgtaa

SEQ ID NO: 41469 - DNA, 1305 bp, Vibrio cholerae
atgaagtttcccggtcagcgcaaatctaagcactattttccaactcacgcccgcgatccactcgtcaaccagattcaacaaacaccaaagctccatcgtccgacgattgtcggcgtcggccaaaccatcgtcgatattgaagctcgcgttgatgatgaatttcttacccgctacgatctcagtaaaggccattcactggtactggaagagagtaaagcggatgctctctatcatgaattggtcgagcgtggattgatcactcaccagtatccgggagatacgattggcaacacattgcacaactattcggttttagcggacagcaaatcggtattgctaggtgtgatgtcgaaaaatatcgaggtgggttcatacgcttatcgctacctttgtcgtacttcagcgcgaatgaatctaaaccacttgcaaacagtggatggccctatcggtcgctgctacaccctgatttctgaagatggtgaacgtacgtttgcgatcaatgaagggcacatgaacaagctgcgccctgacagcattccagaagaagtgtttgataaagcttcggccttggttgtgtcatcgtatttgatgcgtggtaagccagaagaccctatgccacaagcggtgcaacgtgccattgaaatcgcaaaagcacgcagcattcctgtggttctcaccttaggcacaaaatatgtgatcgaagggaatgccgagtggtggcaaaactacatgaaagagcatgttaccgttgtcgccatgaatgaagaagaaggcgcagcgctgacgggcgaacgcgatcctctacttgctgcagataaagcgctgcaatgggttgatttagtgctgtgtacggcaggccctgtgggtttgtatatggcaggctatattgacgaatcagccaagcgcgaaacagagctaccactactaccgggtaatattcctgagtttaataagtacgaattcagccgtgcaatgcgtaaagaagattgccgcataccgctgaaagtttactctcacattggtccatacttaggcggcccgctggagattaagaacactaatggtgctggcgatggcgcactttctgcgttactgcacgacatggcggcaaacgcgtatcaccaacgtaatgtgccgaattcagccaaacatgatcagccatacctgacctattcctcgctctctcaagtgtgtaagtacgccaaccgcgtcagctatgaagtgttgactcaacattcgccacgtctgtcacgggctttacctgagcgtgaagatagcttggaagaagcgtactgggatcgttaa

SEQ ID NO: 41470 - DNA, 1974 bp, Vibrio cholerae
gtgacgactttgaataaactcaaattattctttggacctctttatcctatcgtttgcgctgtattcgccttattagtcatttttgcgctatcacgtttaggtcttgctatgtggcattttgatcgcgtaacgaatgctgacggctggatacgcattttcactagtggcttaagggtggactttgcgtcaatctgctatttgtttattttacctgcacttttgactagcttaatttctggtgagcattggttaggccgcatttggaattggattctgcgactctggatcaccgcaggcttgtggatcgttgtgtacatggaagtggctactcctccctttattattgagtacgatctgcgccctaatcgcttatttgtggaataccttatctatccgaaagaagtcttcggtatgctgtggtcgggttacaaactggagctatttatcggcctagtcgtgagtgtattaacggttgtactcggctggcgatggagtaaaacactcgtttccaacttgcattaccccaagtggtattggcgtccagtgattgctgtgcttgtggtcactgttggggtattaggagctcgttcttctttagggcatcgcccaatgaaccctgcaatggtctctttctctagcgatcctttgatgaacgatcttgcgctcaactccgcgtattcagtgattttcgcagccaagcaaatgggctcagaggccaacgcatttgaattttatcctaaaatggataaacaactcgtgatcgatcaagttcgtgcttcgatgactgtagccccggaagattttattagtgatgacaaaccgtctttggccaatcatgttgcgacttaccaaggtgcacctaaaaacatcgtcattttgttgatggaaagccacggggcgcgttatgtaaaaagccttgggggaatcgatgtttctccaaacatggacaaactgattaacgaaggctgggcattcactcgcatgtacgctacgggtactcgctctgtacgtggtattgaagcagtaaccacaggattctctccaacgcctgctcgctctgtggtgaagttaggtaaaagccagaataacttcttctcaattgcaggcttgctgaagactcagcagtaccacacgcaatttatttatggtggcgagagccattttgacaatatgaagagcttcttcctcggcaacggttttgtggatatgcaagatctacctaccttctcaaatccgaagtttgtcggttcgtggggagcgtcggatgaagatctgttcaataaagcagatgagcagttcacgcaaatggcaaaagaaggtaaacctttctttagtttggtgtttacctcgtctaaccatagcccgtttgaatacccagatggtgtgattactcaatacaatgaaccgaaacagacggtagaaaatgcagtgaaatacgctgactacgcgttggggcaatttgttgaaaaggcgaaaaaatctccttattgggataacaccgtgtttgttgttgtcgcagaccatgacgcgcgtacacaaggtaccaatccaatccctgtggaatactttcatattccagcggttatttttggtggtggcattgaagcgcgtaaagatgaccgcttactcagccagttggatttagctccgacgctactctccttagccggtattagtagtcaaaacccaatgattggctttgatttaacccaagacgttccggttgaaaagcaacgcgctatgatgcaacgtgacaaaaactttggttggttaacaccggataatcaagtggttgtattgcagccaggacaagatatcacgacctatcaatatgactcagtgacacataagatgacaccacttcagcttgacgaatcgatcgtgactcgcgcgcatgctaatgcgatgtgggggagtctggcattcaaagagaatttctacaccgcacaaaaaagttatgaattggaaaaataa

SEQ ID NO: 41471 - DNA, 1992 bp, Vibrio cholerae
ttggttggaaatggtaaagcacgtgggaccttggttatttcttcatttagtgggatccccatgcaagatactgcaattcaattcagtgatttagcactgaacagcgccatcctttctgccctaaccgaaatgggcttcgtatcaccaactcctatccaagcagcagcgattcctgttctgcttgaaggccgtgatgcactgggtaaagcgcaaacaggtacaggtaaaacagcggcattctctttgcctctgctcaacaaacttaatctatctcagtacaagccacaagctatcgttatggcgccaacacgtgagctggcgattcaggtagcagccgagatcaaaaacctaggccaaaatatcaaaggcctcaaggttcttgagatctacggtggtgcttcaattcttgatcaaatgcgcgctctgaaatctggcgctcacattgttgtgggtactccaggccgcgtaaaagatctgatcacgcgtgatcgtctacacctagacgaatgtcatactttcatcttggatgaagcagacgaaatgctcaaaatgggcttcgttgatgacgtgacttggatcatggagcaagctccagaatcagcacaacgcgtactgttctctgccactatgccgccaatggttaaagaaatcgttgagcgttttctacgtaatccagagtgtgttgacgtagccggttctaaccaaacggtcgcgaaagttgagcaacaatactgggtagtaaaaggtgtagagaaagatgaagcgatggctcgtctgcttgaaaccgaagaaaccgatgcttctatcgtattcgtacgtactcgtcaggatactgagcgtctagcggattggctgtgcgcgcgtggcttcaaagcagcggctctgcacggtgatatccctcagtctctgcgtgagcgtactgttgatcatatcaaacaaggtgtgattgatattctggttgcgaccgacgttgttgcacgtggtctggacgttcctcgtatcactcacgtatacaactacgatattccatttgatgtggaatcttacatccaccgtatcggccgtactggtcgtgctggacgtaaaggtaaggcgatcctgctggttcgtactaaccaaatccgcatgctacgcactatcgagcgtgtcactcgttcttcaatggaagagatccaactaccgcaccgcgataaagtggctgaatctcgtctgactaagctgggtcaagaactggcagcagataaagagttcagctcgctggaacgtttcgctgatttggttgaaaaactgcaagcgtcactggaaatcgatgcaacgactctggctgcaatcctgctgaaacgtcagcaaggcaagcgtccactgttttatgtcggcgctgatccaatgatcgaagcgatggagcgtgaaaaatcacgtcgtcgtgagcgtcgtgatgaccgccgcgatggtgatcgtcctgctcgtcgtgaattcggtggccgcgatcaagaaaaccacgattgggatacttaccaactgcaagttggccgtgaccaaggcgttcaagtgaaagacatcgttggtgctctcgcaaacgaactgggtctgactaaaggttctatcggtgcgatcaaactggctcaaggccatacgtttgttcagctaccaaaagccatgtcaaatgacgtttctagcaagctacgtaagctgcgtattcgccagaaagaagtgggtgctgtagtgtgtgacttcgatgacttccgcgaatctcgtggtggtgctcgtcgtgaaggtggtccacgtcgcgaaggtggtcgtcgtccagaaggcaaccgtgaaggcggtttccgtggtggtcgtgaaggcggccgcgaaggtggtcgtggccgtggtggcgaaggccgtcctttccgtgaaggtgagcgtcgttttgagcgcaaccgtagtggtgagagcagtggtagctaccgtggtgagcgtggccatagccgtcgtcgcgaagaagcataa

SEQ ID NO: 41472 - DNA, 2037 bp, Vibrio cholerae
atgttccaagacaatccgctcctcgcgcagcttaagcaaaaaatccaagaaactctgcctaaaaaagaaggcaccatcaaagccagtgacaaaggttttggcttcctcgaagtcgatagcaaaaccagctactttgttccgcctccttatatgaagaagtgtatgcatggcgacaaagtcgtggctttcatccgcaccgaaaatgaacgcgaagtggctgagccttctgaactcatcgagcaatcgctgactcgcttcattggtcgcgtaaagctatttaaaggcaaactcaacgtcgcgcccgatcatccacaactgaaaaagctgtcgctgaaggcaaaaaccaagaaaggcctcaacgaagctgacttccaagagggtgactgggtggtcgctcatcttgtgcgccacccgctgaaaggtgacgatggtttctttgtgcagatttcacacaaaatcaccgatgctaatgacaaaattgccccttggtgggtgacattagcggaaaacgatctgcccaacagcgagccagcgggcattgacgattggcaactgaaagatgatgcagacttggttcgtgaagatctgaccgcgctgccttttgtgactatcgatggtgaatcgaccaaagatatggacgacgcgctttacgcacagcaactgccaaacggtgattttgcgctgactatcgcgattgccgatccaaccgcttacatcaccccagaagatgagatggacaaagttgctcgcgagcgtggctttaccatttatttgccgggtcgcaacattcccatgttgccacgcgatctggctgatgagctttgctctctgatggaaaaccaagttcgtccagcgctatgctgctcagtcactatccgtaaagatggcgtgattggcgatgatattcgtttcttcgcagccaacatcaaatctcatgcacgcctagtttacgaccatgtttctgactggttggagactggcagctcggaacaatggcaaccaagcgaagaaatcgcccaagtagtgcgcgacctctacgctttctcacaagcacgtgcgaactggcgtgagacccatgccgtagtgttcccagatcgtccagactaccgcttcgaactgagtgccgataacgatgtggtggcgatccatgcggacatgcgccgtacggcaaaccgcttggttgaagaatcgatgatcactgcgaacatctgtgcgggtaaaacgctgcaaactacatttggttttggtgtattcaatacccacgcgggttttaaagctgaaaaaatggccgatgtagtagagctcatggcggtcaacggcgcacccaatgcggatgcagaaacgctggcaaccgtggaaggctttgccgctctgcgccgctggctagccacgcaagaaaccagctacctcgataatcgtattcgtaaataccaaagctacagtgagattggtaaccagcctctcccccacttcgcgatgggccttgatgtgtacgcaacatggacttcgccgattcgtaaatacggcgacatgattaaccaccgtctgctgaaagcgcacattctcggcaaagccccggtgcaaacgccggatgagacagttggtgaagaactggctctgcaccgtaaacaccacaaaattgctgaacgtaatgtggcagattggctctatgcgcgcacgctggctgatgagcctgcgaaagaaacccgcttccaagctgagatctttgatatcaaccgtccgggcatgcgtgttcgcttactcgaaaatggcgcaatggcctttattccgggagctctgatcctcgataacaaagagcgtatcgagtgtaatggtgaagacggcacggtactgatcgataaagaagtggtgtacaaacttggtgatgtgctggaaatcgtcctgacagaagtcaatcaagaaaaccgcagcttagtgggtaaaccaacgcaagtgtttgctgatctggtttcagagacgcaaaccagtgcggagcaacctgctgagggcgcagaaaataacgagccacaagtttaa

SEQ ID NO: 41473 - DNA, 1506 bp, Vibrio cholerae
atgaacaaactattcgtcatggctttgatgtcggcagcgttgagcgccaatgctgaagacaaagtctggatctcgatgggcgcagatgccgtcggaagtttaaatcctgcgctgagcgaatccttattacctcattcattcgccagtggctctcaggtatggataggcgaagtcgctatcgacgagcttgccgagctttcacatacgatgcatgagcaacataatcgctgcggtggctacatggtacacacctcagcacaaggtgcgatggctgcgctgatgatgccggaaagcatcgccaatttcacgatccccgcaccttcacagcaagatctggtcaatgcttggctgccacaagtgagtgcagaccaaatcaccaatacgatccgtgcgttatccagttttaataaccgcttttataccaccgcctcgggggcacaagcctctgattggctggccaatgagtggcgctctctcatctcgtcattaccggggagccggattgagcagatcaagcactctggttataaccaaaaatcggtcgttttgacgattcaaggcagcgaaaaaccggatgaatgggtcattgtcggcggtcacttagattcaactttaggctcacacaccaatgaacaatcgattgctcccggtgcggatgatgatgcctccggtattgccagtttgagtgagatcattcgtgtcttacgtgataacaatttcaggccaaaacgctccgttgcattgatggcctatgcggcggaagaggtcggtttgcgaggctcacaggaccttgctaatcaatacaaagcacaaggcaaaaaagtcgtatcggtcctgcaacttgatatgaccaactatcgaggttcagcggaggatatagtctttattaccgattataccgacagcaatttaacccagttcctcacaacgctgattgatgaatacctccctgagctaacttatggctacgatcgctgcggctatgcatgctcagaccatgcctcttggcataaagccggcttctcagcggccatgccttttgaatctaaattcaaagactacaaccccaagatccacacttcgcaagatactctagcgaattctgatcccacgggtaaccatgcggttaaattcaccaaactcgggctcgcttatgtcattgagatggccaatgcaggctcatctcaagttcccgatgattctgtcttgcaagatggtacggcgaaaatcaatctcagcggtgcacgaggcactcagaagcgctttacttttgagctctcccaaagcaaaccgctcaccattcaaacttatggtggttcaggcgatgttgatctgtacgtaaaatatggctccgctccctcaaaatcgaactgggactgtcgcccttaccaaaatggtaaccgagaaacgtgctcattcaacaacgcacaacccggtatttaccatgtgatgctggacggttacaccaactacaatgatgtggcgttaaaagcctcaactcagtag

SEQ ID NO: 41474 - DNA, 930 bp, Vibrio cholerae
atgaatgatttgtttactaaaactgattattcactctactcaaacgcgatgacgtttgtccgtcgtccctatgtgcgtaacccagtagatactaatgctgatgtcgtggtacttggcgtgcctttggatatggcgacgtccggtcgtccgggggctcgtatggggcctgacgcgattcgtcgtgcttcggttaacctcgcttgggaaggtaagaaattcccttgggatttcaacctgtttaaaaagatcaacgtgattgatgcgggcgatttggtttttgattgcggtgatgctgaagatttcacttaccgcctagaagccgcgaccagcgaaatcctgaaaagtggcaaaaccatgctggcactgggtggcgatcacttcatcactctgccaatcctgcgtgcttacgctaagcacttcggtgaaatggcgctgatccactttgatgcacacacggacacttacgcgaacggcagtgcgtatgaccacggcaccatgttctaccatgcgccaaaagaaggtctgatctcggctaagcattcggtgcaagtgggtattcgtacggaatacaaacaagaaggccacggcttcaacgtgattaacgcgatgcaagccaacgacatgtctgtcgaagagattgtggcgcaaattcgccacatcgtgggtgacaagccggtttacctgactttcgacattgactgtctggatcctgctttcgcaccgggtacgggtacgccagtttgtggcggtttgagctcagacaagatcctgaaaatcatccgcgcgctgaaaggcatcaacctgatcggtatggatgtggtagaagtgtcacctccttacgatcaaagcgacctgacttcactggcgggtgcgacgatcgctctggaactgctctacgtttgggcatccaacaagaaagatgaagagtaa

SEQ ID NO: 41475 - DNA, 1593 bp, Vibrio cholerae
atggcagcaaaacacgttctgttttcaaccgacgccagacagaaaatgcttagtggcgtaaatttactggccaacgccgtcaaagttacgctcgggcccaaaggtcgccatgttgtgctcaataaatcttatggtgcgccaaccatcactaaagatggcgtctctgtcgccaaagagattgagctcgccgataaattcgaaaacatgggcgcacaaatgctcaaacaagtggcgtccaaagccaacgacgaagcgggcgatggcactaccacagcaaccgtgttggcccaagcgctgatcaatgaagggatgaaggcggtcgccgctggcatgaaccccatggatcttaagcgcggtatcgacaaagcagtctccgcagcggtcgagaaattgcaccaactggccaaaccttgcagtgacacccaatcgatcactcaagtcggtgccatttccgctaatagcgatcacgcgatcggtgaaatcatcgcgcaagcgatggagaaagttggccgcaatggtgtgatcacggttgaagagggacaagctctacaaaacgagctttcggtggttgaaggtatgcaatttgatcgcggttacctttccccttacttcatcaaccaacccaaagcgggctgtgttgagttggagaatccctacgtcttgctagtagacaagaaaatcagccacattcgtgaactgctaccgattttagaatccgtggctaaagcttcccgttcgctgctgatcattgctgaagatgtggatggcgatgcgcttgcgacattagtggttaacagcatgcgtggcatcattaaagtggcagcggtgaaagcgccaggctttggtgaacagcgcaaagcaatgctcgaggacatcgcggccctcactgctggccgagtgattagcgaggaaataggtcttgagcttgaaaaagtgacgctggacgatctgggtagcgcgaaaaaagtcaccatcaataaagacaataccacgattgtcgatggcgctgccgagccaagtgccctccaagatcgcatcgcgcagatccaacatcaattggaacacaccacatcgcaatacgatcgggacaaattgcagcaacgcattgccaaactctctggtggggttgctgtgatcaagattggtgcggcaacagaagtggagatgaaagagaaaaaagatcgcgtggatgatgcattgcacgccactcgcgccgcagtggaagaagggattgtggccggcggtggtgtcgctctgctgaaaattgccaacgagctcagcaatttacaaggtgataatgacgatcaaaatgtcggcattcgcattgcgctaagagcgatggaagaaccactgcgtcaaatcgccatcaacgcaggggatgaagcttcagtgatcgcaaatcaagtcaaaacgggcgatgagcattacggctacaacgctgccaccggccaatttggcaatatgttagagatgggcattttggatcctgcgaaggtgacacgctcagcgctacagtttgccgcaagcattgctggcttgatgatcaccaccgaagccatggtcagcgaagtagacaaagagtctgcggcgtaa

SEQ ID NO: 41476 - DNA, 987 bp, Vibrio cholerae
gtgataggtagggaaggggttaccactttgaggtttactgtgaaacagcaattcatcactcataaacacaccttgtatggtgtcgcggccattttgctttggggaagcctgatggcattaacgcgtcgtgttgctgaggagttttcaccgattggcggcgcggcgctcatctacacagtgagtacgctgtttttgctgtttgcgatggggatgcctcgactcaaagcgggatcgagccgctatattctgattggcggtgcgctgtttgtcagttacgaaatttgccttgccttagcactcggtatggcgagcgatcgcttacaagcgatagagatgtcggtgattaactacctttggccagccttaaccgtattgatcgcggtgttgctcagtcagcgtgcggttagcttttgggtttacccgagcgttggtttggctttcgctggtgtcgcgtggactattgtcgccgaacaaggcatttcgctcgccgatttttccgctcgcatcgctaccaatccagcggtttatgctatggcattaacgggcgcttttatctgggcgatttactgcaatgtaacccaacgtttagcacgagggcagaatgccatcgtactgttttttgccgcgaccgctgccacactctggctccaatacgctttgagtaatgagccggcactctcttttactgggtcgagcatggggacgctgttattaacgggcattgtgatgggaagtggttatgcactgtggaatgtggccattttgcgggggaacatgttgctgctggcaacgctttcttactttacgccggttatctcaaccttattttcatcgctgattttaggggtggtcctcgggttaagtttctggcagggagtgatcatggtgacattcggttcgctgatctgctggtgggtgactcgcgagtcgagttcatcaacaggggaggtgcctgaaacgcctccgccgcttaaagaacaaagttaa

SEQ ID NO: 41477 - DNA, 579 bp, Vibrio cholerae
atgaagatgagcgaattagaaaaaatgctcaaaggtgaacactttgacggcgcatccgcggaaattgaggcactgcgcagccaagcgggaaggctcaagctcgagatcaaccaaagtcttgatgaagcggagcgctatgcactgcaacgtgagctgtttggtcatctcggtcataaaagttgcgtacagcctccttttcactgtgagtttggcaaaaccattcgtattggcgatcacaccttcatcaacatgaacgtggtgatgttggatggtgcacccatcacgattggggatcacgtattaatcggcccgagtactcaattttacaccgcatcgcactctttagattatcgtcgtcgccaagcgtgggaaaccatctgcaaaccgattgtgattgaagatgatgtctggattggtggaaatgtcgtcattaatcaaggggtcacgattggtgctcgttctgtcgtagcggcgaattccgtggtcaatcaggatgttccaccggatacgttagtcggtggcactcctgcgcgtattttgcgctcactaaaagatcctgccgaatcaatggcagaatga

SEQ ID NO: 41478 - DNA, 1314 bp, Vibrio cholerae
atgagttttttcgaaaacatctcgatcatcatggcgctgattgctgccagttgtttcttttctatgtcagaaatttctttggctgcggcgcgcaaaattcgtttgcggcagatggccgatgaaggcgatgaacgtgccgagcgggtgttagagctgcaagctcggccaggcaattttttcactgtggtgcaaattggcctcaatgcggttgccattatgggcggtattgtgggggaatcggcgtttactccttacatcagagcgctgctggaaggattgattccagccaatctcctatcacaagccagttttgtgctctcctttatgctcgtaaccagtatgtttattttgattgcggatttgatgcctaagcggattgctatggcgatgccagagcgaattgccaccagtttggtgggaggcatgctgatttgcattactttgttaaaaccgtttgtttggttcttcaatggactggcgaacttgctgtttcgcgccctcagtgtaccgaccgagcgtaatgatgagatcacctctgacgacatttatgccgtgatggatgctggcgcagaagcgggcgtgctggataaaggtgagcaacagatgatggagagcgtgtttgaaatgcagagcattccagtgacatcggccatgacggcgcgcgaaagtttggtgtttcttaacctcagcgacagtgaggaagtgatcaagcagaaaatttctcagcatccgcacaacaaattcttggtctgtgatgggcagttggatcagattaaaggttacgttgactcgaaggccttgttaattcgagtaattaatggccaaggaatgaatctcaaagagagcaatgtggtcattggttgtccgattattcccgatacgttaagcctttcggaagcgttggagtacttcaaaattaaccgcgttgattttgcggtggtgatgaacgaatacgcgcttgtcgtaggcgttgtgacgttcaacgacttacaaagcgcagtcatgggcacttgggtgcttgccgaaggggaagagcaaatcgtcgcgcgtgatggcaactcatggctagtagacggggtgacaccgatcaccgacgtgatgcgctcctttgcgattgaagagtttcctcagcaacaaaactacgaaacgatcgcaggatttatgatgtatatgctgcgtaagatcccgcgtcgtacggattcagtggtctatgccggctataaatttgaagtggtggacatcgataattacaaagtcgatcagcttctggtgagtcgcgttgaacctctcgaacctatcgtcaaagaagaatag

SEQ ID NO: 41479 - DNA, 9792 bp, Vibrio cholerae
atgcagtctcaagtcgtcactcaacctgtaacagtcacaagtttgtctggcaatgtggttgttgttaatgcgcagggccaagcgcggattgtgaatgcaggggatgttctgcaaccagatgaaattatcattacggtcaatcaatctgcgatcgaactgcaaacaacacaaggtggtgtgcagattgatgagaactgcgtggcgtgtttgccagagttctcagcagatggacagccggaagtgcaagctgcacccgttcaaggtcaaatcaaccttgatttagcgcaattggatacggcgaattttgatgagcaagctatcgcggcgattcagcaggcgattttagacggtgtcgacccaaccaccgcattagaagccgccgcggcaggcgctggtgcgggtggctcggctaacggtggtgcaattaccattgactataacttcttagaagtgcttgccagtaccgcctttgatactcaaggctacaaccaaacgttttcgacaactcaaactttggttaacccactgcgttttgccgcgggtggtgaaagcctgagcacgcaagtcaccgaagggtcgctgtcacttggcacttatccgcaaacgtctacggtgaccagcttaattacggcaggtagcctcgcgctgctgccagcctcttttgtgcctgaagcggcttttttaacctcgctgcttgccgagctcaaccaagacattacctcttccgggcaacctgtagttttccgttatgatgccgcgaccaatagcattattggtgagcaaaacggtagcacggtattgagtatcgcgattagcgcggaatcgataggccgagatgttaatctcaccatcacaaccactctcagccagccgattgaccacttgccttcggtggggggcggtttggtctctatcagtggtgatcaaatttcaattgcactccaactgacgggaaccgacagtaacggcaacgtgatccaagctccgattgatgtggttgtggccatcaatgatggtagtgcgccggtgatggtcgatgaaccgaccctcagcttgaatgaaaatgatctacccgcgggatcggatggcgcggatccactgactgtgtctggccagtttgatactcagttaggttccgatcaggttgcgtcttatcaaattgatcccagcactgctaatcctatcgctgggctgacttcacaaggtgacgcggtcatattaggtgagccaactctgattgatggcaaccgcgtttatcaagctaccgcgggcggccgtgatattttccaactgacgctcaatgccgacggcagttaccagttcgtattacaaggcactctggatcatgctgccggcagtgatgcattgaccattagcttgccaattgtcgcgatagattacgataacgacagctcagcaccgggtaatttgaatatcgaaattcaagatgataaaccgatcattatcggagccgagcagcttaccgtcgcagaacaaaccttagatacaggctcgatcggtggtggcgcgagtttggtggccgatggcaattttactaccactcaaggctcagatggtgtggtgtcttatcgtttagacagcctaacggattccgtagcaggtattacgtcaggtggtgtcgcggtgacattgagcgaatcggttgatgctaacggcaattacacctataccgcgacggctggcggtgagccagtattcactctgctgctcaaccaagatgggagctaccgctttaccttacaaggctcactcgatcacgcgctcaacagcgatgagttgttggtcaatttcaccgtagtcgcaactgattttgatggtgatacagcaagcataaccttgccagtgacagtgaaggatgacaaaccctatttcaccaatgtcaccagtttgaacgttcatgaaaacgatctgccgcaaggttctgatgtgacgaaagaaccactcaccgcgagtggtcagtttgaattagtgcagggctcggatcgcgtagcgagcttcacgctcgatagcagcgtcaatcctgtgcaaggcctgacgtcgaatggcgtggcggtgacgctgtcagcgcctgtcgatgatggtcatggaaatctcacttacaccgcgatggcgggcgcagtcaccgtctttaccttgaccctgaataccgatggcacctacagctttacgctggcagcgccggttgaccatgcgctcaatagcaacgatttaacgctcaatttccaagtgattgccaccgattttgatggtgatagcgacagcatcgtgttgcccgtcaaaatcaatgacgacaagccttacttcaccaatgtgcagggcttgtacgtacacgaaaacgacttgccacaaggctcggacaccgacaaagagcccgtgaccgttaatggtcaattccagttggtgcaaggggcagatacggtcgcgagttttgcgctcgatagcagcgtcaatccagtacaagggctgacatcaaatggcgtggcggtgacgctgtcagcgcctgtcgatgatggtaatggcaacctgacttacacagcgatggcaggctcagttaccgtctttaccttgaccctaaatagcgatggaacttacagttttacgctggcggcaccggttgagcatgcgctgaatagcgatagcttgacactgaatttcaaagtgattgccaccgactttgatggcgatacggcgagcatagtgctgccagtcacagtattagatgaccaaccatcggtgatcagtgcgcaagccttgtcggtcaacgaagatgatttagccactggtacagatcaaagcaaagaatcaaccaccgccaatggtcaatttacaaccacccaaggtgcagatggcattgcccattatcagattgataccagcacaagtagcaacaccgggctgacttcacaaggtcagcctgtggtatggggcgcgcctagcataactacaaccagtagtggtcaagtctatacctatcaaggtatcgccaatggcgtggtgatcttcaccctagtgttaagagctgatggcagctacagctttactttaaatggcgcggtggatcatccgctcaatgccaatgagctaacgctgaatattccagtgctggcgcaagatgctgacggcgatacctcaccgatcaccttgcctgtcactatcgtggatgatgtaccgatcctgcatgataaaaatatcgcactgcaagagggctcagtggcatcgtcggtgaatctattctcgcgtgacaataacttaagcccagatacacaaggtgcagatcgcggagtgattactcactttagtgcagtagacgaagcggggcgtgatatccagtttcgtgaaggcagtgtgctgagtaatgatattgagctcaatggcgccgcgaaaaccgtcactgtggtggaaatcgttaatggtgtgagccgcgatcttggtacattaaccattcaacctaacggaacggcgacgtttactccagttacacagttggatcacactgatggaaacgacatcaaatttactgtggatgtgacggcgaccgattacgatcacgatacctcgacggaacagctcaacattacgatttacgatcacaaagcgaccattactcagcagaaatttacgggctatgaagaccaaggccacgatgcggctctgaacttggtgcctgcgggtgagcaaagcaatgcgcaagataacttgggtggattaccggttgaagcactgaaactcgccttgcaggtcaacctgtatgacgtagaccaaggggaaagcttaggtgaagtctcgatttggaatccaaaccagatccgtggcgatttctattatttggatagcgccaaccagctagtgaaactggatgtcgatccggcaagcggacatgttgtgctgcctgccgcactgttgcaacaatcgatcaatggcactattgccacggtcgaaaacctctactttgtgccggatcgtcactactcgacaggcaatggaggcatgaatgcctcagtaagtgtggaaattctgcacaatggtgtgcgtgatcatttcaccaacggcaacatgcgcatcgagattgaaagcgtagcggatattgcgacttggaagagcagcagtgagtttcactatgatgcggttgaggatggcagcaatgttagcctcaatatcgcagcggagactcaagacaacagtaatcctgaagcgatcacctaccagattcgttttactgaaaatggcgcaaacgccaacttggtgtacagcgatggctcgccgatcccaaccaaaaccgatgctaacggtacttattatgaagtaccggccaacaagatagcccaagttcaggtcgatccggcggataactttgcaggccaaatcaaactggatgtcacggccatcactaaagagtccaccaattacgttgctggcaagcagacggcacaatcagaaaccaaagagattgtgattgatgttgcgccagaagcggatcgcggcagctttaccgttaatcgtatttcgatttttgaagataacgcctctaatcaaaacgcggttgatccgagtgttgagcacgatcctcttctgctcagtgaagtgatttccatgacaggctcaagcgatgcagatggctcagaagcgctgttcgttcgtctgtccgattttacggatacgggcgccactttggtgtggttaggctctggcccaagtccgatcacggttggaacctaccctaatggggaaacttattatgagataccgcagagtgcgctatctcaggttgaggttctaccaacgaaacacagcaatgagaatttctcattcgtggtcgaaggtattgtgaaagacacggttaacctatcaaccggtcaagtgcaggatattgaatcgctaggcagcaaaaccgtcaatgtcaccgtgaaaggagtcgccgatcttccgaatattgattttattagcggcaatacgcaatggcagtcatttaatgacggaactcatcaaggtgtgataactaccgtagcggaagatagtttagtcgatctcaacttcagcatcatttctggtgaaatcgcggacagcccgacggacagctcagaaaccatttcggtactgctctcgaacattccggacggtgtaaagctgtttgacagtgacggtacgagcgtcgatttggtgtttgccggctacgacagcaaccataaaccgatttatcaagccaacttgacggtcgctcaggtagtcacaggtattcaggttcagccagtggcgtcatcgacagccaatattgatatcaaggcaacggtgattgtgactgaaaatgatggtcatgttcgccaagtggaagagacgatccgtattttggtcgagccgaaaattgatgtgaccgaaaactatcacaatgctgtgtctggtaatgaagatgaccgtattcatgtcacttgggtaccacaaaacacaccgggaaatattcaaaaccctgatgcgcaagagtacttcagccgagttgaaatctctggcttcccagatggtagccgagtgttcgtcaataatgtggaagtgaccttaatcaatggcgtgctggtacttgaacctgcagcaggacaatcggatctcgatttctcaaatcaggtttccgcggcgggctacattcaggtcattcctccgcacaactccagtaccgacttcactttgagtacggcgattaccgtaaaagagcaagaccacgagtacgtggatgcgggtaatccgggccaaggtattgccgaggaagtgatccacggttcgattggcgtgaaagtgaacccgatcgctgagccggatggacagcttttggtcgaaaacgcgggcagcgtaacccaaaccgtgcaagccgatgccaatggcaagattgatttcaccatcaataatgtgagtggcggtcaagcgggggcgaatgtgattcgctttgataaccttgatagcaataccgcaggcagttatcagtccgatgagttggtggatcaactggtggtcagctttggcaacgtaccgcaggaagtattgaaccaactgctgatcaccggcgccatcaacaatggtgatggtacatggacaatcaccaacgaagccgatttcagcatcaaagcgcccaatggtttggtgtacagcagtaataacgacccggataagaacggtttcaatgacatcaagatcaccatcactgctaaagtctatgaccaaggtgaagacagcagcgaagtgaaaatcaccaagcaggtgagtacagagttaaccttgagtttccccaccgaggtcacgggtaataacagtgttgccgcgcagctcaactgggttggcgatgccgatgatttggtgattggcaaagaagataacacggtaaacttagggcaacagatccaagacaaactcatggttaatgccaccggttttgatgcggtggcggatgaactgagtattgtgattaacgcgagcgatctgcctgctggcgcctcgattggtgggcaagatttcaactttgttgatggtcactatgtatttaaaggcacgctgaatcctgatggttcaatttctggattggaaggactggtgctgatcccaccgcgcgattttgcgggggattttaagctgccgatcacgtttgtgacgacagatactcagtcgggtgatgagaaaacattgacggcgcaagtgcctgtcgcgatctctccggttgcggatgtacccagcagcagtggcgatcagccactcgataatcatgtgaccccaagcattacactgaatgtgcaagaaacgctgggactggatgcgaaccatcaaccgaccgatttggcgaacgataccccaacgcaagacggtatcgcctatgaagatggcattgtgcatctcaacttagcgatcggcttggcggatagcctcaatggcagtacgcaagggcaagaagtgttaaccgaagtgacactgacgttgaatgacaccaactctggtgtcttcgtggatgccaacggccaaagtttgggaacgagtattacgctcactcaagctgagctaccagctgcactcggcgaaatttacttcaaaccagcgccgaactatccaagcggtaacgatatcaataccgtgggaatgactgtgaccggaaaagtcactgacagcaccgtatttgatgaaaccaacgccagtttacaaggtgtgagcagcagtgatgccgataaaaccttcacctcacaagtcagttttgaagtgaaacctgtggtggatgacatcacgattggctctggtagtccgatttcggtgacgggagatgaagacagttggattgcccttgccgatcaaggcaatgcgttcaatgtcagcctgaatgacaatgatggctcggaacaatttgtttccttggttcttactggactgccgaccgatttcctcgtcaagtcactgtcgagtgactatgtggtgaaaaataacggcggcggcgagtggagcgtgcaaatccgcaatccaaacttaaccagcttggatctatccgcactggcgattaaaccgaccaaagatttcagtggcgaagtgcaattggggatcaaagtatttacccaagaatcattgcttggtgaacccgttgaacacacagggcagttcacactcaatgtgacgcctattggtgatgatgtggatattgctccgataacgaatgttgttggcaatgaaggtcaagcgattgacatcagccttggtgcgcaaattctcgataaagcaccaagcttaccgggtggggtgacttacaccgaaaacagcccagagactttgcgtgttgagatctccggagtgccggatggtgcattcttgagcttggcggatggcaccttgggaacctctcttggtggcggcgtttgggtatttgaaattaatgcgcagcagcttgataaagtggtgttcaattccggtgataacaaccaactgaattggaatggcaatctgcattttaaagtgcagtccgtggataccggattggcaggtgatcagcaccttggcagtgcgcaagagtttgatgtgcatgtcgatgtgacggcggtgaacgatcgtcctgaattgattaacgtgcaggatcaagtgacggaagaggatacgcctctactgctcaatagctttacgttggccgatattgatgctcagttggatgacccgaacgctgactatacgctgcaaatcggtgtgaatagcggcgtgctgatcatcgactcatcgctcagcagcggtttgaccattcagggcgatggtacgggggcgctttccatcacgggtaatgtggccgagatcaatgctgcgattggcgctggcttagtgaaattcgtcccatcaccggatttttatggtcaggtcgccgtcacgcttaacgtgaatgataacggcaatgcggggagcgaaatcgcgggcgatgcatcaaccgcgcacgataacagcgcgcagtttgtgattgatgttacggctgtcaacgacaaacccgaagtggatggcatccacttgaccgctcagattgatgaagcgtcagggcaaaaactgactggcattacggtgtctgatgtggattatgccggatcacacacgaatgatgtgatgaaagtgacactgagtatcagcgaaggcattttgagtgtacaagcgcctgcaggcagctcagtggccgtcagttatgccttagatggcagtgtgatcctcgaaggcagcccagaggcgattaacgcgctactgaaccatagtgactccgcttacggcttatttgtggatgcaacggctatcgcagggacgcaaatcaatctcaccgtgacggcgcaggatatgggcgtctatttcgaaaatgcctcaggtatggcattggaagagagcaaaacctacccgattcaggtcaatccggtggctaacgcgccaagcttgagcatgaatcctgccttcggttatgcccagcagatttatgctaatcagagcttgagtgcacaagggattgctcttttaggcgcgattgcggccttaacggatttacatgaaacattgagtttgcgtgttgatcatcttccagcgggagcaagcttaagcagcacggcaggctcagtgactgatttaggtaatggtcgctgggaagtctcccctgatgcgctagagagtctcaaagtagtcggtttggatgagggagtacacaccttgtcgcttacagcactgtctaccgagagtgatggtagcagcgcgccttccgcaaacagcatcgattatcggattgagattgcggcagatggctcactgctggatcatcgcagtgcaaccgatgatagtttgctggtggcgggcaatagtggcatgacgctgctctccggtagcggtgatgactttgttcaaggcggtgcgggtgacgatgtcttggtcggtggtttaggtgctgacattttggtcggtggcacgggcgcagatatgttcaaatggacgctcgacggagtcgacgataaagttgaccatatccgtgatttcaatgtcaacgaaggcgatagcattgacctgattgatgtggtacaggacctcggtaaccacttaaccatggaacaactgttgaacaacttgagcgtgtccaatcaattgaccgcgcaggtggtggataatgatgtcaccttgcaagtcacgaccgataatcaggttcaacaaaccattgtgatcgaaaacctcgcgactcaaattgatttcacgggaatgagttcattggacattatcggcaccttgctggatcagaatttgttgcgtcacgactaa

SEQ ID NO: 41480 - DNA, 1239 bp, Vibrio cholerae
atgttgtataaatcttcccttgctgtcgccatctcagccctgattgcggggcaagttagcgccgctggttttcaagttgccgaacactcagcatcgggtttaggtcgtgcattttctggtgaagcggcggtagccgataatgccagcgtgttagcacgaaatcctgccgccatgatgctttttgagacggcacaattctctggtgcactgtcgatcgtcgatcctgaagtcaatgtggacgatctttccaacaatcagtcgatgaaggatgtggctcctctgcaaattgtgcccgccgcgtattatatccgcccaatcaacgaccaatgggcttgggggctagccatgtttacgacctatggcgttgcgaccgactaccccaatgagatttatgcaggcgacttagccggcgatacctcactcatctcagtcaacctcaacccgaatatcgcttatcgtgttaacccagaactgagcttaggttttggccttgatctggtcgccgccaaagccaaattaactcgccacaaaggtggattggctcccttcatgggcggcggaaatcctagcgataacctgattggcatgacgggtgaaacccttgctttaggctggaatatcggcgcgctttatgaattggatgagcaaaaccggatcggctttggctaccgttcgcgcgttaagctgaatttcgatgatggcgagttctccagttatgactcaggcatcgcgaccagtgcggttgttccgggacaactcaaaatcgaactgccagccatttgggagctctccggcttccaccaactgaatgaacaatgggctgtgcattacagctaccaacaaaccgattggagcagctttgaagaactcactgccacttccagccaatgtaaaaacggcacctgtttccaaaaaatcgaacaataccaagacaacggacgctggtctgtcggcgcaacctatacgctgaacaccacttggacattgcgcgcaggtttggctttcgatgagcaagccggtaaggcaacactcagtattcccgacagtgaccgtttctggtactcagcgggtttgacgtacaccttgacgccacaactgactatggatgccggttttgcgttagtacagagccgtaaggggtcttttactgaaaaaaaccaaatcggccagaaccttcagtttgagtctgaggcggtcgcctatatcagtgcattgcaatttaactaccgttttcactaa

SEQ ID NO: 41481 - DNA, 654 bp, Vibrio cholerae
atgaaacaaaccatttgcggcctagccgtacttgcagccctaagctccgctcctgtatttgctcaccaagaaggtgactttattgtgcgcgcgggtattgcctcggtagtacctaatgacagtagcgataaagtgttaaacactcaaagtgagttggcagttaatagtaatacccagttagggttaacgcttggctatatgtttactgacaacatcagttttgaagtcctcgctgctacgccattttcacataagatttctacctctggtggtgagttaggtagccttggtgatattggtgaaacaaaacatttgccacctacctttatggtccaatactactttggtgaagctaattcgactttccgtccatatgttggtgcgggtttgaattacaccactttctttgatgaaagctttaatggtacgggtactaatgctggattgagtgatttaaaacttgacgactcatggggacttgctgctaacgttggctttgattatatgctcaatgatagctggttcctcaacgcttctgtgtggtatgccaatattgaaacaacggcaacctacaaagcaggtgcagatgccaaatccacggatgttgaaatcaatccttgggtatttatgatcgcgggtggttataagttctaa

SEQ ID NO: 41482 - DNA, 1422 bp, Vibrio cholerae
ttgatgaagaaatcgcaagtactggccaacacaattaaaagtcaaatcgagcagaatatctggcttagtggagaaaaaatcccatcgattcgatccacctgcaaacgatacaagctgagtattgaaactgtgctccaagcctatcaacagttggaagatcaaggctatattcgcgccaaagcgaaatcaggctatgtcgtgttaccgcgaagaaatactctatttgccggcaatctcagtgcaaaagtgattaaaccctatccagtaaaaatcagcgatttactatacgacgtcctacaaagagcaaaagaccccgagatcattccatttagttcagcattccctgaccctgcgttatttccacaccaagcgttatcacgcagtttagcgaatgctagccgtcaaatgttgggaagctgcatgctgactaatttacctcctggcagccaaacgctaagacggcaaatcgctcagcgctatcaaaaaagtggtttaaatgtattacccgatgacatcgtcattacttcaggggcaatggaagcgttgaacttatgcttacaatcttgcacaaaaccgggggatttagtcgccatcgaataccccgctttttatggtgttttgcaagcgattgaacggctcaatcttacggcggttgagatcccaaccgatcctagagatggcattgatctcgatgtgttagcctctgtattttcttctatggatattaaagcatgctggtttatgaccgagtcacagaatccgctcggctattctatgagtgaaacaaacaagcagcgtttggcagagttagtcaatcactatcaaattccaatgattgaagatgatgtttatcgtgagcttggtataggtaacccaagctcactgccagcaaaagcttacgataaagtaggcaatatcctgctatgcggttcattttcgaaatctctatcgcccggttttcgtatcggttgggtcgttgcgggagaacgcgccttaaacatccaacgcttacagcatttgtccactctttctagcagcatcccgatccagctcggcctatctcattacctcactttttataactttgatcaccacttaaaaaaactgcgtaaattgctgaacgagcgtaaaaaagcacatgctgaattactgcgaacctacttgccacataacactaaaatccatctcaataacgggggctattttatctgggtcgaactgccccaaaccatttacgcagaaactctgtacgaacaggcacttgaacacaatatagcaattgctccggggatcttgttcagcagcgataaacgcttttcccatcatatccgtctcaactgttcttatgcatgtgatgaacgaatcgagcaagccattcaaactctaggtcagcttattcacaccatggaaatcaataggtaa

SEQ ID NO: 41483 - DNA, 1593 bp, Vibrio cholerae
ttgggagctttcatgattgatgttgttgaattatcgcgtttgcagttcgcattaacggccatgtttcactttctcttcgtccctttaaccatagggatgtcttgcctactcgctatcatggagtcgatttatgtactcacagggaagcagatttaccaagacatgacccgcttttggggcaagctctttggaataaactttgcgttaggtgtgacgacgggtttaaccatggagtttcagtttggaaccaactggtcttactattcacattatgttggcgatatttttggtgctccgttagcgattgaggctctcgtcgccttttttctggagtccacttttgtgggcctgttcttctttggttggtcacgcttgtcaaaacgccagcatttgctcatcacatggctagtagccctaggatctagcttttctgccttgtggatcttggttgcaaacggttggatgcaaaatcccgtcggagcagagttcaactatcaaaccatgcgtatggaaatgaccagctttgccgaagtggtattaaacccggtcgcgcaggtgaaatttctccatactgtcgcatccgcttacacctgtggtgcaatgtttattctcggggtgagttcttattacttattgcaaggccgtgacatcgagtttgcgcgccgttcatttgccatcgccgccacttttggtatggcagccattatctcagtgatcgtattgggggatgagtcgggctataaacttggcgatgtccaaaaagtaaagttggccgcgattgaggcagaatggcacaccgaaccagccccagcagcgttcactctgttcggcttacccaatcagaaagaaggtaaaaccgattatgccattaaaattccctacctcatggggttaatcgccacccgttcgtttgatgaacaagtaacagggctccacgatttacgccatgaacatctactacgcattcgtaacggaatggtggcttatcaactacttgaacggttacaggctggtgatgcatccgtagaaacacaacgaaaatttgagcaaacgaagcatgacctcggctacgggctgttactcaagcgttataccgataccatcacagatgccaacgaggcacagatccagcaagcagcagatgattccatgcctactgtgtggccactgttttggtcatttcgcatcatggttggctgcggcttcattatgctgtttgtatttggtgccgccttgctacaaacctgccgtcaacgcatcactcataagccttgggtactcaaagctgcgctctggtcaattccattgccatggattgctatcgaggcgggttggtttgtcgccgaatatggtcgtcagccttgggcaatcggtgaagtccttcccgtcacggttgccgtctcatcccaaacgttcgaaaacttaatcacttcgctcgccatcattctaagtctttataccgtttttatttttgtggaaagctatctcatagtcaccgttgctcgaaaaggacccagtagcttaaaaactggtcgctatcaggacgaacaaagcttatacgagcataagttggcacaacaagtacaatattag

SEQ ID NO: 41484 - DNA, 1077 bp, Vibrio cholerae
atgaagatgaaacacatgaaaccatacacgacgatgaaaactgtgctcagcaccttagccatcgcgctcgctttcgggcctttgcacaacgcccaagcttgcacacgcatcttatacgagacggggaatcaatcctatatcagcggacgatccatggattgggcggatccttccgcagcgacggcgctgtgggtctttcccaaagggatgaaacgcgatggaacggttggtgacaatccaatcaagtggagcgcgaagtacggctcaattattgtctccttctatgatgctggaaccgctgatggaatgaatgagaaaggactcgttgccaacatgctgtatctgaaggaggctaaatggggggatgcaaccaaggcaggaaagcctacactgaccgctggtgcttgggcacagtattttctcgataactacgcaaccgtagaagaggccgttacggcaatggccaatcctccatttaccatcattgcgccttcactgccaaacggagacgcagcagccttacacctctcgatttctgacgtgaacggcgactctgcgatttttgaatacattgatggcaagctcgtgattcatcatggttcgcagtacaaggtaatgactaactcaccgacgttcgatcagcagctagcactcaatacctattggcagcagataggcggaagcaaatttcttccaggcacaatcaatgccgcagatcgctttgtccgcgcctcttatgctctcagtgcctcacctaaataccgagacaacgaccttgcacttgcatctgttttttcgcaaattcgtgcggttagcgtccctctcggcattactgatcccgaccgccctaacctcgcaatgacactgtggcgtacatttgcagatcatacagcgaagatttattactttgagtctgcagttttccccgccgtttcttggctagacatgagtaaggttgatctgacggaaggcgcagccccaaaagtcgttagagtggaacggggccagcctctcgcaggcgagctttcagctgcacttaagccagcagagcccttcaagtggctcggggcagaatga

SEQ ID NO: 41485 - DNA, 1032 bp, Vibrio cholerae
atgaaaatcaaagcactttcaaaactgaaaccagagcagggcatctggatgaacgaagtggacatgcctgagcttggccacaacgacctgctgatcaaaattaagaaaactgccatttgtggcactgacgtacacatttataactgggatgagtggtcacaaaaaaccattccagtgcctatggtagtcggccatgaatatgtgggtgaagtggttgggattggccaagaagtgcgtggtttccaaattggagatcgcgtttctggtgaaggtcacatcacttgtggtcactgccgtaactgccgtggtggccgtacccacctgtgccgcaacaccattggtgtgggcgtaaaccgcacgggttgtttctctgaatacttagtgatcccagcgtttaacgcattcaagatcccggatggtatttcagatgatctggcgtctattttcgacccgtttggaaacgctgtacacactgcgctttcattcgacttagtgggtgaagatgttctgatcaccggtgctggcccaatcggcattatggccgcagctgttgcgaaacatgtaggtgcgcgccatgtggtgatcaccgatgtgaacgaataccgcctcgatttagcccgtaaaatgggcgtgactcgcgctgtgaacgttgctgagcaaaacctagaagacgtgatgaaagaactcggtatgaccgaaggttttgatgtgggcttagagatgtctggtgtaccgagtgcgtttagcgccatgctaaaaaccatgaaccacggtggccgcattgctctgttaggtattccaccgtcatcgatggcgattgattggaaccaagtgatcttcaaaggccttgttattaaagggatttatggaagggaaatgtttgaaacttggtataagatggcgagcctgatccaatcgggtctcgatatcagcccaattatcactcaccacttcaaagtggatgacttccaaaaaggcttcgacatcatgcgcagcggggcttctggcaaagttatcctcgattggcagtaa

SEQ ID NO: 41486 - DNA, 1194 bp, Vibrio cholerae
atgtcttctgctttttatcagcaaatccgtactcagcttgaggaagtgaaagctgaggggctttataaatccgaacgtgtgatcacctcgcagcaacaagcggcggtcgaaatttctactggcgaacaagtactgaacttctgtgccaacaactatcttggcttggccaatcaccctgctctgattgaagcggcgaaacagggtatggacagccacggctttggtatggcttcggtgcgtttcatctgtggtacgcaagatatccataaacagctggaacagaagctctctcaattcttaggtaaagaagacaccattctttacacctcatgctttgatgcaaatgcgggtttgtttgaaactctgctcgataaagaagatgcgatcatctctgacgcactaaaccacgcttcaatcattgatggtgtacgtctgtgtaaagcgatgcgttttcgctactcgaacaacaacatggccgagctggaagagcaacttatcgcggcagatgctgctggcgctcgccacaagttgatcgtgacggatggcgtgttctcaatggatggtgtagtggctaacttgcctgcaatctgtgacttggcagataaatacaacgccttagtgatggtggatgactctcacgcggtaggcttcatgggcgcgaatggtcgcggcacacacgaataccacgatgtgattgatcgcatcgacatcatcaccggcacgctaggcaaagccatgggcggtgcatccggcggctacacttcaggaaagaaagaagtgattgattggctgcgtcaacgttcacgtccatatctgttctctaactcggttgcaccttcgattgttgcggcgtcactgcgtgtgttggatctgctgcaagagagcggcgatctgcgtgagcgcctatgggaaaacgcagcgcacttccgtactcgtatggaagcggcgggtttcactatgggtggtgccgatcacgccatcattcccatcatgctaggtgatgccaaagttgccgcagaatttgcggaacgcgcactggccaaaggcatttacgttattggtttctcattcccggttgtaccaaagggacaagcgcgcattcgtacgcaaatgtcagccgcacacagccgtgaacaactggacaaagccatcgacgccttcattgaagtgggtcgtgatatgggacttatttaa

SEQ ID NO: 41487 - DNA, 1506 bp, Vibrio cholerae
atgatggtaatacctgaaaacagcagcatcgtaattttcggtgcttcgggagatttgacgtaccgtaagcttattcctgcgttgtatcacctctatgccagtcagcaactgcctaaatcgtttgcgattttaggtgtgagccgtaccgagtacagtgacgagtcttaccgcgagaagctaaagcgctcactgcaagagctggaaaaaacagaacctgccgctctcgaagccttcatgcagcatgtgcattatcaagcgctgaacacctcagaagtagctgattatcagcacttagcgacccgccttgatacactggctaacgattatcagtttgagcagcgtaatacgctgttttatctcgcaactccaccaagcttgtatggcgtgatcccagcttgccttgcggcacatggcctcaacgatgagagccaaggctggaagcgtctgatcatcgaaaaaccttttggttacgatctgcaatctgcacaagatctggatgtggaaatccaccaccacttcaaagagcatcagatctaccgtatcgaccactaccttggtaaagaaaccgtgcaaaacctgctggtgttccgctttgccaacggcatgtttgagccactgtggaaccgtaactttattgattacgtggaaatcacaggcgcagaattcctaggtgtggaagagcgcggcggttattacgatggttctggcgcggtgcgcgatatgttccaaaaccacctgctgcaagtgctggctatggtgggcatggagccgcctgcggcgatcaacgcggattccattcgtaacgaagtgaacaaggtactgcaaagcctacaaccgctttctgaatctgatctgcgcaacaatctggtgctcggtcaatacaccgaatcggaagtgcgtgggcaatttttacccagctaccgtaatgagccgggcgtggcggcggattcacgcaccgaaacttacgtcgcgctaaaaatgttcatcaataactggcgttggaatggtgtgccattctatgtgcgcagcggtaaacgtttaccaacgcgtgtcaccgaagtggtcattcacttcaaacgtacaccgcatcctgtctttgggcaaaatgcgccagagaacaagctgatcatccgtattcagcctgatgaaggcattctgatgagcttcggcttgaaagagcccggcgcaggtttcaaagccaaagaagtgtcgatgaatttccactacgcctcacttgagcagatcaaaatgctgaccgcttatgagcgtttgctgctggatgcactcaatggtgacgcgacactgtttgcccgtactgatgctgtagaagcttgttggaagtttgtgcagccgatcctcgatttcaaacaagatccgcaatcgctgtatggctacgcctgtggcacttggggcccgaaagagtcggatgacttgctgcgccgtgacggccgtgagtggcgcttcccttgtaaaaacctcactaacacggattactgcgaattatga

SEQ ID NO: 41488 - DNA, 1449 bp, Vibrio cholerae
atgaaaggtgatatcggtgtaatcggccttgcagtaatgggccagaacctgatcctcaacatgaacgaccacggcttcaaagtggtggcacacaaccgtaccgcggctaaagtggacgagtttctagaaggcccagcaaaaggcactaacattgttggcgcttacactctgcaagagctggtcgataaactggcgacgccacgcaaagtgatgctgatggttcgtgcaggtcaagtggttgatgacttcatcgagcaactggttccactgctcgacaaaggtgacatcatcattgatggtggtaacaccaacttccctgatactaaccgccgtgtcaaagcgctgcgtgaaaaaggcattcacttcatcggtacgggtgtttctggtggtgaagaaggtgcacgtttcggaccttcgatcatgccgggtggcgcacctgaagcatgggaagcggtaaaaccgattttccaaggcatttctgcaaaaactgacgctggtgagccttgctgtgactgggtgggcaacgatggtgccggtcacttcgtgaaaatggttcacaacggtatcgaatacggcgacatgcagcttatcactgaagcttaccagttcatgaaagatggtctgggaatgtcggccgatgaaatgcaagccgtatttgctgactggaacaaaactgagctagacagctacttggttgagatcaccgctgacatccttggctacaaagatgaagatggtgaagcgttggttgagaagatcctcgatactgctggccaaaaaggcacaggtaaatggacgggtatcaacgcgctggacatgggcatcccactgactctgatcaccgaatccgtgttctctcgctgcctatccgcactgaaagatcaacgtgttgaagctgaaaaactgtttggtaaaaccaaaactcaagtcgaaggtgacaaacaagtttgggttgatgcgctgcgtcaagcgctgctggcttcaaaaatcatctcttacgcacaaggctttatgctgatgcgtgaagcatcgaacgagaatggttggaacctgaactacggtaacgtggctctgatgtggcgtggtggttgtatcatccgctctgcgttcctaggcaacatccgtgatgcgtttgaaaagaacccagaactggcgttcttaggttctgatgcgtacttcaaaggtattctggacaactgtctggctgcatggcgtaaagtggcagcgaagtcgctggaagtcggcattccaatgccatgtacgacttcagcactgaccttccttgatggttacactacggctcgcctgccagcgaacctgctgcaagcacagcgtgattactttggtgcgcacacttatgagcgtatcgatcgtccgcgtggtgagttcttccacactaactggacgggtacaggcggtaatactgcgtctactacttacgacgtgtaa

SEQ ID NO: 41489 - DNA, 1140 bp, Vibrio cholerae
atgatactggacagtcaattagcgcaacaaattgtcgatcgcaccatggcgatcatcggctacaacatcaatgtgatgaatcaagctggagtgatcattggcagtggcgagaaaaatcggattggccaagtgcatgatggtgcaattttggcactcaaacatggcgattcggtagagctaacggcagaaagctgcgtggcactgaaaggtgtaaaaccaggcatcaacatggtgttgagaaatcagcagcaagtggtcgggattgtggggattaccggagagccgaaagatattcgtgattttgccaatctggtcaaaatgagtgccgaaatgatcattgagcaagcagctttggtcgaacaactacaatgggatcggcggcatcgtgaagagttcatttccgcttggatacacaataccttatcggccgccgaacttgatgcatgggcggcgagactttccattgacctctctaagcctcgcgtggcagtggtcatcgcctttcgtcaaccgaaaagtggacaaagcttggatcagatccgtcaagtggttgagcttttggagcaccctgaacgggacaatctggtcgctgtggtttctatgcaagagatagtcgtgctcaaaccttgtcgaacaccagagcattggaccagcgaatacgaaagtttgcggattgataagttgatggcgaggctcaaagcctatgacatcacaggatatgacattgctttaggccagctttttatcaacccaaacgcgatccatctctcttaccaaagtgccaagcaggtactgaggattggccaagtacgccagccagaaaaacagaaacatctctacgaggaactgcgtttgccggtattgcttttgccattgaatgaaggatggcaaggtgaacagtggcgacgagtcatgcaggagttgcagacacaggataagtcagggcaactcgtgaaaacgttaaagggactatttgcggcaaatggcaacttgaatctttgcgcccaacaactgtttatccaccgaaatacgctgcgctatcgtttagaaaaaatcaccgaaattacagggattgagactaactccttacttggtttggcggaattgtatattgcgtatcagctcacaagttatgattaa

SEQ ID NO: 41490 - DNA, 1053 bp, Vibrio cholerae
atgcattcatggtgggagcactcaatgacaacactgacgattacacgcccagacgactggcacgttcaccttcgcgatggcgatgtactggccgatactgtacgcgacatcagccgttataacggccgcgcgctgatcatgcctaacacggttccccctgtaaccaccactgagatggccttagcctatcgtgagcgcattatggccgctcagccacaagcgcactttgaacctttgatggcgctttacctcaccgataacacatcacctgaggaaattcgcaaagccaaagcgtcaggcaaagtcgttgcagctaagctttacccagccggtgcgaccaccaactcggattcaggcgtcacttcagccaaaaacatttacccagttttgcaagcgatgcaggaagtcggtatgttgctgttggtgcacggtgaagtcaccacgcacgaagtcgacatttttgaccgtgaaaagaccttcctagacaccgtgcttgcgccgatcgtgaatgatttcccgcaactgaaaattgtgcttgaacacatcaccaccgccgatgcagtgacctttgtgcaacaagcaggcgataacgttgcggcaacgattaccgcgcaccatttgctgtttaaccgtaaccacatgctggttggcggtattcgcccacatttctactgtttgccaatcctaaagcgtgcgactcaccaacacgcgttagtggcagcggcaacctctggcagcaagaaattcttcctaggtacggactctgccccgcacgccaaaggccgcaaagaagccgcttgtggctgcgcaggttcttacacagcccatgcagctcttgagttgtatgccgaagtgtttgaaaaagaaggtaagctagaaaatctggaagcgttcgctagctttaatggccctgatttctacggcctacctcgcaatcaagagaccgtcacgctcaccaagcaagcctggccagtcgcagaaagcatgccgtttggcagcgatatcgtggtgccaatccgcgccggtgaaaatatcgagtggacagtgaagtaa

SEQ ID NO: 41491 - DNA, 1221 bp, Vibrio cholerae
ttggtgagccctacaacacaaaaagaaaaggatatgaacatgaaaaatgccctaagcacagtcgcgctgagcactctggtggctcttggttcgtttggtgcccatgctgctattgaagaaggacaactcactatttggatcaatggtgataaaggctataacggtttggcggaagtcggtaagaagtttgaagccgacaccggaatcaaagttactgtcgctcatcctgatgcgctacaagataaattcccacaaaccgcagcaacaggtgatggtcctgacattgtgttttgggctcacgaccgttttggcggttatgcggaagctggcctattagtcgaaatcaaaccttctgcaaaaattcaagaaggcatcgtagatttcgcatgggatgcagtgaaatacaacggcaaaatcattggttatccaattgcggtggaatcgttatcactgatttataacaaagaccttgtccctaacccaccgaaaagctgggaagaagtcgctgagctggatgccaaactgaagaaagaaggcaaatcggccatcatgtggaacctgaaagagccttacttcacttggcctttgatggcggctgatggcggttacgcattcaaatacggtgttgatggctatgatgtgaaagacgcaggtatcaacaataaaggcgtaaaagacgcgatgaacttcgtgaaaggccttgtggataaaggcgtgatctctccagatatggattactcagtgtctgagtctgcctttaaccaaggtaataccgcgatgaccatcaacggtccatggtcttggggcaacatcgagaaatcaggcatcaactacggtgtgaccactttgcctaaatttaacggtcaagcgtcaaaacctttcgttggcgttctcaccgccggcatcagcaccgcttctccaaataaagatctggcggtggaattcatcgaaaactatctgctgactaacgatggtctgcgcatggtaaacaacgataaaccactaggtgcggttgcgctgaactctttccaacgtgaactggatgcggatgcgcgcattgcggcgaccatggataacgccatgaacggcgaaattatgcctaacattccacaaatgaacgcgttttggagctctgcgaaaaacgccatcatcaacatcgttgatggtcgtcaaaccgtggatgccgctctggctgatgctgaaaagcagatgacgaaataa

SEQ ID NO: 41492 - DNA, 1122 bp, Vibrio cholerae
atggcgagtgtcacgttaaaaaatgtatgtaaagcgtacggcgatgtgctgatttcaaagaatgtcgacttagagattcaagaaggcgaatttgtggtgttcgtcggtccttcaggttgtggtaaatccacactgctgcgctgtattgcgggtttggaagacattacgtctggcgacttgtatatcggcgaacagcgcatgaatgatgtcgaaccgtccaaacgcggcgtaggcatggttttccagtcttacgcgctttacccgcacctcaatttgtacgacaacatgtcatttggccttaagctctccaaagccgataaaagcgagatcaaaaaacgcgttgaccatgcggcggaaattctgcaactgagccacctgctcgatcgtcaacccaaagcgctttctggcggtcaacgccagcgtgtagccattggccgtactctggtttcacagcccaacgtattcctgctggatgaaccgctatccaacctcgatgccgctttgcgcgtgcaaatgcgttcagaaattaccaaactgcaacgtaaactgggctgcaccatgatttacgttacccatgaccaagtggaagccatgaccatggcggacaaaattgtggtgttggatgcgggttttgtctcgcaagttggcaagccgctggagctgtaccactacccacaaaaccgctttgtggccgggtttattggctcgccgaaaatgaacttcatgagcgtcttcattgaaggggtagaaaaagatcgggtacaggtccagctttctaacggtacgaccttctggatccctgtcgatggcaccactgtcactcgtggagaacgcatgtcactcggcattcgtcctgaacatttggtcgaagcagagcatggcgatgccaaaattgaaggcaaagtaatgatcgttgagaaactgggtaacgaaacccaagtgtatatgaacctgaagggttcagactcagatgtgatctaccgccagccagacacactcgatgtcgaaaccggtgacacgctcaccattggtattcccgcacatcgctgccatctattccacagtgatggccgtgcttgccgccgtttacataaagaaaaaggcgttgatcttcccgcataa

SEQ ID NO: 41493 - DNA, 1305 bp, Vibrio cholerae
atgtcaggacttaagggaagggaaaatatggggaaaagtaaggaaaaaggcatagaaagtagtgagagtttatttcagtgggaaagggtgggtcgattcaattttcctgtctggacagtacttattggcactttatttgcgcgcaccagcttttttatggcttggccatttttagtcgtgtttctgtatcaagattatcacgcgacagcgacagaagtgggggccatgttggcaacatcggcactggtcggctcgttaacggggctctattcagggtatctttctgataagtttggccgcaaatgggtgatggtcagcggtaccctgatcgcgacgtttgcttacactggcatcgggctttcaaatcaaatctggcaatttttcatcatgatcgttttaactggattaatgcgccctatgattgaagcgcccggcaaagcggtgattggggataacttacccgatgaaaaagatcgtgaattggcgctcaatgtccgttattttctgcttaaccttgggggagccattggcccattaataggaattacccttgcgcttgctcatccgcaagtgctgtttatcgtcacgggcatagcgtattttctgtttggtttatggttgctcgccactttggagcgtaaaggacgtttccaacaaccagatcgctcacttctccccaatttttctgccactttacgtgtgatcagtaaagacaatgtgttcgttaaaatgatgctggctaacttcctgatgatgtttgtttatggtcaggttgagtcctcattgccgcaagtgattgttcgctctgggattgcggatgcggctcagttggtggccgggttagtattggtcaataccatgaccattattttattccagtttccgacattgaaactgttggaaagcgtgccgttgtttacacgtacgcgcttgggaatggctttgatggggcttgcgcaagtcggttttatgttcacccctgaagcttttccattaggttggtatttggcttgttttgtcttgagtatgggggaggtgatcgcatttccgacgctaaatgtgcagattgaccgtttagcccccgctcatttacgaggctcttattttggtgcggcagcgctttattcgttaggttttgcgattgctccactggctggaggtatgatgatcgaatatctcaacgcacagtggttatacgggctctgttttgttttgtgcttagccatgatgggtttgtactacttggcgcagcgagagcaagaaatgggggagaaagagagattatctcgtgcaacggagtgttaa

SEQ ID NO: 41494 - DNA, 2361 bp, Vibrio cholerae
atggcgattcagcatctgagttttgagcagctctaccaagtcgcaaaactggaaaagctagagtgtaagtcaaccaaagaacttgcaccgatcgatgagatcgttggacaagagcgagcgcagaaggcggtcgagtttgcgatgtcaatcaaagagaagggatacaacatctacgcgattggccgcaatgggctaggcaagcgtaccatgattttgcgttatctcagccgccatcaacacgatgtcaataaactgtatgactggtgttatgtggcgaattttgaggatgtgcgcgtacctaaagtgctgaaattaccctgcgggataggcattcagtttcgtcaagatattgaaaagctcatgactaagctggtcacggctatcccattggcattcgataatgaaatctacttcagccgtgctgaaaagttaaaaaaccagcttgcacaaaagcaagaaagtgaactggaaagcatcactcgcaccgcaaaagagcggggagtgagtttaaccttgactcctcaaggggagtatcaatttgtcgctctaaacggtgaggagatgcacacggaagagacgtttgatgcgctctctaaacgtgagcaagagcagttcagtaatacgattgatgagttggaagtcagtttgcgcaatatggtgcgccagttgaccgaatgggaagaatcatacagcgagaaaatcaaaaagctgaatgatgaagtcactttagatgtgattgcccactttattaaaaaactgaagcttgattacagtaagtacccagaaatcaaggcgtatttgaccgagctgcaaaaagacatagtggaaaatgtcgagatttttcttgatgaaggcgctgaccaaggtgagcttgcgaatgcgtctttggataagaaaatgccacgccgttataaagtgaacgtgctggttagccgcaatgctgaagagtttcccatcgtggttgaggagagcccaaactaccactctttatttggctacattgaaaccgcgacctacaaaggcacggtgtttaccgatttctctctgatccgtcccggcagtttgcacaaagccaatggtggtgtgctgctcatggatgcggtaaaagtactcgaacagccttatgtgtgggatggattgaagcgtgcgctgcgttcgcgtcagctcagtttcacttcattggaaaaagaagtcacactcaccggcacggtttcgctcgatcccgagcccatcccgctcgatgtgaaaattatcctgtttggtgactaccgcacctatgaattgctggcgcattatgatcccgaattcagtgaactgtttcgcgtgacagcagactttgcggatgaaatgccgcgtgatgccgattcagagctgcactatgcgcgctttatttccagtattgtgcatgatgccaatatgctgcattgcgaccgtaaagccatcgcgcgcattatcgagcacagttcgcgcaccacgggcgatcaaaccaaactgtcgttacactcggcccatattgccaatttgctgcgtgaatctaactatgtggcgaaacaggccaatgcgaatttgattcgtcaaatccatgttgaggaggcattgcgtaaccaagaactgcgcgtgaaccgcctacaacagagcatgatggaaaccttcgtcaatggcaccacgctgattcaaactgaaggggttgctatagggcaagtgaatgcgttgtcggtcttggcaaccagcgatcacgcgtttggtatgccaaatcgaatcacggccacaacgtcatacggtgagggagagatcattgatattgaacgcaatgtcgatcttggtggcagtattcactccaaaggggtgatgattttgtcggcgtacctcagttcggtgtttgggcgcaccgcacgtattccgttgaccactaccataacctttgagcagtcctatggtggggtggatggcgacagtgcgagcatggcggaattctgtgcgattgtttctgcgttttcgaaacagccgaatcgacaagatatcgcgattaccggatccatgaaccagtttggcgaatcgcagccgattggcggcttaaatgagaagatcgaaggcttctttgatgtgtgtaccatcaaaggacgcaaagatacccaaggggtgatcattccacgctctaatatgcataacctaatgctgcgcgctgatgttgtgaaagcggtggaaaaaggtgaattccatatctgggcgattgatcatgtgaccgaagcgatcgagattttcactggcaaaccggctggcgtcgcaactgatgatggcagctacccggtggacaccgtatttggtcttgctcaagccaaactcaacgcattacgtaaataa

SEQ ID NO: 41495 - DNA, 1137 bp, Vibrio cholerae
atgatcatttccgcttcgaccgattaccgcgcggcagccaaagccaaactcccgccctttttgttccactacatcgatggcggctcgtatggagaacacacgctcagacgcaataccgatgatctggccgacattgccctgcgccagcgcgtgctgagtgatatgtctgagctgagtttagaaaccgagctgtttggcgaaaaaatggcgctgccgatcgccctttctcctgtgggtttaaccggtatgtatgcccgccgtggcgaagtgcaagccgcgcaagctgcggaagcgaaaggcattccttttactctttccacggtttcggtctgcccgattgaagaagtggcgccttcgattcatcgtcctatctggttccagctttacgttttaaaagatcgcggctttatgaaaaacgtgttggagcgtgccaaagccgctggcgtgaaaaatctggtgttcaccgtggatatgccagtaccgggcgcccgttaccgcgatatgcattctggtatgagcggtcctaacgctgcgatgcgccgtgtattgcaagccatggcacacccgagctgggcatgggatgtgggtttgcttggtaagccgcatgatttgggcaacatctccaaatatcgtggttcaccgaccaaactggaagactacatcggctggctgggcgcgaactttgacccttccatttcatggaaagacttagagtggatccgtgatttctgggacggcccaatgatcatcaagggcattttggatacggaagatgcaaaagatgcggtgcgttttggcgcagacggcattgtggtgtctaaccacggtggtcgccagttagatggggtgctttctaccgtgcaagcgctacccgcgattgccgatgcggtgaaaggcgacctgaaaattctggtcgattcaggtatccgcaccggtctagacgtggtacgcatgctggcactcggcgcagattgcaccatgctcggccgctcgtttatttacgctctagcagcgcaagggcgcgctggggtagaaaacctgctcgacctgtatgaaaaagagatgcgggttgccatgacactgacaggcgcaaagagcattgccgaactgtcacgcgattcattagtcaaaagataa

SEQ ID NO: 41496 - DNA, 834 bp, Vibrio cholerae
atgcaaatggaatcgcaacgccgtgatgtgttctatgtttctgacggaacggccatcacttgtgaaacgttggggcacgttgtactgggtcagtttgctgtgcaacccaatgaaaaaacctttccgtttgtggaaagtgacgaaaaattgagtgaactgctcaagcagatccaacgttcttatcaattgcacggggtaaaacctttggtgtttttctccatggtgatccccgaaatgcgtacccgtttgctgcaagcgcccgcgcatttttacgatgtgttggagagcatagtgcagcgggtgagtctggatattgagatggagcctgcgcctaagttgcaacgctcgcgcagtgtcggcaaggactcggacacctattttgaccggatcgctgccattgaatacaccttggcacatgatgatggcgtttcgcttaaagacctcgatcgcgcagacatcattttgcttggcgtatcgcgcagcggaaaaacgcccaccagtttgtacatggcgatgcagtttggcctgcgcgtggtgaactacccctttatcgccgaagatatgcatgcgatgcgcctgttgcctgagtttgagtttcatcgtcataaactgtttggtcttaccatcaatgcggagcgtttgactgaaattcgcgaaaaccgcttagccggcagcgaatacgccagcaaccagcagtgccaacaggaacttgccaccgtggaagcgctatttcgccgagaggcgatttcgtacatcaatacgtcctctttgtcggtggaggaaatttccacccggatccttgaacgaacaggcttaaaacgtcgtttattctaa

SEQ ID NO: 41497 - DNA, 576 bp, Vibrio cholerae
gtgcgagtagctgaatttgaccgtgagcaggtgttgcgatccgcgatggatgaatttatgtccaaaggattcaacaaaaccagtatgcaagatttaaaacgcgtgaccggtttacaccccggctcgatttactgcgcgtttgaaaataagcgcggtttgctgattgccgcccttgagcaatacaccaaacaacgcgtctcggaatttaatgcgattttcgccgcacatcccaccatcttagcgggattagagcagtacatggcgatggtcgttgatgagtgtgaacgcgatgagatcaaagattgcttgctgcaaaaagcgctcaatgaactctcttgtcaggatgaagaagtcgaaacgctgatccgcgcaactgtcggtacttggaagcaaggcatgcttgcgcaattacaagaagcacagcagcgcggtgagataaacccagatagtgactgcgtgctactcaccgaatatttggtgatgggcatttatggtttgcgctcgtttgcccacactcggccggaaaagggcttactcaaaaagctcgccgataaactgttggacgcgattcgctga

SEQ ID NO: 41498 - DNA, 615 bp, Vibrio cholerae
atgagtcatatccaatttgccaaccgaaacctatctgtcggtaaagtgctgtgtgtcgggcgtaactatgttgagcatattcaggaactgcacaatagcattccagaacagatggtgctgtttcataagccttcatcagcggttacatcgcagctgcgcgccttccatcaagagcctttgcattatgaagcagagatctgttttctggtcgaaaagggacaatatgtcgcggtgggaattggcctagatttgaccaagcgccaaatgcagagttatctcaagtccaaaggcttgccttgggagcgcgctaaagcgtttgatggcgcagccgtattgagccgatttgttgcgcttgacgggttggatgccgacgatctcaatttggaactgctgatcaacagtgtgcgggtgcaaaaaggccatgtcagccaaatgctttactcgcctcaagcggtattgcaagagctcaaaagctatctgactttggaagatggtgatgtggtgatgactggtacaccacaaggcgttggagaagtacatcaaggcgaccgttttgtgggccgcctgaaatgtggtgaacagaccttgattgaagtggaatggttggctgaataa

SEQ ID NO: 41499 - DNA, 996 bp, Vibrio cholerae
atgaaaaaagcagcaatcgcagtagcagttctttccgcagtggtatctggctcaaccttagccgcaaccgtttatgatgcagaaggcacttcactcaaagtggggggtcgtctggagttccgtggtgatttcaatggcaacgataagggcgaagaaattgaaggcacaatgctcaacaagagccgtgtgcgtttgaatgtggcaggtgaaaccgacattggtgctggcatgaaaggctttggcttctgggaagcagagcaaggcgtaaaatcgtccgcaggaacgtcaacagagcaagaaacgacgttcaaacaacgttatatgtacgtgggtatgaaaggcgattttggtagcctctcctttggccgccaaaacaccgctggcgtgcaaatttctgacatgtctgatatcggtacctttactggcgatcaaaaagccttcgtcagtgcaggtaacgagcagatcaacaacactatcgcgtatggttatgacttcgaaagcttcaagctaaaagcaagctacattgctgatgatcagaaaaatgctgatggctatggcctgtcaggcatctactcagcgccatttggtttggatatcggtttaggttatgccgcgaatgatctgggtacagataaaggttcagcggatcaaatcattgcgggtttgggttacaccatgggtgacctctacttcggggccacttacaccacgggtgataaagatgacaaagcagacacggaatttaccggtatcgaagtctctgcacagtacaaaatcaccaaagaatttcgcctgatcgcggcttaccaaaaccaagaagaagagaccaagaatgtcactaaagacaaagcggatttctttgaactcactggtcgctacgatttcacgaaaaacttccgctcttacctcgcttacaaagcgaacggactggatgacaaagacgcaggctacaaagtcgaagacaccatccgcctaggtctacgttacgatttttaa

SEQ ID NO: 41500 - DNA, 468 bp, Vibrio cholerae
atgagtaacgtcaatatgaaaaagccaatggtgacggatatttttgtcgaaggggcgaagaaaggctgggtaattgcgacgacgtctactgtacccaatgtattgatggcgtttgtgatcatcaaagcgttgcaaattactggcgcgttagatctgatggggacagtattttctcctgtgatggcggtctttggattgccgggtgaagcggctgcggtgttgattggtgcatggatgtcgatgggcggcgctgtgggtgtggtgatcaccttgtttgaccaagggattttgaacggtacgcacatcgcgattttggctcccgctatctatttgatgggttcacaagtgcaatacatcggccgtattcttggcccgattggtactgaagggcgctacatcccagtgatgattggtatttcagtattgaacgcatttggtgcgatgtgggtgatgaacctgtttttataa

SEQ ID NO: 41501 - DNA, 474 bp, Vibrio cholerae
atgagccattttactgactactcatcccccctcgggccaatgaccttacaagcgagctctcaaggcttattaggcgtatggtttgctacccaaacgactcaacctgagcatttgggcgactatgtgaaagaatgtcctatacttaacaaaacgatacgccaactggatgagtatttttcaggtcagcgcactcaattcgagctaccgttggccgccagcggcacggcatttcagcagtcggtttggcacgcactatgcaagatcccttatggggaaatatggagctatcaacaactggcagaagcaataggcaaccctaaggcagtaagagccgttggactcgcgaatggcaagaacccgatttcgatcattgtgccctgccatcgagtcgttggaaaaaatggccaactgaccggatatgcgggtggtttagaacgtaaagccttcctgctggagttggagaaacgaagataa

SEQ ID NO: 41502 - DNA, 801 bp, Vibrio cholerae
atgagacttatcccactgaaagcggcagcacaagttggtaaatgggcggctgcacacattgttaagcgtatcaacgagtttcaaccaacagctgaacgtccttttgtattgggactccctactggtggcacaccactcgcgacttataaagcgctgattgaaatgcataaagcgggtgaagtgagcttcaaacacgtcgtcactttcaacatggatgagtatgttggcctagccgcagaccaccctgagtcttaccgctcattcatgtacaacaacttcttcaatcatattgatatccaagaagaaaatatcaatctgctgaacggtaataccgatgatcacgaagcagaatgcaagcgctacgaagacaaaatcaaatcttacggtaagatcaacctgttcatgggtggtgtaggtaacgatggccacatcgcctttaatgaaccagcgtcttctctctcttcacgcactcgtatcaaaaccctgacggaagatactcgtatcgctaactcacgtttctttgatggtgatatcaatcaagtgcctaagtatgcactgactatcggtgtcggcactctgctggatgcacaagagatcatgattctagtcactggccacaacaaggcactggcactacaagcagcggttgaagggagtgtaaaccacctatggactgtctctgcactgcaactacaccctaaagcggtgatcgtgtgtgacgagccatcaacccaagagctgaaagtgaaaaccgttaaatatttcactgagttagaagccaaaaacatcgtaggcttctaa

SEQ ID NO: 41503 - DNA, 1251 bp, Vibrio cholerae
atggagttaacgatgaaaaaagtaagtgtaattgctgccgcagtggccgcgacgctcgcagctggttctgctttcgctgtcgatttcaatggctacttccgcgctggtactggaattagtggtaacggtaatgctgaccaggctgtaaacaaagcaggaacaggtcgtcttggtaacgaaaacgacaactactatgagtttgggtttgctgaagaactgaaaaccggtgaacagacgtggaaagtcgagtcaatgattgcgcaaggcaatagcggcgcaaatggttgggaagatggcgattttaacgtagcacagttcaacgttcaggctaaaggcttacttgcttctgaccaagaagcagtaatgtgggcgggtaaacgctactaccaacgtaaagacattcacattactgacttctacttcctaaacacatcgggcactggtggtggtattgaaaacctttctgtgggtaatcaaaaactctctgttgctttggttcaagatggcgataatacgaattcttcaggttacatctttgatgctcgtctagcgaatattggtctatgggaaaacgcatctcttgaactggcaatggcctacaactttgccactgagaaagacagtaaaaatgaagtcgctgatgatggtgttctagtttcggctattttacatcaaggcctgagcaatggttttaaccaaactgtattccaatatggtacagcgggttatggcgctcaagctgctaatttttggggtgctggttcttactatgcacgaggaaccgaggcatttaatgatgcgtcaggtttccgtttattaaactggggtgtaattaacctaggcgaaaattgggaaatgggacatcaattagcttacttagcaggtagtgatattggtggtcagtttggcggtgatggcgctaataaaaatacttatacaggtaagagcttcgatattgatcaatattctgtagtagtacgtccaatgtataagtggaatgacaccatgcgcactgtgtttgaagcgggatacaatgctggtgagaaaatttctaacggtggtttagctacggaagattttggcaatgctaaattcacagtagcacaagcttgggctatgggagacagcttctgggcacgtcctgaactgcgtgtctacggtacttatcttctagatactgaaaatgacaaagcgtttggcgatgatgatactgagtttgtagtgggtatccaagttgaagcttggtggtaa

SEQ ID NO: 41504 - DNA, 801 bp, Vibrio cholerae
ttgatgataaaacgctttttccgccctctgctgtttgccgccctgcaaatgatgttagtgtttgccggattggtctggctactcgattccggcgcagaggcgatgggctatacatggcagtggcatcgcgtgcctgagtatgtgttgatttttgaagacggcgaatggtgggcaggtgatttactgcacggcctgttggtcacattgcagctcactgggatcagtttgattttcactttggctttgggtttaaccaccgctttgctgcgtcagtcacgttcactggtcgggcgagctttaggcaccggatacatcgcggtagttcgcaacacgccgcttttggtgcaaatttacctcctctactttgtgtttggccccgtcattgggctcgaccgctttgccaccgcggtgcttgccctcgctctgtttcaaggagcgtataccgcagaggtatttcgcggcgggttaaacagcattccgcaaggccagtatgaagcggcacgctcgctaggcttatcgcgcttttttaccttttacgatgtgatcctaccgcaacttctgcaacgtacattacctccactgaccaatgagatggtgtcgctgattaaaaactcgtctattgtcagtgtgatggcgatttttgatctcaccactcagggacgaaatatcgtctcggaaaccgcgatgccgtttgagatctggttcagcgtcgcggcgatctatctgttgttaaccctgactctatcagcgttatcagcttggctagaacataaactgggcgcgcagtggcgctcaccataa

SEQ ID NO: 41505 - DNA, 837 bp, Vibrio cholerae
atgcaattattcggacaacgtttaggtcgattcagcgttaaaaccttacttacgggcttgttgggtctggctttcactttgccagcagtggcgagcgacacacccaatcttgatgcgattaaagagcgtggcacgctgcgcgtgggtatgtcgacctttgtgccttgggcaatgcgcgataagcagggtgagctgattggctttgagattgatgtcgctaaacgcttagccgccgactcaggttggcaagtggaatttgtgccgaccgcatgggatggcattattcccgctctgctggccaaaaaatttgatgtgatcattggcggaatgtcggtcacgcctgagcgttcaaaaagtgtgctgtttactgcaccctactcacactctggtgtgcaactcgctgccaataaaaagctcgcggaaggttttactcagctcgaagactttaataagcgcaacgtaaaaatcgcggctcgccgaggtgcttttaccgtgcaagtggcgcgtgaaaccttcccgaaagccagcgtgctgcaatttgatgacgatgcccaagctttccaagaagtaatcaacggcaacgcgcatgcggtgattgcttcaagcccaaaacccgagcatgaaagcatcaaacacagtgattcgctgttccttcctttcagtgagcgtttaagtaaaggcaatgaagcgtttgcagtgcgtttaggggaagaagataagaaagccttttttgatcaatggattgcggaccgcactgctgatggctggctgcaagcgcgttacgaatactggttctccactttagattggcaggatcagatcgcctcaggtcagtaa

SEQ ID NO: 41506 - DNA, 1704 bp, Vibrio cholerae
atgaattcacaagtcacacactggttggccagagatccggatcctaagactcgtcaagaactgcaacagttgatcgatactcagcaagacgcgcagattgccgagcgctttcaatcacgccttgaatttggtactgcgggtttgcgtggcaaagtcggctgtggccctaaccgaatgaaccgtttagtgatccaagaaacggcggcgggtctggggcattacttgattgctcaattacccgatgccaaaagccgcggcgtagtgattggttacgatggccgcccagattcaaagcagtttgctcacgataccgcaagcgtgctgacttcactcggcatcaaaacctatttgacctaccaagtcgcggcgacccctatcgtggctttcggcgtacgccatttcaatgcggccgccgcagttgtagtaaccgcaagccacaacccgccggaatacaacggatttaaagtgtattgggaaaacggcgcgcaaattattccgccgcatgatgcaggtattgcggcttgtattgaccaagcggcgcagcaagcgatcccttacctcgcccttgaacaggctgagcaacaaggcctgctgcattggctgcgtgatgagtattaccaaacttaccgtaaaacgattggtgcaagcccactcttgcagcatcacactaagccgcaagcgctaagcttggcttacaccgcgatgcatggcgtgggtgccaatatggcagaaaccttactcgccgatgtcggttttactcacgtcagcagcgtgaaggaacagcgcgagccggatggcacattcccaaccgtcaacttcccgaaccctgaagaagcgggcgcgatggatatggtgatggcactggccaaaaaagtcggcgctcagcttgcttgtgcgaatgatcccgatgcggatcgctttgcggttgccgcgcgtaaagccgatggcgaatatcaaatgctgaccggcgatcaagtcggctcactgtttggtcactatctgctctcgcaaaccgatgctcatcgtcaactggtcggcaacactatcgtctcttccagcttgctcagcaaaatcgccgcagctcatggcgcgcgttattaccaaaccctcactggtttcaaatggttgaccaacgtggcgatgcaagagcaaaccgagcagcaccaattcctgttcgcttatgaagaagccttgggatacaccattggtagcacagtgtgggataaggatggcttgtctgctctggttgcgtttgctcaactggcggcagagctgaatgcgcaaggcaaaacggtatgggatcagcttgaagccctgtatcgccagcatggcctgcacgtgaatgcgcagcgcagcattgcgctggatccgaactcgccaccggtgggtgataaattgcgtgccacgccaccaaaggacattgcaggacgtaaagtgctcatcgtggaagattttaaactggcacgccgcacctttgccgatgacaaaaccgaaacgattaccctgccaaccagtgatgtgctcatttaccatctggacggtggcgctcgcgtgattgtgcgcccatcgggtactgaacctaagctcaagtgctactacgaggtagtgacgccgtttgcggctggggaagattttgtgagcgcgcaagagcgggccgatgagcagatgtcgctgctgattgcagagcatcaaaccagcttgtaa

SEQ ID NO: 41507 - DNA, 945 bp, Vibrio cholerae
atgaaagaaagaatgattgtttctgtttcctctatccgtggaactcagcatttttatttaggaaaagtatttcgcttcgctctcaaaagtatggggtacatcatattagtgggggggggtactactattggcgtaattttttatctaaaaaaccaagttgattttgccaaactcaaacagaaagagctggaaagtcagtcagtgtttttactggaagaggtttcttcacttagtgagctaaaagaaaaccttgaaagtgatttagcggtacacgaagagaggagccagatagtatctgagcgcctcggtgatttagagaaagtgcttggtgtaaatgaaaccgattcagaactggaatctcgtttagattatgcagcacttacttcctcactacgaatattaatgttggcacaaattccaagtggttctccggtactgggggcgcgcacttcttccggctacggtaagcgtatacatccagtaacgggtcaactaaaaatacaccgagggcaagattttgcggtcaatataggtacccccatttatgctactgcagatggcgtggtagaagtaactcgtataagcaaaactggatcaagggtaattttattcgcgtgttacatggcgtatggattcagtagttcgtattcacatttacataaatttgttgtgaaaaatggtgattttgtgaaaaaaggtgacttattggcttactctggcaatagtgggttgtcgtcaggccctcatttacattatgagattcgttttattggtaggccattagatccgaggccttttgtcgattgggaaatcaataattttgaaactatatttactaaagtaagaggaataagatgggaatatttagtaaacaacgccgagcaaagagtcagctctcagctacaactctcatcgcaaaaggaagccatttttccggagagttaa

SEQ ID NO: 41508 - DNA, 1155 bp, Vibrio cholerae
atgaaaaagaatgcagttcattttggtgctggcaacattggccgtggctttattggcaaacttctggcggatgccgacattgccgtcaccttcgccgatgtcaacgaaccccttgtggatcaactgagtcatcaacaagaatacaaagtcaaagtggtcggtagcgaatgcaaaatggaaaccgttagccacgtcaccgccgtcaacagtgctagtgaagccttgatcgagcggattatcaaaaccgatttagtcaccacggcggttgggccaacagtgctggatatcattgccaaaaccatcgccaagggtttgagcgctcgctttgccgcaggtaatacgcaaccactcaacatcatcgcctgtgagaatatggtgcgcggtacgactcaccttaagcagcaggtgtatcaattcctcactaccgaggaacaacaacaagctgatgctttagtgggctttgtggattccgcagtcgatcgcattgtgccaccgttgcaagcagctaacgacgatccgttggaagtgaccgtagaaagcttcagcgaatggattgtggatgagcagcagtttaaaggcgagatcccacagattgagggaatggagaaaaccgataacctgatggcgtttgtcgaacgcaaactgtttaccctcaacacgggtcactgtgtgacggcttatctgggctgtttaaaaggtcaccgtaccatccgtgaagcgattgaagatccgtgcattcatgcacaggtgaaacaagcgatgcaagagagcggcgaagtgctgatccgccgctatggttttgatcgcgccctgcacagcgcctacatcgagaaaatcctaagccgctttgccaatccttatctggtggatgaagtggatcgcgttggtcgtcagccgctgagaaaacttagcgcaaatgatagattaatcaaacctttactcggtacaattgagtacggcttaccaaacggcatgttattgaaagggattgccgcagcgctgaaatatcgcaatagcagtgatccccaagccgtcgaattacaacaaagtattgaaaaagaaggtgttcgctctacacttgcccgctataccgggttagccgccgaaagtgtggaagcacaacaaattgaagctctctaccaacagatggattga

SEQ ID NO: 41509 - DNA, 582 bp, Vibrio cholerae
atgtcgagagctgtcactcgctctcgacttaactcaacaacagatcagtttatggcagaaaaaattaacgaatccgacattctggagcgcttgaatcagacccacacggtacgaggattcttcattacaacggttgatgtgctaaccgaagccattgatgcactgatgcaacgtattttccgtaaagacaatttcgcggtgaaatccgtagttgaaccactcttgcacgatacaggaccgctgggtgacctaacggttcgcctgaaacttttatttggtttgggcgtgatcccagatgaggttttccacgatattgaacacttaatcaaactgcgcaatcagctcaatcatgatgcaaccgagtaccaattcaccgacccgcaaattctcgcgccaatcaaagcactcaatctggtcaaaaaaatgggcatgttgcatttaaacgtcgtggagccagacgacgatattgacctcagcttttaccacctgcaattgcaacgccaacagcaagtgatcaaatctggtctctctctggccatcattcaaatttgtaatgcactcaacaaagacagcccgttttaa

SEQ ID NO: 41510 - DNA, 936 bp, Vibrio cholerae
atgaaaatcgctatgattggtctgggagatattgcccagaaagcttatcttcccgtattggctcaatggccagatattgaattggtgctctgcacccgaaatccgaaagtattggggactctagcgacgcgttaccgagtcagcgcgacgtgcaccgactaccgtgatgtgttgcagtatggtgtggatgcagtgatgatccatgcggcgaccgatgtacacagcacacttgcggcgttttttctgcatctagggatcccaacttttgtcgataaaccactcgccgcgagcgcgcaagagtgtgaaaacttgtatgagttagcggagaaacatcaccaaccactttatgtcgggtttaaccgacgtcatatcccgctctacaaccaacatttgtccgagctggctcaacaagagtgtggggcgctgcgttcactgcgttgggaaaaacatcgccatgccctgcccggcgatattcgcacctttgtgttcgatgatttcattcatcctctagatagcgtcaacctttcgcgtcagtgcaatttagatgacctccatctcacctatcacatgagtgaaggactcctcgcccgccttgatgttcaatggcaaacgggcgataccttattgcacgcttcgatgaaccgtcagtttgggataaccacagagcatgtcacggccagttatgacaatgtggcttatctgtttgattcctttactcaaggaaaaatgtggcgagataaccaagaaagtcgagtggccttaaaagattggacaccgatgctcgccagtaaaggctttgacgctatggtgcaagattggttgcaagttgcagcagcaggcaaactacccactcatatcattgaacgtaacttagccagtcaccaactggctgaagcgatttgccagcagatcactcaacaggtaaccaagggctaa

SEQ ID NO: 41511 - DNA, 2115 bp, Vibrio cholerae
atgcaagatacgttactcaattcgctggtgtacgtaagccgttattatggtttagcgaattctcctgaagcactgatcaacggcttaccgttggctgacggcaagctcacgccttttctgtttcctcgctcggcggaaagagctgggctgatcgcaaaagaaaaccgcgcgccgttagaccaaattcctcatctggtgtttcctgtggtattgctgctcaaaggcggtgaggcctgcgtactcaatagcatcaatcaggaaacgcaagaggctgaaattgttaccgcagagtcggggttagtccccgtcgcttactcgctcagtgatttagaagcgatgtatattggccgttactttatggtcaaaaagcagtttcgctttgatgaacgctcaccagaagtcctgaaacccagagatgggcactggttttggagcaccatctataaatccaagcatatttatcgcgatgtgttgatagcgtcactgctgattaacttgtttgccgttgcagcgccgatgttttcacggattgtgtacgacaaagtcgtccccaatttggcttttgaaaccttgtgggtgctctctagcggcatcttagtgatctttttgttcgatttcgtatttaaaatgctgcgcagctacttcattgatgtcgcaggaaaaaaatcggacattctgatctcttccaaactgtttagtaaagtgatgggcatccgcatggaggctcgcccaccttcggttggtgcttttgctcgccatttgcaagagtttgaatcgattcgtgaattttttacatccgcgacgatttcttcactgattgatctgccattcgccctgctctttttagtgttgatctggttaatggctggacatttggtgtgggtgcctgtgatcggtgtcctgattttggtgatttactcatttctcattcaaagccgcttaaaacgggcaattgaagaaggctcaagactcgcctcacaaaagtacgccaacctcatcgaaagcttagcaggactagaaacggtgaagctgtttggcgcgcaaggacaattccagtaccgctgggaagaagccgtagcgcacatggcgaattggaacattaaaagtcgccgcatcaccgatagtattcaaaacaccgccggttttgtgcagcaagcagccaatatcggcatgatcattgtcggggtctacctgatttccaacggtgacctgaccatgggtggactgattgccgcaacgatgctcagtggccgtgcgattggccccttagtacagctctcactgctttcaacccgttacaaccaagccaaatcttctatgactatcattgaacaagtgatgtcgatgcctgatgaacaggaggaaggcaaacgctatatccatcgtcccatcattcaaggcaagattgagctggaccgcgtgactttccattatccaaattcacctatcgcctccgtccgtgatttaagtcttaccatccatccgggtgaaaaagtggcgattattggtagaattggttcgggtaaaaccacgcttgagcgcttgatcatgggcctgtacaagccaactgaagggcatgtgcgaattgatgatacggatatctcgcagctgcatcacatcgatattcgccgcaatattggctgtgtaccgcaagacagtgtgctgttttatggctcgatccgcgacaacattacgctcggtcgcccactttccgatgatcgtgaggtaatggatgcggccaaccgagcgggtgttacggtctttactcaacaagatcctgcggggctagaacgtcaagtgggtgaagggggtatgctgctctcgggtggtcaacgtcaatctgtgtcgattgcgcgcgctttccttggccgccctcccgtcttactgatggatgaacccaccagcgcgatggataaccgctcagaaatgcacattaagcaacaacttagccaactcaagccaagtgagacgctgatccttatcacccacaaaacctcgatgctggatgtggttgatcgcgttattgtgatggagaaaggctgcattattgccgatggtccaaagcacgaagtgctgaacgatctgcgccaaggtaatgtacgcgcagtgcaatag

SEQ ID NO: 41512 - DNA, 462 bp, Vibrio cholerae
atgatgcagcgtgaatttctcagtttcgttttagatgatgaagagtacggcatcccgattctggaagtgcgtgaagtgcgtggatggagtcctgtgcgcatcctgcctaatgcgccaccgtttgtgattggcttgttggatattcgtggcgagtacattccgattgtcgatctgaagcgtcgcttaggcttagtaccggttgaaattaacgccaccacagtggtggtggtgattaatgcggcgaatcagcagccgttggggctgattgtggatgcggtcgctgaggtgtatgccttgtctgagcaagagatcaaacatgcgcccagtatttccactgtgatcggcaaccaatacgtgaaaggaattgcggcagtgaaaagcaaacatcttgttcttattgatattgatgcgctgttcgacgttgaggcgctgcgcttaagcaccactgccgaaagcatataa

SEQ ID NO: 41513 - DNA, 1566 bp, Vibrio cholerae
ttgttatgttataacattttaattaaggacattttgatgaaaaaaaggttgttcggtttgattttagcgctaggaggtgcagggatttggttgacgaaaacggagcctgcaccgagttcgctggagatttcaggcccctttgagtttaacagccaagatttagccaaggacggattcctgttttcgcgtctacaagtggttgaatccttggttggcatcaatgagaactcacaaccataccctttgctggcaaaaagctggacggtaagtgatgatggattagtgtggcgtttccaaatacgtcctgaagtacaatttcacgatggcagccaattgacggcacaagcggcggcgacggctcttaatcatgcgctaggtaagccgggagtaataaaacaagtaccgatcaaggcgattaccgcgcaaaacgatcaagtggtgattgaacttaacactgtctatcgcccgctcgcagcggtgcttgctcactactcgctcgcgattgcctcccccagctcttatgatgccagtggtaacgtgattcggctcttaggcacggggccttatcaaatcgcacagttgcaagcgcctcataaagccagtgttatccgctttaacgcttattggggtaaacccgccagtatcgaaaccatcaattatctggcaggccatcgctcagaaagccgcgctttgttagcacaaactgggcaagccgatctggtctacacccttgaccctattagcattccgagtttacaacagagccacaatctggatctctacattgagtcgatgccgcgtacagttctgatcaaactcaataacgaacaccctttgcttaatcacgccgatgttcgtcaagcaatcagtttggcaatcaatcgtgaaggtattgctcaatcggtacttaagttaccgggatcagaagcgcatcaactcttttctcccgcactcggagcttggcacttagcagacaaaacacagccgcagcgtcatttagcgaccgcgcaaaccctgctagccaatcaaggctggacgctcaatgaccaaggtttactggagcgagaaggccaagcgttccgagttcaattgctgacttatgctgatcgccctgaactacctttgatcgccaccgcgctacaagcccagctcaaagagattggtattcaagtggatattgcgatcgataactcaagtgccatccccgccaaacatcatgatggcaccctagaaatggccttgattgcccgcaacttcggtactattgccgatcctctgccactgcttttgagtgattttgcaacgcatcaaggatcggattggggcccaaccaattggtcatcacctcagtttagccaactgctggctgagctttcgaccgaatcagacaatgcgcgttatcagcaattggccgcccaagcctctcaattactggccgatgagatgccgctcatccctgtgacttattaccgccagattgtgtcggtcaataaacgagtcgctggattttcgtttgatccctttgaaattaactaccgcgtcgcgcagatgagtttcaatgactaa

SEQ ID NO: 41514 - DNA, 2127 bp, Vibrio cholerae
atgtttcctccttcttacgatgcctttcaaggcgttacagcgatcggttgggcttgtgctaacatggcgcatcattttggaatatcgctcgttatgactcagccaatcacctatttattgcaacttcagcagctcgccaagcaaggacagactcgctttggctgttggctgcgtggtgatgcacagtggcagcatcacttattgaaaacacttgttccgcactttgccgaacaaccgatattgatgttaggacaaactgagctagagggtgtgacttgtgtcgactatcgccaaggtcagcaatggttagggcgagaatgccaactcctgatcgtagatttaacgcaaggttgggatgccaatagctttaatgcggtgctgggtaccttggtgggcggcggattactgttggtggttggcgaaccgactacgctcaaccattgtgcgcgagtctggctagagcgcgcttgtcatcgcttgcttgtgattacgccacaaacggtgccggctttacccaattcggattcggttacgcgaacgaataccgaacaaacttataccgaacaaagattggcgatcgacagcatcattaaagtcgtgactgggcatcgcaagcgtcctttagtgctgactgccgatcgcgggcgtggaaaaaccagcgcactgggattggcggccgcagagctgatgtcatcgcgctctatgcatattgtggtgactgcacctactttggctgccgtggagccgctgtttgtgcatgcccagcgcacattaccgcaagcccatcgccagcgcggtgaggtgcaaacggcacagtcaagcttacgttttatggctccggatgagctactgcgcactcaacctgagagtgatttattgctggtcgacgaagccgctgcgctgccgttgccatttttaaaacgttgggtggagcgctatcaccgcgcagtattttcttcgaccattcatggctacgaagggtgtgggcgcggtttttctctaaaatttcagagttggttgcaagtacagcgcccgcagatgcgctcactgcatcttgagcagccgatccgctgggcggcgggggatgcgctggaacagtggcaaaatcaggtatttcttctacaaagtgagttgcctgaagttgccctagagcaggcgagagaaccgctgtctttttctttattcagtcagcctgagtgtgtggagcaacctgagcgattagcacaagtgtttgcacttttggtcaatgcgcattatcaaacctcgcccaacgatctctttgctttactgcaagatgaagcgatgacgttgttcgtcgcttatcaaggagaggtgtgcgtcggttgcgttttggcggtccgtgaaggggagttagacgcgccgacgattgaggcgattcaactgggaacgcggcgtccgaaagggcatttaacccccgtgactttggcgaatcaattaggaattagccaagcggcgcgccaatcttgttggcgaatattacgcattgccgtccatcccgactgccaacgccaaggtataggtagccaattgttgacccattttattgcgcagcatcacgcggattattacgccaccagcttcggggtgagtgaagatttgttgccattttggctagctaaccacttcgtaccaataaaactcggttcgcatcgagatcaggcgagtggttgttactctctcttgatggtgcgcggagagcatctcgattggttggagcaagccaaacagcagtttagtgcgcattggatttttgaactcagtgattctctacaagcgttggagccacaaatcatccaacagcttttacctagcactgtcgcattgcctcaacctctgatccctttagaattgatcgagcgttacgcgcgaggtggagcaaattacgaaagcgtggcggtgtggctttatgcttggctactggcaacggctccatcactagagagcctatcccctttgttgatcagtaaaattctgcagcgtaaaagttgggcggcctgtgccgagcagtttcagttaagtgggaagcggcaagtcgagcaagcggtgcgaacggaaatcttggctttgcttgtgaatttacagtgtaaatatactttacctatttga

SEQ ID NO: 41515 - DNA, 1032 bp, Vibrio cholerae
atgaaaactttcattaaaggattggtactttctgcagtcgttgcctcttctcaggtttatgcagagcaaaccctaaacgtgtatgcgtggggtggctatctgccagagaagtcgctgaaagcttttgaacaacaagaaggcgttactattaactattcaacctttgagaataatgagtcaatgtataccaaactcaaacttctgaaaggcactggttacgatgtcgtgtttgcgtccgcttattttatcgaaaagatgggccgtgaagggctactggcagaaatcgatcataaccaaatcccgaacatgaaagatgcaatgccaaccgtattaggactggcgcacgatcctcaaaacaaattctcactcccttacatttgggggattacgggtctttactacaactcgtctaccctgcctaacggaatcacaaaatgggcagatctgtgggataagcaatacgaacagcaagtcatgctgattgacgatatccgcgacgtgtttggtatggctctaaagcttaacggctttagcatcaacaccaaaaatgaagaggaaatcaagaaagcgtacgaatctctggtggcactgaagaaaaacgtattgctgtataactcagatgcgccacacgtgccttacgtttctggcgaagccacactgggcatgcagtggaacggcaacgcttaccaaggccaagtggaaatgcctgagctgaaattcgttatgccagaagaaggcgcggtactgtggatggataacttcaccattccttcaggcagcaagaacattccgttggcgcacaagtttattaactttatgtaccaaccagaaaaccaagctgagattgtacaaagcttaggttatgcctctgccaccaaaggcggtcgagcgctgctaccggcagaactgcgtgataacccgactatcttcccatcggatgaagatatgaaaaaaggcgagttcattaacgatgtcggcccagaaacgctggcgatttatgaaaagtactggcagcgcctaagaaaccaataa

SEQ ID NO: 41516 - DNA, 825 bp, Yersinia pestis
atgtctgcatcaggagaaatctctactccaagggactacataggtcaccacctgaatcaccttcagttggacctgcgtacctttgagttggtcaatccccactcaactggccctgcaacgttctggacgttgaacattgactctttgttcttctctgtcgtgctggggttagcttttctgcttgtgttccgcaaagttgctgcaagcgccaccagtggcgtacccggtaaattgcagactgctgtagagttaattatcggttttgtcgataacagtgtgcgggatatgtatcacggcaaaagtaaagtcatcgcaccattagccctaacagtctttgtttgggttttattgatgaacatgatggatttactgccaatcgatttactgccttacatcggtgaacatgtctttgggttaccagcactgcgtgtggtacctacagctgacgtgagcattacgttgtctatggcattgggtgttttcatcctgattattttctatagcattaaaatgaaaggtgtaggcggcttcacaaaagaattaactatgcagccgttcaatcacccgatattcattccagtaaacttaattctggaaggtgtcagcctgctgtccaaaccgctttcattgggtctgcgactgttcggcaacatgtatgcgggtgagttgatcttcatcctgattgcgggtctgttgccgtggtggtcacagtggatgctcagtgttccttgggctatattccacatcctgatcattacgttacaagcctttatcttcatggttctgacgattgtctatctctcgatggcatccgaagagcactga

SEQ ID NO: 41517 - DNA, 2451 bp, Yersinia pestis
atgaaagagaccaacgaatcccggctgttaacgacaggtgtcacccgccgaaaactggtccaaaccacgcttgtcggcggactggctatggcaaccggggcgttttcgttaccgttctcccgtaccgcacgagccgttcaatccgcactcaaccccacctcagccaacgacggtaaagtgatctggagcgcctgcaccgttaactgcggcagccgctgcccgctgcgtatgcatgtggctgatggcgaaataaaatatgtcgaaacggataacaccggcgatgatgattttgaggggctacaccaggtacgcgcctgtctgcgagggcggtctatgcgccgccgggtctataacccagaccgcttaaaatacccgatgaaacgaatcggtgcccgtggtgaagggaaattcaaacgtatctcgtgggaagaggcattcgagactatcgctggcagcatgcagaatattatcaaggaatatggcaatgaagccatttacctgaattacggtaccggcacgataggcggcaccatgacccgctcttggccgccgggcgcgacgctcttggctcgcttgatgaattgctgcggtggctacctcaaccagtatggtgattacagtaccgcacagattgccgcgggactcaattatacctacggtggctgggctgacggtaacagcccgtccgatatcgaaaacagtaagctggtggtgttgttcggtaataacccggctgaaacccggatgagtggcggtggggtcacctattatctggagcaggcacgagagaaatccaatgccaaaatgatcgtgattgacccccgttataccgacaccgcagcaggccgtgaagatgaatggatcccactacgaccaggcactgatgccgcattggcctctgcgttagcttatgtgatgatcactgaaaatctggtggatcaacccttccttgaccaatattgcgttggttatgacgagaagacgctaccagaaggcgcacccgaaaatagtcactacaaagcctatattttagggcagggcgcagataaaaccgccaaaaccccacaatgggcagcggctatcaccggtattcccgccgcaaaaatcattacgctaggccgtgaaatagggtcagtgaagccggcttatatttcccaaggttgggggccacaacgtcattccaacggcgaaaacaccagccgagccattgccatgttggcaatcttgaccggtaatgtcggtattaatggcggtaactccggtgctcgtgaaggctcctacagcctgccgtttgtccgtatgcctacctttgaaaacccagtcaaaaccagtatctctatgttcttgtggaccgatgccattgagcgtggacctgaaatgaccgccacccgtgatggggttcaggggaaagataagctggatgtcccgatcaaatttatttggaactacgccagtaactgtttggtgaatcaacattctgaaatcaatcgcacccatgacattctgcaagacgataagaaatgcgaaatgattgtggtcattgataaccacatgacctcgtcggctgaatatgccgatattatcctgccagactgtaccgcttccgagcagatggacttctgtctggatgcctccagcggcaatatggcctatgtcatttttgctgatcaggtgattaaaccgcgttttgagtgcaaaaatatttatgacatcaccagtggattggcaagacacatgggggtcgagcagaagtttaccgaagggcgaacgcaagaagagtggatgcgccacctctatcagcaatcgcaagctgcaatccctgaactgccttctttcgaggatttccgcgctcagggcatgtttaaaaaacgagacccggcaggccatcacgttgcctatcacgatttccgcaccgatccggttgctaacccactgagtaccccatcaggcaaaattgagatctattctgcggcgctggccgagattgccgcgacttgggaactgcaaaaagatgatgttatcgatccgttgcccgtgtatgccgccggttttgaaagccatgttgatccactgattgaacagtatccgttgcaattaaccggcttccactacaaggccagaacccactccacctacggtaacgtagatgtgttgaaagcctcctgtcttcaggagatgtggattaacccgatggatgctgaacggcgagggatcagcaatggcgatatggtgcggatcttcaatggccgtggtgaagtacagattaatgccaaagtcactccgcgcatgatgccgggggttgtcgctttgggtgagggggcgtggtacagccccgatgcgaagcgtattgatcgggcgggcagtatcaacgtattgaccacccagcgcccctccccgttggcgaaagggaacccatcccacaccaacctcgttcaagtcgccaaggcataa

SEQ ID NO: 41518 - DNA, 621 bp, Yersinia pestis
gtgttaaaaaaattagactctctgcttaccgttgctggtattacgttacccgatcagcaaaaacatcagttgattggctatgtagagctgctagacaagtggaataaagcttataacctgacatctgttcgtgatccacagcaaatgttagtgcgtcatatccttgatagcattgtggttaatccccatctgcaaggcagccgatttattgatgtcggaaccgggccaggtcttcctggtatccctttggctattgtgcgccctgatgcacattttactttgttggatagcctgggtaagcgggttcgctttctacgtcaggtgcaacacgaactggggttaaataacattgagccggttcagagcagagttgaggcatttacctcagaaccgccatttgatggtgtgataagccgtgcatttgcatccttacaagatatgctctcgtggtgtcaccacttgccagctaagcctgaagggcgtttttatgcgcttaaaggggttcggcctgatgatgagttagcggttctgcccgaagatattgttcttgagtcggtgataaaactggatgttcccgaattggatggagagcggcatttgattattcttaagtcaaactaa

SEQ ID NO: 41519 - DNA, 1890 bp, Yersinia pestis
atgttttatccagatcaatttgacgtcatcatcatcggtggtggccatgcaggcaccgaagccgccatggccgcggcacgcatgggacgtcagaccttattgctgacgcacaatatcgatactctggggcaaatgtcttgtaacccagcaatcggcggtatcggcaaggggcacttggtcaaagaaattgatgctctgggtggcctgatggcgaaagcaacagacctcgcggggatccagtttaggatactaaacgccagcaaagggcctgcggtaagagcaacccgcgctcaggctgaccgtgttctgtatcgtttagcggtacgaacggcattggagaatcaacctaacttgatgatcttccagcaacctgttgaagatctcattgttgaaaatgatcgtgtcgttggcgcagtcacacaaatgggtctgaaattccgtgccaaagcggtggtgctaactgttggtaccttccttgatggcaaaatacatattgggctagaaaattacagtggtggccgtgccggtgatcccccttcgatctcattatcacaacgcttacgtgaactgcctttgcgagtaaatcgccttaaaacgggcactccaccacgtatcgatgcgcgaactatcgactttagccaattaacacctcagttgggtgatacgccaattccagtattctctttcttgggaaatgctgaacaacatcctgaacaaatggcttgtcatatcacctacaccaatgaaaaaacacatgaagtgatccgcaataacctggatcgcagcccaatgtatgcagggatcatcgaagggatcggcccacgttactgcccatcgatcgaagataaagtcatgcgttttgctgatcgtaattcacatcagatcttcctcgaaccagaggggctaaccagtaacgagatctatccgaacggcatttctaccagtttgcctttcgatgtacagatgcaaattgtccgctcaatgaaagggttggaaaatgcacgtattattcgtcccggctatgctatcgaatatgatttctttgatcctcgcgatttaaaaccgactctggaaagtaaatatattcaaggcttgttctttgcgggacaaatcaatggcacaacgggctacgaggaagctgcggctcaagggctgcttgcagggcttaatgcgggccgttttgccaacgaggaggacggatggtcacctcggcgtgatgaagcttaccttggcgtgctggtggacgatttaagcactctcggcactaaagaaccgtaccgtatgtttacctccagagctgaataccgtttgatgctgcgtgaagataacgctgatctacgcctgactgaaacaggccgcaaattgggattagtggatgatatccggtgggcacatttcagccaaaaagttgaacaaattgaaaaagagcgccaacggctgcgtgatatctgggtgcacccgcattctgagaatgtttcagagataaatgcgctgctgaaagcacctttgtccaaagaagccaacggagaagagctactgcgtcggcctgaaatagactatcgtttgttgacctctttgacatcatttggcccagcgttgactgatccacaatcggctgatcaagttgaaattcaagtcaaatatgaagggtatattactcgtcagcaggaagagatcgaaaaacaactacgcaacgaaaataccttattgcccgttgatctcgattatcagcaagtctcaggtttgtcgaatgaagtcattgccaaattgaatgaccataaacccagttcaattggtcaggcatcccgaatttcaggtattacccccgcggcaatatctatcttactggtttggctgaaaaaacaaggattgttgcgccgcagtgcgtga

SEQ ID NO: 41520 - DNA, 390 bp, Yersinia pestis
atgcgtgacattcaacttgttcttgaacgctggggtgcatgggtggctgataatagagaagatgtctattggcccccaatcgcagccggattttctggactgataccatcaaaagtaaaaagccgaactcaatgttgtgacgaggatgggctaattatttcgggcattatggctggattaaacagtaagcatccagtcgttcatagcttgttgtttgattattacgtatttggcaaaacatttatgcagctatcgaaagagcatcactgctctgatactcacattggcaaaaagctacagaacgccgaaggggttattgacggctacctgatggcattagaagtaaagctcgaaatggataaacaagtcaggcgggagttagcagcttga

SEQ ID NO: 41521 - DNA, 459 bp, Yersinia pestis
atgcctggaaagttaactactgccctcattgctgtaattgccgccctgcttgttggtgtgacttattatcagaacgaggcggcaaaacttcagcgtgatgtagtagaaatagcatcagtggctaatcagcagaagaaagaccttcagctaatcgaagcccagcgccaagccgtagccgctatcgatatcaaaaccaccaaggaattagcagatgtcaaatctgaaaacgagcgcctgcgcactgatatcgcttctggcactaagcggttgcaactcaacgccacatgttcaaaaccagcgcccaaaaccaccggccccgccagcgtccctgatgatgccagcgccagacttactaacgccgctgaacgggattatctcagtctccgcgagcgtatcggaattgccacaagccaaataagcggcttacaggactacatcactaacgtgtgcctgaagtaa

SEQ ID NO: 41522 - DNA, 1197 bp, Yersinia pestis
atggcagataacgcctcacaaaataaatcgctacatagagtggccttcaaaggcgaaggtggcgagtatttctctatctggttagttaatttattactaacgataattacactgggtgtttattctgcctgggctaccgtacgtcgtcgccgttacttttatggcaatactgagctaaacggtgatcgttttgattatcacgcagagccaatcgagatccttaaagggcgcttgatggttattggtggtgtgattttattctatatattattagcaattgccccaacacttggccttttggttgcactggtgttgctggcattgattccatggattattatccgtagctggcgctacaatgccattatgaccagctatcgtggtgttcgttttaattatcactgccagactggacaggcttattgggcgttactgttttgcccactgctgttaattctggggctctatgccgttataatcgtcatggcgatgtttctaggttctgttgccagcaccccttctacggctataacactcattgttgtttctgcgattcttctggtcccgctgctggcagtgatcaatggcattgtgagcacgttgcaacacagcctgtacgttaataacctctattttggtaattcatcttttattagtacgttaaaaaaatcagcatttattaaaatcgcctttttcagtgtgttgatttttatccccttcttttttgttgctatgatgttcgcaggtgcgttttttgccgatctgttccaatctgccctgaatggttccatcgccaacgaaaataagacagctatgctgataattcagaatgccagcaacctgctattcatgatgctgatgttgctactcggcaccatggtttccagcagctaccgcatcgttgcccaacgtaattacctgtttagtcaaacaacattacaaggtgacatcaagctacgttcttccatgaaactcctgtcttatatgggcctgttaatgaccaacagcctgatcactgtgtgctcattggggcttgccacaccaattgcagaagtacgccatgcacgctatatggctaatgcaactgagattgaaggtgacttgtctttactgaatatccacgctcatcaggacacagcgaatagcgccctcgccgaagaagcagtacaagcactcgatctgggcactggcttttga

SEQ ID NO: 41523 - DNA, 876 bp, Yersinia pestis
atgacgattaaacttatcagtcaactgacggctctggtatcagagccgaatagtattcaccatgtctattttgctaaaagcctacgcgccgcaccattgctggcacagcaggttaattttcctcgtatggagttaattatcgagggttcacaagccatgatatgggatcggctttatgatgattttcaccataaagatgaatacatcatgcaccgtggtgatattttatttattccctctgggggctggaatattccccaatgggaacaaccggtaataacgttaagtattttatttggcaagcagagcttaggttttagcctgctaagttgggatggggaaagtgttgttcacaaagaaatggagagtgtattacggcgagggccacgggttggggcctatattttacaggctttaaacgaaatgtcgttaatgcaacgagagcaaaccactgttcaacttattgttagaagcctaattagccactgtatcgatttgcttaggaatcaggtaaaaacgccatctcgcagccaaacgctatttgaatcgataagagaatatattgagagaaattatagtgaaccattgacacgggaatcggttgcgcacgtttttcatatttcacctaactacctgtcgcatttatttcgcaacgcagggaatattggatttaatgagtcggtcaacagtgcccgattggaaaatgctaaaatattgcttaagttctatgaaatgaaaatcaaggaagttgcaaatgtctgtgggtttattgatagcaactatttttgtaggttattccgtaaagagactgagttgacaccatcagaatatcgccaacaatatcgcagtaatatgatggaaagagatgttatttaa

SEQ ID NO: 41524 - DNA, 1188 bp, Yersinia pestis
atgcatattgatcactacagcttgcccgtttacgataaaaataatagtgataacaccctgaaggaaaccgaattatttaaagaagtcccttatttatctgctcggttaggggagcaggcttatgagtatagtggtggtgacatcagtaattatcatttatctattcaatatatcatggacgttctggctgatcaggctaagggtaaagtggatttaagccatttttccagtgaagaaacgctctcttctcatgtttctcttgagaaaaatgagcataactatcattgctttaatcagcatgccagtactgtttatcatattaataataatgattttggccgcacgctggttgatctttttgagcagatgaacaattcgggtgaaaacgttcgagcattaaaaattgatagttctcaacattcaatggctgcgcgtctttatattaaagatacggagcaagggcagcgtttcgttgttaatttttatgaccctaatatcacggataaaactgtgcgttgtgaggtggatgacgcattaaaattgaatgactactcattaagaaatttcattagtaatcagacttacttatccagctatgttgatgcagagatatcatcaattattgtttgtgatcaagccgatatccatgatcaacataaggtgaaagagaaccgagcgttaacgccattatcacagagttcacctcttcctttatcggtagcacgattggatctgttgttaacagataattttgctgcaggcatacaaacaatggcagaagaagttaagaatctatcagagtccgagcgtaacacattctttaatcagctattacaaccgagggcggagaatgacctctctgggctgcaatgtgctttcaactatcagtgttttgatgcgttggaagcctactctgcattgttggtgcttgcaccaccagaacaacgaacagacttattaacaggaaaaagcgaaaatggctggagtagtctggctcaggccatgtcatctgggaatagtgatatggtgagcgtatgcttctatttgttgcaatggctccctttggacgatatgaatgcgtttgtgtggaagttgttagcatcccttcctttggaagatgcgaatacacttatgtgtccgttggaagaaccccttcctttggacaatatgagtacacgtgtggagtaa

SEQ ID NO: 41525 - DNA, 342 bp, Yersinia pestis
atgacaacactcacgccgttgcaactttttaagaacttatcggatgaaacacgtctgaatattatcttattgctaaaagcatccggcgaactgtgtgtttgtgagctttgccatcgcttaaatgaagcccaacccaagatttccaggcatttagccatgctaagagagtccgggctgttactggatcgccgggcagggaaatgggtccactaccgcctgtcgccccatattccagcttgggccgcagccatcatcgagcaaacttatctcagccaacgcgatgaaataacgttactggcgcagggtaacgtcactcccgacagcaaaatgttgtgtaactaa

SEQ ID NO: 41526 - DNA, 1869 bp, Yersinia pestis
atgagcacagagcataaacaatatttatccgcggtgactttggctgcaatcggggtcgtttacggtgatattggcaccagcccactctataccttgagagagtgtttttctggtcattatggttttgatgtccgacccgatgtggtgtttggttttttatcgctgattttctggatgctaattctagtcgtctcggttaaatatctgacctatgtgatgcgggctgataacgcgggtgaaggagggattttaacgttgatgtctttggcagggcgtaatacctcttccagagcgacgtctatcttggtggtccttgggctaattggtggcagcttcttttatggtgaagtggtcattaccccggcaatctcggtgatgtcagctattgaagggttggaaatcgccgcacccgcccttgatccctacattgttccctgctccattgccgtattaacgctactttttgtgattcaaaagcatggcactggcagtgttggtaaacttttcgccccggtgatgctggtgtggttcctgacgttagccttacttggtctgcgcagtattattgctaacccagaagttttggccgcgctgaatcccaaatgggcaataagcttttttgttgaatataagtctgtttcgttttttgcccttggtgcggtagttctggcgattactggcgttgaggcgttgtatgcggatatggggcattttggtaagtttcctatccggctcgcttggtttactgtggtcttaccgtcgttggtgctgaattattttggtcagggggcgttattactgaaaaaccctgaagccatcaaaaaccccttctttctgctagcccccgactgggcactgattccattacttattctggcgacgctagccactgttattgcctcacaggcggtgatttctggcgtattttcacttactcgacaggctgttcgtttagggtatttaccacccatgcgaattattcatacttcagagatggaatctggccagatatatatcccagtgatcaattggaccctctatttagcggtggtgttagtgattatcggttttgaacgctccagtaatttggcggcggcttatggaatagcggttaccgggactatggttatcaccagtattctgttttgtaccgtggcatggaaaaactggcattggaatcgctttctcgtcgtatttttactgatggtcttgttgattatcgatatcccgatgttttctgccaatgtgcttaaattattctcagggggttggttgccactgtctttaggtttggtgatgtttattattatgaccacctggaaaagtgagcgtttcagtttactgcgccgtatgcatgaacacagtaattcactggaagcgatgattgcttcactagagaagtcaccgccagtacgggtacccggtacggcggtgtatatgtcgcgagcaatgaatgtcattccatttgcattattacataaccttaaacataacaaagtgttacatgagcgtgttgtgttgctaacgatgcggactgacgatgtgccttatgtacataatgtggagcgggttaccatcgagcaactttctccaaccttctggcgggtggttgccagatacggttggcgtgaaacacctaatgtggcggaaattttccaccgttgtggtttggaaggtttgtcttgccagatgatggaaacgtcgttctttatgtcacatgaatcgctaatcctgactaagcggccatggcacttatttttacgtggtaagttatttattgcacttagccgtaatgcattacgcgcaccagatcaatttgagatcccacccaatagggttattgaacttgggacacaagtggaaatttaa

SEQ ID NO: 41527 - DNA, 420 bp, Yersinia pestis
atgaaaaaaggtgtattactgaacgctgatatttccgcggttatctcccgtctgggccataccgatcagattgtgatcggtgacgcagggctaccgataccggcaaccaccacacgaatcgatttggcgttaacacgaggcgtgccagggtttctgcaggttgtcgatgtagtcacgcaagaaatgcaggttgagaatgcttaccttgcagaagaaatcgttaaaaataatccgcaacttcatgaagcattactcgtgctgctcacacagcttgagcaacggcaggaaaaccaaattgctttgcgttatatcagccatgaggcgtttaaagagcaaactaaacaaagccgggcggtgatacgcagcggagagtgttctccctttgctaatatcattctcggctccggcgtaaccttctaa

SEQ ID NO: 41528 - DNA, 960 bp, Yersinia pestis
atgatcccacaagacaatgagttgttaactgaaattgctgtttcgtattatcaggatgaaatgactcaggaagaaatcgcccataaatttggcatttcaaggatcaaagtcggtcgcttgctgaaacgcgcgaaaacagagggcatcgttgagattaacgttcgttatcatccggtattcagtacccgccttgagcaacagttaatcgagcattttgggttgaaacgggcgctgatagcccttgattaccaagatgaggatgaacaacgccgccaggtcgccgcgttggtttcagcctacttagccacaaacttaaaagacaacacggtgttggccgttggccaggggcgtaatgttgcggctatcgcagaccacgtcagcgtcgtgccagaaaggcactgtaagtttatctgtggcatcggtggaacacaccgcccaggtgatgcgattaatgccgatcacatcagtcgccgcttagccaaaaaatttggcggaacgagtgaaaccctgtacgcacccgcgtatgtggaaaaccgggcgctaaaagaagcctttatgcaaaacggtaccattaaagagactctggaccgcgcccgtaaggctgatatggctctggttggcatcggtgatatgaacgaaaacagctatatggtagagctgggctggttcactcctcaggagatcgtcgacgccagtctgcatcaaggtgtgacaggcgaaattgcgggatatgatttttttgatgcgcaaggccagcccgcgaatacggtgatgaatgatcgggttattggtatcagcacccaagagcttcgccagatcccctgcgttatcgctatcgccgctgaaaacaccaaagcattagcgctgctgggtgccttgcgtaccggtgcgatcgatattcttgcgaccagtgcatccaatgcccggactattttgaagatgattcaacatcagtcgtaa

SEQ ID NO: 41529 - DNA, 1425 bp, Yersinia pestis
atgataaaatctgcgcgcagtatggcaggccttccttggatagcggctatggctttctttatgcaggctttggatgccaccatactgaatacggctctcccttcaatcgccgaaagccttaaccgttctccgctgacaatgcaatcagccattattagctataccctgaccgtcgcgatgttgattccagttagtggttggctggccgatcgttttggtacccgacgaatttttatcctggcggtttctttatttaccttcggatcactgctctgtgcactttcaggctcactggctttcttagtggcttctcgggttattcaagggatcggtggggcgatgatgatgccggtagccaggctggcgctcatccgggcttatccacgcagtgagttattgccggttttaaattttgtcactattccagggttagtcgggccagtcatggggccattattgggcgggttgttggtgacttataccacttggcattggatttttatccttaatattcctattggcttgttgggtattttttatgcccgcaaatatatgcctaatttcacgatgcctaagcgcacttttgattttgttggtttcctactatttggtatcagtttagtcatgatatccaccagcctggagattatggggcggccagaaatcgcagattatttacccgccgcaactctgctaggcggcctattaatgctgattttctatatatttcatgccaaaggccatcctaatccactcattggtttgccattatttaagacccggacattctccgtggggattgccggtaacgtggcctcccgcttagggacgggctgtgtaccttttttaatgccgttgatgttacaagttggattcggttattccgcacttatcgccggttgtatgatggctcccaccgcgattggatccatcatggcaaaatcagccgtcacacaggtgctgcgctcactgggctatcgtaaagtgttagtcggtataaccttaattatcggggtactgattgcctcctttgcattgcaatcaccggggatgtcggcatggatgatgatattgccgctatttatattaggtatagcgatgtcgacccaatttactgcgatgaatacaattacactggctgatttgacggataacaatgccagctccggtaacagtgttctggcggtaacccaacaattatcgataagctttgggattgctatcagtgcgactgtgttgcgtttttatgatgggttgtcgttaggcggtaatgtggatcacttccactacacctttatcaccatgggaatagtgacattgctatcatctctggtgttcttgttactcaaacccagggatggagacaatttaattcagggccgtaatgtgaaaaaagtagccccacaggtgaaaaataatgtttaa

SEQ ID NO: 41530 - DNA, 1056 bp, Yersinia pestis
atgctgaaatttattcagaataatcgtgaaggtaccgcgctactggccattctcaccctatttgccctattggggattattgaccgcaactatttcagcttgcagaccttcaccatgattttcagcagcgcacagatcctgatcctgctggccatcggggccaccctggtgatgttgacccgcaatatcgacgtttccgtgggctccatcaccggtttatgcgcggtgaccgtcggtatggcgctgaatgccggttttggcctggcggcatcttgcttgttcgccttgttggttggcatggtagcgggcttttttaacggcattctggtgacctggttgcgcattccggccattgtcgccacgctaggtacgcttgggttataccgtggcctgatgctactgctaacaggcggtaagtggatcgaaggattaccggcggacctgaaaagtttatcaacccctattctgttttctatctcgcccattggctggctaacgatgttgctgatccttgcgatggcctggctgttgggcaaaaccgcctttggccgcagtttctatgccacgggggataacttacaaggggcgcgtcagttgggggtccgtaccgacagcctccgcatttttgccttttcaatgaacggcgtgatggccgcactggctgggatcgtcttcgcttcccaaattggctttatccctaaccaaacaggcaacgggctggaaatgaaggccattgccgcctgcgtgttgggcgggatcagcctgcttggtgggacggggaccattattggtgccattttgggcgctttcctgctgacacaaatcgatagcgtactggtgttactgcgcctaccggcctggtggaatgactttattgccggtttggtgctgctgggggtgttggtattcgatggccgtctgcgttgtgctgttgagcgtaatatccgccaacagaaatatgcccgcttcactgcccaagccattattagtgataaaaaaccaaccgttagcgataacaacccagcagctagcaataaaaagaaggcggcattatga

SEQ ID NO: 41531 - DNA, 1593 bp, Yersinia pestis
atgagtcaactcgatacgactaccccatcaggtgattacttgatggcgctggatgccggtaccggcagtgtccgggcggtgatatttgatcttaatggtaatcagattgccgccgggcaggcggagtggctgcatctgccggtacccgatgttccggggtcgatggagtttgatttaaccaccaattggcaactcacgtgccagtgtatccgccaggcactgcatttggctaagttaccggccagtgctatccgtgctgtcgctgcctgttcaatgcgtgaagggatcgtactctatgatcgcagtggaaccccgatctgggcctgtgccaatgtggatgctcgcgccagccgtgaagtcagcgaattaaaagagctgcacaataatggatttgagttagaagtctatcaatgctccggccagacgctggcactgagtgccatgccccggttgttgtggttggcgcactatcggcccgatatttatcgtcaggcaggaacactgaccatgatcagtgactggctggccaatatgctcagtggggagctggcggtcgatccctccaacgcggggaccacgggtatgctggatctcgtcacccgtaactggcaaccgaacttgctggaaatggccgggttacgtgcggatattctctcgccagtgaaagagacaggcaccttgctgggccatgtcacggcgaaggccgcgcaagaatgtggtttgctggccggaacgccggtggtgatgggcggtggcgatgtacaactgggttgtttggggttgggagtggtgcacgcaggccagacggcggtattgggcggtactttctggcagcaggtggttaatttaccgcagccgattattgatcccaatatgaatacccgaataaaccctcatgttatccccggtatggttcaggcggagtccatcagcttctttactggtctgacaatgcgctggttccgtgatgcgttttgcgccgaagaaaaattactggcgcagcgattggggattgatacctacagtttattggaggatatggccgccagggttcccgccggtgcttatggggttatgcctatcttctctgatgtgatgcggtttaaatcttggtatcacgctgcgccttcatttattaacctctcactcgatcctgaaaaatgtaataaagccacgttattccgtgcgctggaagagaatgcggccatcgtctcggcctgtaatttagcgcaaattgctgaattctctggcgtgaaagcctcgtcggtggtttttgctggcggtggcgcgaaaggcaaactgtggagccagattctggctgatgtcaccggtgttccggtgaaggtgccggtggtcaaagaagcaaccgcattaggctgcgcgattgccgccggtgttggtgtcggcctatatgaagcattggataaaaccggcgagcggctcgtgcgctgggagcgggaatacatcccgaatactgagcataaagcgctctatcaagcggcaaaaactaactggcaagcggtgtataccgatcaactggggctggtggattgtgggttgacgacgtctctttggaaggctccttgcctctaa

SEQ ID NO: 41532 - DNA, 1116 bp, Yersinia pestis
atgagtcacgaaaaccttaaaggcgctcaaatggcggagggtatccccgagaccatgcgtgcagttgtcgcctacgggccgcgcgattatcggtttgaaagagtgccggttccgactatcgatgccaaagagattttggtcaaagttgaagggtgtggcatctgcgccggggacaccaaggcttttgagggtgcccccagtttctggggggatgataagcaacctgcttatatcaaagcaccgatgattccaggtcatgaatttattggtcacgtcgttggcttgggcgcagatgttgaggggtttgagctaggtgatagagtgacttctgagcaaattgttccttgctggggctgccggttctgtaaccatgggcagtactggatgtgtgaaaaacacgatctgtacggcttccagagcaatgttaatggcgcgatggctgaatacctgaaattcacgaaagaagcgattaattatcatgtccctgatcaccttcctttagaaaaagccattctgattgaaccctatgcctgcgcatttcacgcggtacaacgcgccaagataaaactcggtgatgtggtggttttggccggttcaggaaccttagggctaggcatgattggggcaattaaaaagtctggggctgccaagctcattgtgctggatttatcggatgatcgtttggctctcgccaagaagttcggcgctgatttggtgcttaatcccagtagagatgatgtgaataccctgattaaagaaatgaccggtggttatggttgcgatatctacattgatgccactggtgcgcaaaaagccgttgaacaaggattaaccctgctgcgtaagttggggacgtttgtggaattctcggtatttaaagatcccgtgaccgttgactggagcatcatcagtgaccgtaaggaacttgatgtcttgggttcacatctggggccatattgcttcccgctggtgattgaaggcatctctaacggtgatttaccgaccgagggggtcgtcacacatatcttgccattggagaaatatgccgagggtattgagctggtcaaaagaggcgttgactcacttaaagtggttctcaatcccaacctaacctaa

SEQ ID NO: 41533 - DNA, 456 bp, Yersinia pestis
atgttatctattgcaatcggctgtgatgatgccgctattgagatgaaaaaccagattgttatttttctacaaagtaagaacatcactgtcgtcgattacagctgcgatcaacaccaagaaccgacgatgtaccccgatattgccattcaggttgctctggcgattaaagccgggaaacatgaacgcgggatccttatttgtggaacaggtattgggatgagcatctctgccaataaagtttttggcgtccgtgcagctcagtgccatgatactttttctgcccaacgagccagaaaaagcaacaatgcccaaattatctgtttaggcgctcgcgttattggcccggagttagccaaaaccctgatcgaggcttggttagatgctgaatttgacggagggggatcaacggaaaaagtggaacggatccgctattacgaacagagcctgcatgattga

SEQ ID NO: 41534 - DNA, 2556 bp, Yersinia pestis
atgaaaaataacgataaactcgactcccacaccccgatgatgcagcagtatcttcggttaaaagcccagcatcctgaaatactcctgttctatcgaatgggggatttttatgaactgttctatagtgatgccaagcgagcctcacaactgttggatatctcactgactaaacgtggtgcttcagccggtgaacccataccgatggcaggcgtcccctatcattcgatagaaaactatctggctaagctagtgcaattaggtgagtcagccgccatctgtgagcaaattggtgatccagccaccagcaaagggccagttgaacggaaggttgtccgtatcgttacaccgggcacaatcagcgatgaagcgctgctacaagagcggcaagataacttactggcggctatctggcaggatgccaaagggtttgggtatgccactctggatatcagctctggccgcttccgggttgcagaacccgccgatcttgaaacgatggctgccgagttacaacgcaccaatcctgccgagttactgtatccggaaaacttcgagcctatgtcgttgatcgagcatcgacatggcttacgccgccggcctttatgggagtttgagctggataccgccaaacaacagcttaatctgcaattcgggacccgtgatttaattggtttcggcgttgagcaagcccatctggcactgcgggcggcgggctgcctgctgcaatatgtcaaagatacccaacgcacatccctgccgcatatccgtggcctgaccatggagcgccagcaagatggcatcattatggatgctgctacccgtcgtaatctcgaattgacgcagaacctatccggtggcagtgaaaatacgctggcagccatcctcgattgcagcgtgacgccaatgggtagccggatgctaaaacgctggttacatatgccaatccgcgatattcgcgtgctcacggatcggcaacaagccattggtggcctacaagatatcgccgccgagttacaaacccccttgagacaagtgggcgatttagaacgtattttggcacgcttagctctgcgaactgcccgtccacgcgatttggccagaatgcgtcatgctttccagcaactgccagaaatccaccgtttattgcaacctattgatgttcctcatgtacagaacttgttatcacaggtgggccaattcgacgaattgcaagacttattggagcgggccattgtcgagacgccaccagtattagtccgcgatggcggcgttattgcatcaggttataacgctgagttagatgaatggcgggcgctggccgatggtgcaaccgattatctggatcggttggaaatccgtgagcgggagaagttagggctggacacactaaaagtgggctttaatggtgtacatggctattacattcaggttagccgtggtcagagccatctggtgcctattcattatgtccgtcggcaaacactgaaaaatgccgagcgctacattattccggagctgaaagagtacgaagataaggttctgacctcaaaaggtaaggcactggcaattgagaaagggttgtacgaagaaattttcgatttgctgctgccgcatctgccagaattacaactcagtgctaatgcactggctgaattagatgtactggctaatctggcggaaagagctgaaacactcaactactcttgcccaaccctgagcgataagccggggattaagattatgggtggccgtcacccggttgtggaacaggtcctcaaagaaccctttatttctaacccgttgacgttatctcctcagcgacggatgttgatcattactgggccgaacatgggcggcaaaagtacctatatgcgccaaacggcgctgattgtgctcttggcacacctgggaagctatgtccctgcggatcaggcaaccatcgggcctattgaccgcatatttacccgcgtcggtgccgctgacgatctggcctctggtcgttcgacctttatggtggaaatgaccgagaccgcgaatattctgcataacgccaccgaacaaagcctggtattgatggatgagattggccgtggcacatccacctatgatggtttgtcattggcctgggcttgtgcagaaaatctggccagccgtatcaaagcaatgacgctatttgcgacgcattactttgaattaacgacattgccagaaaaaatggaaggtgtggtaaatgttcatcttgatgcattggagcacggcgaaaccatcgcgtttatgcacagtgtacaagagggtgcagccagtaaaagttatggcctggcagtagccgcactggctggtgtgccacgcgatgtcattaagcgagcacgacaaaaactgaaagagctggaatcactctctaataacgccgccgccagtacgattgatggctcacaaatgacgttgttaaatgaagaaatccctcccgcagtggaagcgctggaagcgctggatccggattcattgtcaccgcgtcaggcactggagtggatctatcgcttgaagaacatggtgtaa

SEQ ID NO: 41535 - DNA, 1167 bp, Yersinia pestis
atgcgtactgcctatctcgctgatcgcacttttactccgcaaggcattgaaaccggcgtcgcggttatcgtcgagcaaggcgagattgtggcagtaacacgcgagctgccagcggatgcagaaattgtgcatctgacagggaaaaccctgatcccaggtctgatcgacattcatattcatggtcgccagggggcggatgtcatggatgcctctgcggaggcattacgcaccattgcccgtgccctaccccaaaccggggttgttgcctgggtcggcaccaccgtcagtgcgccgatacaggatatctttgcggctctggcgcaggtgcgtgattttattgcagacccggataacgcacgtgatacccgcaccgcaaccctgctcggcagttttctggaggggccatatttcaccgcgcctttccggggttcacacccagaaaagtatctgacgacaccaacaccacaagagctggagcaattacggcattcggcgggtaacaccttgttgcgtgcagctatcgcacctgagtcacccgaggctttggccgcgatccgctggctggtgaatcacgggatcaaaacctctgtggcgcacactgcggctaattttgagcaagtgacggcggcctatcagcaaggtgcggattgcggcgtacatttgtataacggcatgtcagggttgcatcaccgtgaaccgggctgctgtggtgccgtgttgtatcacgacatgctggcagagctgattgccgatggcattcatgtgcatccggtgatgatgaatctggcgtatcgcatgaaaggttatcgccgcattgcactgatcaccgactgcatgcgcgcaggggggctgggtgaggggcgttatttactcggcgcacagcatatcacggtacgtcagggggaagcgcgcaccgatgatggttcactggcaggcagtacttgtagcttggatcaggcgctgcgtaacatgatccaacatgcgcaagtccccgagtgggaagctgtacaaatggccagcgcagtacccgccgcttatctgggattagcgtcaacactgggttcgatccagatgggtgcacaagccagcatggtggtgatggagagtgactttaccgttgccgcaaccctgattaaaggtgaatgggcttatcgccactcagcctaa

SEQ ID NO: 41536 - DNA, 855 bp, Yersinia pestis
atgtttttggtttcttcccgagaaatgttacgtcaggcacagatcggaggctacgcaatcccagccttcaacatccataatctggagaccattcaagccgtagttgaaacagcggctgaaatggcttctccggtcattttggccggaacaccgagcaccttttcttatgcgggcacggaatatctggtgcagatctgccaacaagcggcacgtcattaccgtatgccttttgcactgcatctggatcaccatgagtcgtatgatgatattacccagaaagtcgcggcgggcatcaaatccataatgattgatggctcgcattttaactttgagcaaaatatcgcgctgacacgtcaggtggtggagtattgccatcgctgggatggtactgtcgaagccgaactggggcgtctgggcggtcaggaggatgatctcacggttgatgagaaagatgcgctgtatactgatcctggttcggcagcacattttattcaggcgacagggatagactctctggccattgccatcggcactgcccatgggatgtacaaagaggcccctagcctggactttgatcgtctggcgctcattcgccgcaatacggatatccctctggtactgcatggcggatcagggatcccagatgaagatgtgcgtcgttgcattgaattggggatcagtaaagtgaatgtgggtacagagctaaagatcgcattctctggtgcactgaaagcctatttccttgaaaataaaggcgcgaatgatccccgtcactatatggttccggctaaagccgccatgaaaaaagtgattcaggataaaattaacgtctgcggcagcgctggcaaacggtaa

SEQ ID NO: 41537 - DNA, 1086 bp, Yersinia pestis
atgccaattaatgctctgagtaagacactattattaggattgatatcatttgccgctttaggtgaagtcagcgcggcacagtacaatgctgtggtttctgccatggcgcagggcgatgagttctcttcaattaatgcagcgttacaatcagcaccgccagatagttctccgtttgttattttccttaaaaaaggcgtttataccgaacggcttgaggtcaatcgtgacaatgtgacgctgaaaggtgaggagcgtgatacgacggtgattggcgcgaataccgccgcgggtatgctcaacccacaagggacgaagtggggaacctctggcagcagcacggtattggtgaatgccgccaattttactgcagaaaatttgacgattcgtaatgacttcgatttccctgctaatcaggcgaaagcagagggtgatccgacgaaattaaaagatacgcaggcggtggcgctgttattagcagaaaaaagtgataaagcccgtttcaggcaagtcaaacttgaggggtaccaagatacgctttatagcaaaacgggcagtcgtagctactttaccgattgtgacatcagtggccacgtcgattttatttttggctcaggggtgacggtatttgaccgctgcaatattattgcccgtgatcgccgtgatatctccccaccttacggttacattacggcacccagtacccaaaataccgcaccttatggtctgattgtcctcaatagtcgtttaaccaaagaaccaggtgtgcctgctaaaagttttgccttagggcgcccgtggcaccctactacagcatttgatgatggccgttatgctgatcctgcggctatcggacaggcggtatttatcaataccgtaatggatgatcatatttatggctgggataaaatgtctggaaaagataagcaaggcgagaaagtttggttctacccgcaagactctcgcttctttgaagcgaacaatcagggaccaggggctgaaattaatgaggggcggcgtcagttgtctgctgagcaactaaaagcgttcacattgccaatgatttttccagactggaccgttcagtaa

SEQ ID NO: 41538 - DNA, 1044 bp, Yersinia pestis
atgtcagcattaaccccagccagtgaagtgatactgcgccatagtgatgaatttatagcccgccacgtcctgtttgccggtgatttacaagatgcgctgccagcgcaatttgatgcagccggggtgcgggttcacaccaatcaatatcaccactggcaattactgagcaacacgctggaagagaatgtgcaattcggtcttttagccacggcagaaactctcgcagcttgcgacaccctgatttactactggcccaaaagcaaacaagaagcccaattccagttggctaacctgctttctatactgcctgttggcaccgatatttttgttgtgggtgaaaaccgcagtggtgtacgcagcgcagaagaaatgttggcagacttcgcgcagttagccaagatagacagcgctcgccgctgtggtttgtaccatggccgtttagacaaacaacccgaatttgatgctgatgcctggtgggaaagctatcaggtcggtggtgtgacggtcaaaacattgccgggtgtcttcagccgcgattctctggattcgggtagtcatctgttgctgtccacctttaacgagccctttaaaggcagcgtattggatgtcggttgtggtgctggagtattagcctcggttctggcgcagcaatcgccaaaaatcaaatggacgttgagtgatgtcagtgccgcagccattgaagccagccgagccacattggcggtgaataatattgaggcgcaagtgattgccagtaacgtctattccgacatcaaaggccgctttgagatgatcatttcgaacccgcctttccatgatgggatccaaaccagcctgaccgccgctgagatgctgatccgtggagcgaccgcccacctacatgtgggggggaaattacgcatcgtagcgaactccttcctgccgtatcctgccttgctggatgccgcatttggtagccacgaagtgctggcacagaatggccgctttaaagtgtatcaggcaactgtcgggcgtccgccacgggatccgaagaaaaaacgttaa

SEQ ID NO: 41539 - DNA, 1590 bp, Yersinia pestis
atgtctcctagtgaatatgctctggaagtcgcgaaaagacgtacttttgcgatcatttcccaccccgatgccggtaaaacaaccattaccgaaaaagtgttgctgttcggacatgcaattcagactgccgggacagtaaaaggccgtggttcaagccatcatgccaaatctgactggatggaaatggaaaaacaacgcggtatctccattaccacgtcggtaatgcagtttccgtatggcggctgtctggtcaatctgcttgataccccagggcatgaagacttctccgaagatacgtaccgcacactgacggcggttgactgctgtttgatggtgatcgatgcggccaaaggggtagaagaccggacccgcaaattgatggaagtgacccgtctgcgcgatacgccaattctgacctttatgaacaaattggaccgcgaaattcgtgatccaatggaagttctggatgaagtcgagcgtgagctgaacattgcctgttcacctatcacttggccgattggttgcggtaagtcgtttaaaggggtttatcaccttcataaagacgaaacttatctgtatcaaagcggtaaaggccataccattcaggaagtccgtatcgttaaagggctgaacaacccagatctggatgtggctgttggcgaagacttggccaagcagttccgtcaggagttggaactggttcagggcgcttcccacgagtttgatcatgaggctttcctgtccggtgatttaacgcccgtcttcttcggtactgcgttgggtaacttcggtgtggaccatatgctagatggcttggtcgaatgggcaccggcaccgatgccgcgtaaaacggatacccgcgtagtggtcgcctctgaagagaaattcaccggtttcgttttcaaaattcaggccaatatggatccgaaacaccgtgaccgtgtggcctttatgcgcgtggtgtctggccgttttgagaaagggatgaagctgcgtcaggtacggaccaagaaagacgtggtgatttcagacgcgctgacctttatggccggtgaccgttctcacgttgaagaggcctatgctggtgatattatcggcttgcataaccatggcaccatccagatcggtgacaccttcactcaaggtgaagatatgaaattcaccggtattcctaactttgcccctgaattgttccgccgcattcgcctgcgcgatccattaaagcagaagcagttgttaaaaggcttggttcagttgtcagaagagggagccgttcaggtattccgcccactgagcaacaacgatttgatcgtgggcgctgtgggggtgctgcagtttgaagtggtctcttcccgcttgaagagtgaatacaacgtcgaagcggtgtatgaatcggttaacgtttctaccgcgcgttgggtcgaatgtcatgacgtgaagaaatttgaggagttcaaacgtaagaatgagcttaatttggccttagacggtggcgataatttaagttacatcgcgcccacgatggttaatctcaatattacacaagagcgttacccggacgttattttccgcaaaacacgcgagcactaa

SEQ ID NO: 41540 - DNA, 489 bp, Yersinia pestis
atgcggatcggtcatggtttcgatgttcataaatttggcgagaatggcagtggtccactcattattggtggcgtgcgtatcccatatgaaaaggggttactggcccattctgacggcgatgttgcattacatgcggccactgatgcgctattaggcgctgctgcattaggtgatatcgggaaactcttccccgacactgacccggcatttaaaggcgcagatagccgaggtttactgcgagaagcgtatcgccgtattctggccaaaggctataaattggggaatctggatattaccattattgcccaggcacctaaaatggcaccgcatattccacaaatgcgcgttaatttagcagaagacctacaatgtcatatggatgacatcaacgtcaaagcgaccaccacggaacagcttggttttaccgggcgtggtgaaggtattgcgtgtgaagcggtggttttattagttaacgtagaacagggttaa

SEQ ID NO: 41541 - DNA, 726 bp, Yersinia pestis
atgagtaacttcgcagtttcccttcctgaagtgatcgctgtattaccggctgcgggtattggtagccgtatgttggtggattgccctaagcagtatttaactgtggggggcaaaacaatcattgaacatgctattttttctttgcttcaccacccacgaattcagcgggttatcgttgtgatccatccgcaggacacacaattctctaggttgtccgttgcgcaggatccacgtatcagtacagtttacggtggcgatcaacgggctaactccgtgatggcgggtttacaattggcagggcaggctgaatgggtgttagttcatgatgcggcacgcccctgtttgcaccttgatgatctcagccggctgttatcgattaccgaatgcagtcaggtggggggaattctggcggcccctgtgcgtgatacgatgaaacgtgccgagccgggtattcaagccatcgctcatacggtggatcgtcaggacctgtggcatgcgctgacgcctcaacttttcccgctagaattattaaaattgtgcttatcccgtgcgttaagagaaggggtggcggtgactgatgaggcctctgcattagagcattgcggttatcatccgatattggttaccggccgttctgataatattaaagtgacgcgcccagaagatctggcattggcggagttttatttaacccagcggcagtctctcaataacgacagtctctga

SEQ ID NO: 41542 - DNA, 642 bp, Yersinia pestis
gtgccagcccatcagttagatgaccataaccaagaaacgcggtcagacgatgagaatatcgtctggcacccccatgcgatcacccgacaggatcgcgaacaacagcacggtcatcagggcgtagttctttggtttaccggcctgtcgggttccgggaaatccactctggccggtgcgctggaacaagcgttgttcgctcgcggtgtcagtacttacttactggatggtgataacgtgcgccatggcctctgccgcgatttgggcttttctgacgctgatcgtcgtgaaaatatccggcgggttggcgaggtggctaaactgatggttgatgccggtctggtggtcttgacggcgtttatttcccctcatcgggctgaacggaaaatggtacaagatatgctggcatcgggtcagtttattgaggtatttgtcgatacgccgttagcaatttgtgaggcccgtgacccgaaaggcttatacaaaaaagcccgtgccggagagcttaaaaattttacagggatcgattcagtttatgaatcgcctgcgtctcctgatatccatttgcagggtgaacaattagtaacaaatttgattgaacaattgttagacgtactgcgtggtagagctattatcaaatcctaa

SEQ ID NO: 41543 - DNA, 1419 bp, Yersinia pestis
gtggactatctacctctatttgccgacttgaaacaacgcccggtattgatcgttggcggcggcgaagttgctgcgcgaaaaattgaactactgcaccgcgcaggtgcgcaggtatgggtagtggcgcaaaccctctcatctgaactcgaacagcagtatcaggatggccgtatccattggctggcacaggattttctgcctgaacagttggacaacgtgtttctggtgattgccgcaactaacgataccgtactgaatgccgctgttttcgcggcggcagatcaacggtgtattttggcgaatgtggtggatgaccaacccctttgttcgtttattttcccttcgattgttgatcgttcaccgctggtggtcgcgatctcgtcttccggccaggcaccggtgctggcgcggatactgcgtgagaagttagaagccttactgcccactcgtctcagtgatatggccgctatagctgggcgctggcgtgggcgggttaagcagcatatggcctctatgggggagcgccgccgcttttgggaacatgcattcagcgggcgctttgccagccttatcagccgtggtcagttaaccgaggctgaaaatgaattacaactgtcgctagagggccaacaccgtgcactcggcgaagtggctttggtcggtgcaggtcctggcgatgcagggttattaacgttacgtggtttgcaagtgatgcagcaggcagatgtggtgctgtatgaccatttagtcagtccggaagtcttggatttggtgcgtcgcgatgctgaacgcatctgtgtggggaaacgggcgggggcgcattcggttacccaagaggcaaccaatcagttgttggtcactctggcacagcaaggaaaacgggtcgtacggctaaaaggtggcgatccctttatttttggtcgggggggggaagagttacaagttgtggcgcaagcggggatcccgtttcaggtggtaccgggggtgacggctgctgcgggggcgacagcctatgccggtattcccctgacacaccgcgatcatgcgcaaagcgtgacatttattaccgggcattgccgtcctgatggtgatgatcttgattggcagacgctggcccgtggtcgtcagacgctggcgatctacatgggaacagtgaaagcggcggcaatcagccaacagttgatcgcccatggccggtccagtaccacgccggtggcagtgattggccgtggaacccgtgtggaccagcaggtgctgatcggtacgttggcacaacttgaatcactcgcacagcaggcaccgacaccagcactactggtgattggtgaagtggtgaatttacatcaccaaattgcctggtttgggcaacaaccgcagactgaatcggcgatcagcccatcagtcgtgaatttggcataa

SEQ ID NO: 41544 - DNA, 2061 bp, Yersinia pestis
atgtctaagtttccgcccttaagcgcgaaagtttctgcgttattgcatggcgctgactataacccagagcaatgggaaaattatcctgacattattgataaagatattgccatgatgaaacaggcaaaatgcaatgtcatgtcagtgggaatattcagttgggtaaaacttgagccaagtgaaggagaatataatttctcttggttagatgaattaattgaaaaactttatgctgccggtatccatatattcctggcgacgccaagtggcgcacgtccggcttggatgtcgcagaaatatcctgaagttttacgtgtcgggcgtgatcgggtgcctgcgctgcatggtgggcgtcataaccactgtatgacctcgccggtatatcgccagaaagtgcggcagataaaccagaagttagcagagcgttacgcccatcatcctgcggttattggctggcacatctctaatgaatacggcggcgaatgtcactgtcattcctgtcagcaaaaattccgcctctggcttcaggatcgttatcaaacgctggataaccttaacgaagcctggtggagtgctttctggagccacacctacagcgattggtcgcaaattgagtctccagcaccgcaaggtgaagtttcaattcatggtctgaaccttgactggcggcgttttaataccgctcaggttacggagttttgttctgaagaggctaagccactaaaggcggcaaacccagagttgcctgttacgactaactttatggagtacttctacgattacgactactggaagttggcgcaggtgattgattttatctcctgggacagctacccgatgtggcatcgtgagaaagatgaaacgcagcttgcctgttataccgcgatgtatcatgacctcatgcgtaccctgaaacagggccgtccatttgtcttaatggaatcaacgccaagcgcgaccaactggcaacctaccagtaagttgaagaagccggggatgcatatcctctcttctttacaggctgtcgcgcacggtgcggatgcggtgcagtatttccaatggcgtaagagccgtggctccgttgagaagttccacggtgcggttgtcgaccatgttggccacattgatacccgtgttgggcgggaggtgagcgaactgggtcgtatactcgaggccatgtcgccggtgatgggaagtaaagtagacgctgatgttgccatcatttttgattgggaaagtcgttgggctatggacgacgccgaaggcccacgtaattgtggcttggaatatgagaaaaccgttgccgagcattaccgtccattctgggaacggggcattgcggtcgatatcattaacgctgactgcgatctgtcgggttacaagctggtcattgcaccgatgctctatatggttcgcgaagggtttgctgaaagggcgacgcgttttgtagagcaaggtgggcagtttgtcgcgacctactggagcggtattgtcaacgaatctgacctgtgtcatctcggtggcttccctggccctctgcggccgctgttgggtatctggtccgaagaaattgactgtctggccgatggcgagagcaatcaagtccaaggacttgcaggcaataaagccggtctacaggggccttatcaggccatccatctctgcgatttgattcatcttgaaggggcgacagccgtcgcgcgctatagagatgacttctatgctgaccgtgcggcggtgaccgtaaactttgttggcgaaggtaaagcctggtatgtcgcttcacgtaacgatgcggctttccagcgtgatttcttcatgaacattgccgaggagctaaacttggcacgtgcgctagacacccagttcccttatggggttaccgctcaccgtcgtaccgatggtgagagtgaatttatcgtggtagaaaactacagtaatgacagcaaatcgctggtgttacctgcggtataccgcgatatggtcgaccagcagccggtacaaggtagcctgacgcttgccccatggggaagccgagtgctaactcgctatctcgaataa

SEQ ID NO: 41545 - DNA, 1383 bp, Yersinia pestis
atggcgaaagcacccaaacgggcgtttgtctgtaatgaatgtggcgcagattatccgcgttggcaggggcaatgcagtgcctgtaacgcctggaataccattaccgaagtcaggctggcggcggtagcgtcatcgtctcgtaatgaccgttttgttggttatgctggcgatgccggtgttagccgggtacagaagctgtccgatattagtctggaggagttgccgcgcttctcaaccggctttctcgagtttgatcgggtgctgggcggcggggtggtaccgggcagtgccattttgattggcggtaaccccggcgcaggcaaaagtactctattgctgcaaaccctctgcaaactgtcggaaaacatgaaaaccctgtatgtcactggcgaagagtcgttgcagcaggtcgccatgcgcgcgcaccgtctgggcctgcccacggcggggctgaatatgttgtcggaaaccagtatcgagcagatttgcctgatagcagagcaagaacagccacggctgatggtcatcgactccattcaagtaatgcatatggcggatatccaatcatcgccgggcagtgtggcgcaagtgcgcgaaactgcggcttatctgactcgttttgctaaaacccggggtgtcgccatcgtgatggtggggcatgtgaccaaagacggttcgctggccgggccgaaagtattagaacactgtattgactgctccgtgatgcttgatggtgatggcgactcacgctttcgtactctgcgtagccacaaaaaccgctttggtgcggttaacgaactgggtgtgtttgccatgaccgagcaaggtctacgggaagtcagtaatccatcggcgatctttttgagccgtggcgatgaagtgaccgcaggcagttcagtgatggtggtgtgggaagggactcgcccattgctggtggagatccaagcgctggtagatcattcgatgatgtcgaatccacgccgggtcgctgtcgggctggaacaaaaccgcttggccatcttattggctgttttacaccgccacggtggtttgcagatgtcagatcaagacgtgttcgttaacgtcgttggcggggtgaaagtcactgaaaccagcgctgatctggcattgttgatgtcgctggtctccagtctgcgtgaccgcccattaccgcaagatttagtggtgtttggcgaggtggggctggccggtgaaatccgcccggtaccaagtggtcaggagcgtatctccgaggcggcaaagcacggttttaaacgtgccatcgtgccttatgccaatatgcctaaaaaaccgctacccaatatgcaggttttcggggtaaaaaaactggccgatgcgttggctgttttagaagatttataa

SEQ ID NO: 41546 - DNA, 360 bp, Yersinia pestis
atgagcaccaccctatttaaagattttcagtttgaggcggcacatcggttaccgcatgttcctgaaggccataaatgtggccgtttacacggtcactcatttatggttcgtttagaggttacgggtgaagttgatgctcactctggctgggtgatggattttgccgccctaaaagccgtgtttcaacccatttgggaacgtcttgatcatcattatctgaacgatattcctggcttggaaaacccaaccagcgaagttttagcccgttggatttggcaacaacttaaaccccaattgccagaactcagtgcggtgatgatcaaagagacctgctctgctggctgcgtttatcgcgggtaa

SEQ ID NO: 41547 - DNA, 1296 bp, Yersinia pestis
atgtccaaaattgttaaagtcatcggtcgtgaaatcatcgactcccgtggtaatccaactgtagaagccgaagttcatttagaaggcggtttcgttggtttggctgcggcaccatcaggtgcttctactggttcccgtgaagcactggaactgcgtgacggtgacaaatcccgtttcttgggcaaaggcgtactgaaagccgttgctgcagtaaatggcccaattgctcaggcagttatcggtaaagatgccaaagatcaggccaacatcgataaaatcatgatcgatctggacggtactgagaacaaatcccagtttggtgctaacgccattctggctgtttctttggcagcagcgaaagcagcagcagcgtctaaaggcatgcctttgtacgagcacattgctgaattgaacggcaccccaggcaaattctctatgccactgccaatgatgaacatcatcaacggcggcgaacatgctgacaacaacgttgatattcaagagtttatgattcagccagtcggcgctaaaacgttgaaagaagcggttcgcatcggttctgaagtgttccaccacctggctaaagtactgaaagccaaaggcctgaacacggctgttggtgatgaaggcggctatgcaccaaacctgggttctaacgctgaagcactggctgttatcgctgaagcagtaaaagcagcaggctacgagctgggcaaagacattactctggctatggactgtgcggcttctgagttctacaaagacggcaaatatgttctggctggcgaaggtaacaaagccttcacttccgaagaatttactcacttcctggaagacttgaccaagcagtatccaattgtctccattgaagatggtctggacgaatctgactgggctggcttcaaataccagactgaagtcctgggtgacaaaatccagttggtgggtgatgacctgttcgtaaccaacaccaagatcctgaaagaaggtatcgagaaaggtgttgctaactctatcttgatcaaattcaaccagatcggttctctgaccgaaactctggctgcgattaagatggcaaaagacgcaggttacaccgcggttatctctcaccgttcaggtgaaaccgaagatgcgactatcgctgacttggcagtcggtaccgcagcaggccaaatcaaaaccggttctatgagccgttctgaccgtgttgctaaatacaaccaactgatccgtattgaagaagcgctgggcgaccgcgcaccattcaacggtctgaaagaagttaaaggccagtaa

SEQ ID NO: 41548 - DNA, 1638 bp, Yersinia pestis
atgacaactaattatatttttgtgaccggcggggtcgtatcctctctgggtaaaggcattgccgcagcctccctggcggctatacttgaagcccgtggcctcaacgttaccatcatgaaactggacccgtatatcaacgtggatccgggcaccatgagcccgacacaacacggggaggtttttgtcaccgaagatggtgctgagaccgatctggatttagggcactatgagcgcttcattcgcaccaaaatgacccgtcgtaacaacttcaccactggccgtatctattccgaagttttgcgtaaagaacgccgtggcgactatttgggtgcgactattcaggttattccccacatcaccaatgcaatcaaagagcgcatcattgaaggcggtgaaggccatgatgtggtattggtcgagattggcggcacggtaggggatatcgaatccctgccattcctggaagctattcgtcagatggcggttgatgttggccgcgagcatactctttatatgcacctgacgctggttccttatctggctgctgccggtgaagtcaaaaccaagccaacgcaacattcagttaaagaactgctgtctatcggtattcaaccggatgtgctgatttgccgttctgaccgtgccgttcctgctaatgaacgtgccaaaattgcattattctgtaatgtgccagaaaaagcagttatctctcttaaagatgttgattccatttataaaatcccagggctattgaaatcacagggccttgacgattatatttgtaaacgattcagcttaacttgtcctgaagcaaatcttgcggaatgggaacaggtattatacgaagaatcaaatccgggtggcgaagtgaccatcgggatgatcggtaaatatgtagaattgccggatgcctataaatcggtgattgaagcattgaagcacggtgggttgaaaaatcgtctgaccgttaatattaagcttattgattcgcaggatgttgaaacccgcggtgaagagatgcttaaagagcttgatgctatcttgataccgggtggtttcggctaccgtggcgtggaaggcaaggtcttggcggcgcgttacgcccgtgaacacaatattccttatctgggtatttgcctgggtatgcaagttgcgctgatggagttcgcccgcaatgtggcgggaatggaaaacgcgaactctacagaatttgtgccagactgtaagtatccggtggttgcattaatcaccgaatggcgtgatgaagacggtaacgttgaaatccgtacggaagaaagcgatttgggcggtaccatgcgcgtaggggggcagcaatgtcacctaaccgagggaagtttggttcgtcaaatgtatggcgaaccgaccatcgttgagcgccatcgtcatcgctatgaagtaaacaatatgttgttgaagcagattgaagctgccggtttacgcgtggcggggcgttctgcagataacaaactggtggaaattatcgagttaccagaccacccgtggtttgtggcttgtcaattccatccagaatttacttcgacgccacgtgatggtcacccgttgtttgccggctttgtgaaagcggctggtgattatcaaaagcgccaggtgaaataa

SEQ ID NO: 41549 - DNA, 843 bp, Yersinia pestis
atgactcaacctgttacttcccctgattctacagcagtcgccctgcaacgtttattggatattatgcgcgctctgcgtgacccagagcaggggtgcccatgggatcgcaaacagacctttgacaccatcgccccttatacgttggaagagacttacgaggtgcttgatgcgattgcgcgcaaggactttgatgaccttcgagacgaactgggtgatttgctgttccaggtggtgttttatgcccaaatggggcaggagcaagggctgtttacctttgatgacgtttgccatgcgattagcgataagcttgagcgccgccatccccatgtcttctctgatacgtctcaaaacgtcactcaggcggcggttaacagagaggccgctctggcgggctgggaatcacgaaaagccgaggaacgagcagaaaaagcattgtattcggcattggacgatattcctgatgcattgcccgccttgatgaaggcccataaaattcagaagcgttgtgcgtcagtcggttttgattggaacacgctagggccggtactcgataaggtctacgaagagattgacgaggtcatgtttgaagcgcgtcaggcagtcgtcgatgaggacaaattgggagaggaaattggcgatttactctttgccacggttaatctatcgcgccatctgggccataaagctgagaatgcgctgcaagcggctaatcgtaagtttgaacggcgttttcgtcaggtagaacaaatagttacggcatcaggtcaaaccatggagagtgcgacgcttgatgaaatggaagcagcctggcagcaagttaaaaagcaagaaactgaaatgtaa

SEQ ID NO: 41550 - DNA, 2235 bp, Yersinia pestis
atggttgcggtacgaagtgcgcatttaaacccagcgggtgagtttgctcttgacgattggattgccagtttagggcttgccaatccgcagtcatctgagcgattagccgaaacctggcgttactgtgaacaacagacgcaaaaccatcccgatgcctcgttattactgtggcgcggtcttgaaatggttgaaattctttccactctgagtatggataacgacagtatgcgcgcggcgctgctgttcccgctggtagatgccaatatcgtggacgaaactaccctgaccgagcaattcggtaaggggattacgtatctggtacacggcgtgcgtgatatggatgctatccgccagttaaaagccactcacaacgattccatgagctcggagcaagtggataacgtgcgccgtatgttattggcgatggtggaggatttccgctgcgtggtgatcaagctggcagagcggatcgctcatctgcgtgaagtcaaagatgcaccggaagatgaacgtgttctggcggctaaagagtgttccaatatttacgcaccactggcgaaccgtttggggattggccagattaaatgggagctggaggatttctgcttccgttatctgcatccagatgaatataagaaaatcgccaaattactccacgagaggcgtattgatcgcgaacaatttattgatgacttcgttgcttcattacataaggcgatggccgacgaaggcattaaagccgacatttatggccgaccgaagcatatctacagcatttggcgcaaaatgcagaaaaagtcgctggccttcgatgagctattcgacgtccgcgcggtgcgggtggtggtggaacgtttgcaggattgttatgccgcgttagggattgttcacacgcacttccggcatttacctgatgaatttgatgattatgtggccaaccctaagccaaatggttaccaatcgatccataccgtggtgcttgggccacgaggtaaaacgttagagattcagatccgcacccgccagatgcatgaagatgccgagttgggggttgctgcgcactggaaatataaagaaggggccgtggcagcgggccgttcgagttatgaagggcgaatcgcctggttacgtaaattgatcgcttggcaggaagagatggctgattctggcgaaatgctggatgaagtgcgcagccaggtatttgatgatcgggtgtacgtgtttacaccgaaaggcgatgtgattgacctgcctgccggctcgacgccgctggattttgcctaccatattcatagcgatgtgggccaccgttgtatcggtgccaaaatcagtggccgcattgtgccgtttacttatcagttgcagatgggtgatcaaattgaaattatcactcaaaaacagccaaacccaagccgtgactggctgaatcctaacctcggttacatcacgaccagtcgcggacgttccaaaattcataactggttccgcaaacaagatagagataagaatattctggctggccggcaaatgctggatgatgagctggagcatctggatatcagtctgaaagaggctgagaagctgcttgttccgcgttacaacatgaattcgatggatgaagtgttagcggcgattggggggggtgatatccgtctgaatcagatggtgaacttcctccagggcaaactgaataagccaacggcagaagaggctgatctagaagcactccgtcatctgaataacaagcatcagcccgcgccacgtaacgccagcaaagacagtgggcgtattgtggtcgaaggtgtcggtaacctgatgcaccatattgcccgttgttgccagccgatccccggtgatcaaattatcggttttatcacgcaagggcgggggatatcgattcaccgtgcagattgtgagcagttggctgaattggaatcccatgcaccggaacggattgtcgatgcagtctggggcgaaagctactccagcggttattcgctggtggtgcgggttacggctaatgaccgcagtgggttattgcgcgatatcactacgatcctggcaaatgagaaagttaacgtactgggcgttgccagccgcagcgataccaaaaagatggtggcgactatcgatatggatatcgagatctataacttgcaggtgctgggccgggtattggccaaactgaatcagttgccggatgtcatagacgcccgtcgcctccatggcaattag

SEQ ID NO: 41551 - DNA, 1446 bp, Yersinia pestis
atgaaaaaaacaactttagtattaagtgcattggcattgagcattggtttcgccatgggcccggtttcttccgtcgttgcggcagagacggcagcatcgagtagccagcagctccctagcctggcgccaatgctagagaaagtaatgccttcagtggtcagtatcaacgttgaaggtagtgcgcctgtaagcagtgctggtgcacgcggtatgccaccacaattccagcagttttttggtgataactcgccattctgtcaggacggttcaccgttccaaggctcgccaatgtgtcaaggggatctgggcggactagggcagggaatgccaagtaagcgggaattccgttcgcttggttcaggtgtcattattgatgcgggcaaggggtatgtcgttaccaataaccacgtggtcgataatgcgaacaagatcagcgtaaaactgagcgatggccgcagttttgatgccaaggtgatcggtaaagatccacgtaccgatatcgcactgttacaactgaaagacgctaaaaatctgactgcgattaagattgccaattcggatcaactgcgtgtcggtgattataccgtcgctatcgggaacccgtatggcttgggtgaaaccgtgacatccggtattgtctctgctttagggcgcagtggtttgaatgtagaaaactatgaaaactttatccagactgatgcggcgattaaccgtggtaattccggcggcgcattaatcaacctgaacggtgagttgattggtattaacaccgctattctggcaccggatggcggtaacattggtattggctttgctatcccaagcaacatggtgaagaacctgacatcacagatggttgagtttggtcaggtaaaacgcggtgaactgggcattatggggaccgagctaaactctgaactggcaaaagccatgaaggttgatgcgcagaaaggtgcctttatcagccaggtcgtgcctaaatctgctgcggcaaaagcgggtatcaaagcgggcgatatcattgtcagtatgaatgggaaagccatcaatagttttgcagggttccgcgccgagatcggcacgttacctgttggcagcaaaatgaccttgggtctgctgcgtgatggcaaaccgatcaatgtggatgtcgtcctggagcagagcagccacagtcaggtggaatccggcaatctctacaccggtattgagggggctgaactgagtaacagcgacgttagcggcaagaaaggggtgaaagttgatagcgtaaaaccaggcactgctgcggcgcgtatcggcctgaaaaaaggtgatatcatcatggggattaaccagcaaccagtccagaacctaggtgagctgcggaaaatcctcgatgctaaaccaccggtattggcgttgaatattcaacgtggtgatacttcactctatttattgatgcagtaa

SEQ ID NO: 41552 - DNA, 858 bp, Yersinia pestis
atgcgaagtatcgggtggcgttttttcactctagggtggctgattttattagccggttgtgcgactgatgtttcgttatcaggaaaaaataagagcacagaagctaaccgaattcagtttcaacggatgggctctgcgccagagtccggtgcggcagacgtcaccagcctggatctccagcccggcgatattttgttgtcatcatcaactggcattaactcgttgggtatccgtatattcagccttgccccagtcagccatgcggctatttatctgggagaagagcaagtggccgaggcaaccagtacgggggtgaatattgttagccttaacgaggcgatagatcataacacggcggttattgccttccgttaccccggattaaccccggaacatgccgctaaattgcgtgagtttgcattagataaagagggctcggattacaacttcggagggatcgtattgatcgccccgtatatgatcaccaaacgaatatgcgaattgccgttatttaatgcgaccgttcgtaaccactgccttagcctgctagccacagtgcaattaggtgacggtgggtcactgacggaagatcagcgcttcttctgttctcagtttgtcttggaagcctacaattatgcagggcacccaatcagcgactccaatccggtatggataacaccggctgatttactgcatatgcgcgaaggcgacagctcttcattccgctcaaatcaacccctatcgtatattggccatttaaaacagcgcagtagcttatttacaggcaacaaaggattggcgatgaacaatgcagacacattacttgaggacaaaagcccccgtatgctgagccaataa

SEQ ID NO: 41553 - DNA, 702 bp, Yersinia pestis
atgaaagtaggcattattggcgccatggaagaagaagtgacattgctgcgtgaccggattgaaaaccgtcaaacattagcgcgtgcaggttgtgaaatttataccggtcagctaaacggtattgatgtcgcattactgaaatctggcataggtaaggttgcggcggcaatgggaaccactctgctgctagaacattgccaaccggacctcgtgatcaacaccggttccgcaggcggcctggactctagcctcaaagtgggtgatatcgtggtctccaatgaagtccgctatcatgacgcggatgtaaccgccttcggctatgagcccggtcaaatggcgggttgccctgccgccttcgtcgcagatgaagacttgatcgcgttggcagaaaattgtattcaacaattaaaactcaatgcagtccgtggcctaatttgtagcggtgatgctttcattaatggcgccgagcctttagcgcgcattcgggcggccttcccaacggtggcagcagttgaaatggaagccgcagctatcggccacgtttgctacctgtttaataccccctttgttgtagtccgagctatttctgatgttgccgatcaagcatctcacctaagctttgaagagttcttggtggtggcggcgaaacaatcgaccctaatgatcaaagccatgttaaccaccttggcgcaacgcggttaa

SEQ ID NO: 41554 - DNA, 843 bp, Yersinia pestis
atgatgccactgggtctttttcctctgccacgcgcagcagcagtgttgctaattagcctgctaacactcccagcacaggctgccgaacgggttatcagtttatcgcccagtaccacggaactggcttatgctgcaggtttgggcgataagttggtcgcggtcagtgcgtactctgattacccggaatcggctaaaaagttagaacatgtggcgtcgtggcaaggcattaacgttgagcgtattctggcactaaaacccgatctgatcctcgcctggcgtggaggtaatccacaacggccgctggatcaattagcggcgttgggtattccgattttctactctgaccccacgcatatcgatcagattgccagcgatctggataagctagcgcaatacagcccgcaccccgagcaggcacatcaggccgctgaacaattccgtcaacacgtcaacacactgcgtgatcgctatgcccgcagtcagcccaaacgtacctttttgcaattcggtactcagccactgtttaccagctccgggcacaccttacagagtgaagtcgtttcactctgtggtggagaaaatatttttgccgacagccgggttccctggccacaagtcagtcgtgagcaagtgatgacacgtaagccacaggtcatcgtggtaagcggtacgcagtcgcaagtcgataacgtctccgccttttggttgcctcagcttgtggtacctgttatcgccctgaatgaagactggtttaatcgcgccagcccacgtatcctgctggccgctcaacagctgtgccaacaaatggccagcattccaacccctgtcgcggagtcacattaa

SEQ ID NO: 41555 - DNA, 1998 bp, Yersinia pestis
atgagcgccataagtttacgccagggttggcggctccctgcgggtctacttggcctactggtggttattgccgtttccctgacattttataacctcagtcaattactgccttcctctctctggtctgaagccctatggcgacctgatcgagacgatgtacgccagatgctatttcattacagccaattacctcgcctggcggtggcattactcaccggagcggggctggggctggtaggggttttatttcaacaagttctgcgtaatcccctggctgaaccggccactctgggggttgccgcgggtgcccagttagggctaacgatagccacactgtggatgttacccggtggtgagttaacccggcaactggcggcaatggccggtggtatgacggttggggcactggtctttggcgtagcctgggggaagcgcctgtcaccggtgacactgattttggccggtctggtgttggggctttactgtagcgcggtgagtaacctactggcactgttcaattatgaccagttacaggggttgtttttgtggagcagtggcgcactgaatcagcaggattggagtacggtacagtttctgttaccgcgcttactgattagcggcatattggcggccttcttgattcgtccgttgaccctcttggggttagatgatggtgtcgctcgcaatctggggttagggctgtcactggcccgcctgagtgcgctgggattagccattatattcagcgccatgttggttaatgcggtgggtgtgattggttttatcgggctgtttgcaccattgttggcgaaaattttgggggcacggcgcttatcacaacgtctgatactggcccctattgtcggggcattgctgctctgggtgacggaccagggcatcatctggctgacacaagtctggcgagagatcccaaccggtgccgctacggcgctgattggtgcgccattgttattgtggttgttgcctcgcttacacagtacgactgcgccaaacatggatttgggtgactcggttccggtagagcggcagcgtttaggattatggatcagtgcgggtttgctgctgctgttggggggattgatcgtggcgctgatgtttggccgtgatagccaaggttggcgctggatcgtcggtgatgaattacaggcgctgttacattggcgctggccacgggtattggcggcactggctgccggtatgatgctggcggttgcaggaacattaattcaaaagttgactggtaacccgatggccagcccggaagtgttgggtatcagctctggtgcagctttcggcgtggtcattatgttgtttatcgtccctggtaatgcactggaatggttgttgcctgcggggagcctaggggctgccatcacgctattgctgatcatggttgttgctgggcgaggcgggttttctccgggcaggatgctattggcagggattgcattgagtaccgcttttaccacggtgatcaccatgttgctggccagtggcgacccacggatgcgcgggttgctggcatggatttctggctcaacttattctgttgagggctcacaagcgttgacgacaggcttaattgccgtggtgttgatagcactagcccctttgtgccgccgttggttaatgattttgccattaggcagtgtgaccgccagagcattagggatggctctggcccccagccggttagcgattttattattggcagccacattgacggcggcggcgaccctgaccgtcgggccgttgagttttgtgggattgatggctccgcatatggcccggatgctgggtttccgtcgtgctattccgcaactgattattgcggctattttgggcggattattgatgatattagctgattggtgtgggcggatgctgttgttcccaaatcagatccccgcaggcctattagcgacatttatcggggcgccctattttgtttatttgctgcgcaaacaggggcggtaa

SEQ ID NO: 41556 - DNA, 795 bp, Yersinia pestis
ttggacctacaggcaagccactccagcacttttatactccgtgaactgagtttttcggttcctggtcgaaccttattacagccgctgtcactgacgtttccgcaagggaaagtctgtgggttgatcggccataacggttccggtaaatcgacattgctaaaaatgctgggccgtcatcaaccaccatcaagtggtcaggttgtgctcaacgatatgccactggcccaatgggatagcaaagcgtttgcccgcgaagtggcctatttaccgcagcaattaccggccgcagaagggatgacggtgcgtgaattagtcgccatcggccgctatccgtggcatggcgcgctagggcgctttcgtcaggaagatcgccaacaagtcgaagaggcgattgcattggtagatttgaaaccactggctaaccgcctggtggacagcttgtctggtggtgagcggcagcgggcttggttggcgatgatggtggcgcaaaacagccgctgcctgctgctggatgagcctacctccgcgctggatattgctcatcaggtggaggtcttggggctaattcaacgtctcagccacgagcgtggcctaaccgtaattgccgtgttacacgatatcaatatggcggctcgttattgtgaccatctcgtggcattgcggggcggtgagatgatcgcccaaggcccggcagatagcctgatgcagagtgcggtgttagaacaaatttatggtatcccaatgggtattttaccgcacccggctggcggtgcgccggtaagttttgtttattaa

SEQ ID NO: 41557 - DNA, 2475 bp, Yersinia pestis
atgtctggggacgatcgtgagccgatagggcgcaagggcaagaaagcccaacccaaagcagcaccaaaacgtccactgcgccgtcggcgtgatgaagatgaatacgaagaagattatgacgaagaacaaaatgattatgatgacgaggaggaaccgatgccaagaaaagtagcatcacgcccacctcgcaagaaacgccgttggctcgggttgttgatcaaactgttcctgattggggccgtggctttggcgatctatggggtttacctcgattcgcaaatccgcagccgtattgatggcaaagtctggcaattaccggctgccgtgtatggccgcatggtcaatcttgagccgggtatgtcctacagcaaaaaagagatgatcgccttgctggaagggatgcaataccgtcaggtcagtcgcatgacccgccctggggagttcacggttcagaacgacagtatcgatatcttgcgccggccgttcgatttccctgatggtaaagaaggccaaattcgcgcccgtttactgttcaaaaatgatcgtctggcccagattcaaaacctggataatcagcgtgatttcgggctattccgcctcgatcccaagttgattaccatgctgcaatcacctaacggtgaacagcgtctgtttgttccgcgcgccgggttccctgatttgctggtggacaccttgctggcgactgaagaccgccatttctatgagcatgatggcgtcagcccgtattccattgctcgagccgtggtcgctaacctgacagccggtaaagcggtgcaggggggcagtacgctgacgcaacagttagtgaaaaacctgttcctgaccaatgaacgttcgctggtacgtaaacttaacgaggcctatatggccctgttgatggattatcgctacagcaaagatcggatcttggaactctatctgaacgaagtctatcttggtcagagtggtggtgaccaaatccgtggcttcccgctgggtagcttgtattactttggccgcccggttgatgaattgagtctcgatcagcaagccatgttggttggcatggtgaaaggggcctcactgtataacccgtggcgtaatcctaagctggcacttgagcggcgtaatttggtcctgcgcttgttgcagaatcaagggattatcgatgctgagctttacaccatgctcagtgcccgtccgctgggggtgcagccgaaaggcggagtcatcacacctcaacctgcttttatgcagatggtgcgccaggagctgcaacagaagttgggtaacaaggtcaatgatctgtctggcgtgaagatcttcaccaccttggatccggtttcacaagatgccgcagaaaaagccatcgaagacggtgttccggcgctgagagccgcccgtaatatgaatgacctggaagcggcgatggtggtggttgaccgtttcagtggcgaagtgcgtgccatggtgggcggttcacagccacaatttgccggttttaaccgtgcgatgcaggcccgccgtttggtggggtcacttgccaaaccaccaacctatctggccgcgttgagtgagccggataagtaccgcctcaatacctggctttcggaccaaccgctgtcgcttaaattgtcgaacggttcattgtggcagccgaaaaactatgatcgccagttccgtggtcaggtcatgttgatggatgcgttggtgaactcactgaacatcccaacagtcaatttggggatgtcagtgggcttagatcagatcagcgccacactgcaacgccttgggatcccgaaatcagtcattaatccggtcccagccatgttattgggggcgattgacctgactccggttgaagttgcgcaggagtatcagacaatcgccagtggtggcaaccgtgcaccgttgtcggctgtgcgttcggttattgctgaggatgggaccgtgctgtatcagagcttcccacaggcagaacgtatggtgcctgcacaagcttcttacctgacgctgtatgcgatgcagcaaggggttgtccgtggtacatcacgctctctctcggcgaagttcggcaaatataatctggcggccaaaaccgggacaaccaacgatctgcgtgacagttggtttgccggtattgatggcaaagaagtgaccattgcctggattgggcgcgacaataacggcccgactaagctgaccggggccagcggcgcgctaaccttgtatcgccgctatctggaaaaccaaacgccgttgccgctgattctgcaaccgccagaaggcattagccaaatgaacattgattcggcggggaacttcgtctgtggtgaagggagcgggatgcgcgtcattcctgtttggaccgaaaatccgcaagctttgtgtcagggatcaacacccactcaagaccccacaaaacctaacgatgatggtgttgccgattggatcaaagagatgtttggccaataa

SEQ ID NO: 41558 - DNA, 1518 bp, Yersinia pestis
atgtcagagcaaaaaccacaagtcgctgagcaagcgcaagaactcaatagtgagttacaagcccgtcgagaaaaactggctgtcttacggggaaagggaattgcattccctaatgatttccgccgtgagaacctttccgaccagttgcatgccgagtttgacagtaaagagaatgaagagttagaagcactgaatatcgacgtaaccgttgctggccgtatgatgacccgccgtatcatgggtaaagcatcatttgtgactctgcaagatgttggtggccgtatccagttgtacgtttcccgtgatgacctaccggaaggcgtttataacgaagaattcaaaaagtgggacctgggcgatatcctgggtgcgcgcggtaaactgtttaaaaccaaaaccggtgagctgtcgatccactgtagcgaactgcgtctgttgaccaaggctctgcgtccattgccagataaattccatggcttagctgaccaggaaacccgttaccgccagcgttatttggatctgattgctaacgacgagtctcgtcatactttcaaagtccgttcgcaagtgatgtccggtatccgtagcttcatggttgaaaaaggcttcatggaagtcgaaacgccaatgatgcaagtgatccctggcggcgcttccgcacgtccgtttgtcacgcatcacaatgcgttggatatcgatatgtatttgcgtatcgcgccagagctgtatctgaaacgtctggtcgtggggggcttcgaacgtgtgttcgaaatcaaccgtaacttccgcaacgaaggggtttcgccacgtcataacccagagttcaccatgatggaactctatatggcttatgcggactataaagacctgatcgtcttgacggaagagctattccgcactctgaccgaaaccatattggggagcagtgtggtgcaatatggcgaacagacttttgatttcggtaagccttttgccaaattgaccatgaaagaagctatttgtaaatatcgtcctgaaaccaatgtcgcggatttagacgatatggataaagccgtcgcaattgccgaatcattgggtatcaaggttgagaagagctggggcctgggtcgtattcaatgtgaaatctttgaagagaccgcagaaagtcatcttatccagccaacgttcatcacagaatatccagccgaggtttctccgctagcacgccgtaatgacgataatccatttatcactgaccgctttgaattcttcatcggtggccgtgaaattggtaatggcttctctgagttgaacgatgccgaagaccaggcgcagcgtttcgccgatcaggtaagtgctaaagaagctggcgatgatgaagcgatgttctacgatgaagactatatcactgcattggaacatggcttaccaccaaccgcagggctaggtattggtattgaccgtatggttatgttgtttaccaatagccataccatccgtgatgtcattttattcccagcgatgcgcccggtaaaataa

SEQ ID NO: 41559 - DNA, 1099 bp, Yersinia pestis
atgtttgaaataaacccggtaaaaaaccgaattcaggacctgtctgatcggacagccgttctcagggggtatctttgactatgatgccaagaaagagcgactggaagaagtaaacgccgagctggaacagcccgacgtctggaatgaacccgaacgcgctcaagcgttgggcaaagagcgttctacgctggaagagattgtcaccaccattgatcaattagagcaaggcttggaagacgtgtccggcctgctggaattagccgttgaagctgatgatgaagaaacctttaacgaaacaattgctgagttagaggttcttgatggcaagctgggccagctcgaattccgtcgtatgttctctggcgaatatgatcgcgccaactgctatctggacttacaagcaggctctggtggcactgaagctcaggactgggccagtatgttactgcgtatgtacttgcgctgggctgagtctagaggctttaaaactgagatcatcgaagaatctgacggtgatgttgctggtttgaaatctgccaccgtcaaaataattggtgaatatgccttcggttggttacgtactgaaactggcgtacaccgtctggtacgtaaaagcccatttgattcgggcggtcgccgccatacctctttcagttcagcctttgtctatccagaagttgatgacgatattgatattgaaattaacccggcagacctgcgtattgacgtttaccgtgcatccggtgcgggtggtcagcacgtcaacaaaacagaatctgcggtgcgaattactcatattccaaccaatatcgtgactcaatgccagaatgaccgttcgcagcataaaaacaaagatcaagcgatgaaacagctgaaagctaagctgtatgagtttgagatgcaaaagaaaaatgctgataaacaggttttggaagacaataagtccgatatcggctggggtagccagatccgttcttatgtattggatgactcccgtattaaagatttgcgtaccggtgtggaaacacgcaacacgcaagctgtactggatggcgatctggacaaatttattgaagcaagcttgaaagccgggctatga

SEQ ID NO: 41560 - DNA, 1734 bp, Yersinia pestis
gtgacgttgaaaacccaacttcgccgccgtgaggcggcagatgacagccatttacctgcgcaattgcccccgttactgcgtcgtctctatgctagccgtggcgtaaaggatgcgcaggagttggagaggggcgtgaaaggcctactggcatggcaaaaactggatggtattgacgctggcgtcaccttattacaacaagccctggctgatcggcggcgtattgtcattgtcggcgattttgatgctgacggcgcgaccagtaccgcgttggcggtgctggctttgcgcagtatgggcggcagtaaccttgattatctggtacctaaccgatttgaagatggttatgggcttagccccgaagtggttgaacaagttgcggccagaggggcagagctgattgttactgtggataacggtatttcctctcatgccggggtcgatctggctcatgccaaaggtattcaggttctggtgacggaccaccatttgccgggcgaaacattacccgcggcggatgccatcattaacccaaatctggccggttgcgattttttatccaagtcattggcgggggtcggtgtcactttctatttgatgctggcgctgcgcgcccgtctcagggaatgtggttggtttgaacaacgtaccttagcggtccctaatctggctgaactgttggatttggtggcattgggtacggtggcagatgtggtgccgttggatgccaataaccgtattttggtccatcaagggttaagtcgtattcgtgcggggaagtgccgtccaggaattcgcgcattattggaggtcgctaaccgtgatgcgcgtcaactggttgcgaacgatttaggcttttctcttggcccacggttgaatgcggcggggcgtttagatgatatgtccatcggggtggcgctactgctgagtgacgatattgctcaggcgcgagcactggcaatcgatcttgacaccttgaatcaaacccggcgcgagatagaacagggtatgcaggttgaagctttgcaactgtgtgaccagttggagcgcaccagcagtgaattaccttacggtatcgcgatgtaccatccagaatggcatcagggcgttgtgggtattttggcttcacgcatcaaagaacgctttcaccgcccggttatcgcttttgccccggcgggagaagggttattgaaagggtcgggtcgtagcgttgcgggtttgcatatgcgtgatgcccttgagcgtctggacactctgaacccagggttaatactgaagtttggtgggcacgccatggcggcagggttatcgctggaggaaggtaaattcgatgaattccgccagcgttttgcagatttagtcggtgaatggatggatgcttcgcaattggaaggcgttatttggtctgatggcgaactgaacggtgctgagttatcactggagaccgcagagctattgcgcgacggtggtccatgggggcaatctttccctgagccgacctttgatggcaaattccgtatcttacagcagcgcttagtgggtgagcgtcacctgaaactcatggtagagccgctgaatggcgggcctttgttagatggaattgcctttaatgtcgataccactttgtggccggatagcagcgtgcgagaagttaaattggcctataaactggatattaatgaatatcgtggtaatcgcagtgttcagttgctggttcaacacttgtggccttattag

SEQ ID NO: 41561 - DNA, 717 bp, Yersinia pestis
atgaaaaaaagtttattgctgctgccaatgttaatggctgcattatcgggggttgctaatgcagatgattctgctattcagcaaaccttaaaaaaattagatatccaacaagctgatatccagccgtcacctatcccaggcattagtacggtgatgaccgaaagcggcgtgctctatatctcagcagatggtaaacatctgctgcaagggccgctgtatgacgtgagtggcgatcagcccatcaatgtgaccaatcaggcgttgctgaaaaaactggaagcattgagcagtgaaatgattgtgtataaagcacccgaggaaaaacacgtcattacggtgttcacagacattacctgcggctactgccgtaaattgcacgaacaaatgaaagattataatgcgcttggcatcactgttcgctatctggccttcccgcgtcaggggttaagctctcaggcggaaaaagacatgcgttctatctggtgtatggctgatcgtaataaagcctttgatgatgccatgaaaaataatgatatctccccagcaacctgcaaaaccgatatcagcaagcattatcagctaggtgtgcaatttggtatccagggtacgccagctattgtgctgcaaaatggcactattgtcccaggctatcagggaccgaaagaaatgctacagatgcttaatgcgcatcaggcttcactaaaagcgggtggttga

SEQ ID NO: 41562 - DNA, 900 bp, Yersinia pestis
atgaaacagcaagataacccgctgattgaacaatttcttgatgctctgtggctggaacgaaatctggcagagaatacactggcgtcataccgtttggatttacatgcgctggttggatggttgacacaccataacagtgatttattgcgcgccagcccgcaggacttgcaatccttccttgctgaacggatcgagggtggctataaagccaccagctcggctcgtttactcagtgcgatgcgccggttatttcaatatttataccgggagaaactgcgtgaggatgatccgactgcgctgctctcttcacccaaattaccgcagcgcttgccgaaggatttaagtgaggcacaggtcgatgcgttacttaactcgcccaatgtggacattcccttggaactgcgcgataaagcaatgctggaagtgctctatgccaccggcttgcgggtgtcagaattggtcgggctgaccatcagtgatgttagtctacgccaaggtgtggtgagagtgattggtaaagggaataaagagcgcttggtccccttgggggaagaagctgtgtattggattgagaactatatggagcatggccggccttggttggttaatggcgcatcgctggatgtattgttccccagtaaccgtagccagcaaatgacccgtcagactttctggcatcgcatcaaacactatgcgatccttgccggtattgatagtgaaaggctttcaccccatgtgctacgccatgcctttgccacgcatctgctgaatcacggtgccgatttacgtgtagtgcaaatgttactgggccacagtgatctgtcgacaactcagatttatacgcatgtagcgactgaacgtttgagacagctacatcaacagcatcatccacgcgcttaa

SEQ ID NO: 41563 - DNA, 1479 bp, Yersinia pestis
atgttaaaaggagtgcaagtcatgttcaaatctgtgttgttttggaaaatagttacgctgctgggattaatgctattgatgatgatccccaaagggatgctgctgcatgtaatcgatgaacgcagtggctaccgacaaagtgtgatcgataaagtcagtgacagtaccagccgttcacaaaaaatcctcggtccattgattgtcgtgccgtatagagagtgggttgaaactgaagtcgatggcaagaagcaagggaaatggacccacttttatcactacatactgccaaacgtgatgactgtaaaagggaccccagatgttgaagttcgccagttaggtatttataaaacacaggtatatcagggtgaattcgatttccatggggaatttgaggtatcttcgctggatgatttagatcgtgaaggcgtcatcattggtaagccttcactggtgctggcactgagtgatgcgcggggtatccagcgcatttcgccactcagcgtagggaagactaaaattaacttcgaacccggcgctttctccggtcactcggtacaaggtgttcatgcaccattgacaatagagcaggttctacagggtaaatttgatgtcgatttcaccatgtcgcttgcgggtacgactagcttatcggtagtcccggttgggcgtaacagtgaattaacgttacaaagtaactggccacatcctaattttgtcggtaattttttacctttgcagcgcaaggttgatgagaaaggcttccgtgctcactggagcagtaattggttggccaacagcatgaacacgaatttcaccggtggcgatgcagcctttcattttggtagcttaccggccttcaccaccagcctgattgaaccggttgatcactaccaattaaccgaaagagccattaaatatgctattttatttatcggtctgacattcttcagcttcttcctattcgagagtctgacgtcattgcgcctgcacccaatgcaatatctgttagtcggggcggcattggttctattctatctgatgttgttagcgttctctgaacacattggtttcacactggcttaccttctggccagtctgagctgtagcttattgattgctatctatttgagtgccgtattgggcggatggttgcgcggcacattgtttgcctgcggcttattattgttgtacggcattttgttcggattgttacaatcagaggacaacgcactgctgttaggggctgggttactgtttgttgtcttgacggtggtaatgttattgacgcggcgtttagactggtaccaagttgctgatacacaacggttgaccgagtggagagctccagagccaagcgctgaagagagcccgagcaaaacggcaccagagggcgagagtatgaaagatgataataaaaaaaaagatgatcacgtaaaaaaagacgctaatgagaaagatgagttccgtttatggaagtaa

SEQ ID NO: 41564 - DNA, 426 bp, Yersinia pestis
gtggcccagtggcgatgtaacctgcgggtatcctggcatactcaactcttttctttattggcacacggcatattggtcattttaaccttggtcgcgccctggcccttgggttataccgccctatggctggtattgctgacgttagtggtgtttgagtgtatccgcagccagaaaaggattaaatcctgtcagggggaaatcaggctaaaacctggcaacctggtgcgatggaaaaggcatgaatggaccgtggtcaagccgccgtggatcacccgctatggggtattattacatttacaacaaacaggcggccacgcgacccgaaagcgtctatggctgtccgctgacagcatgtctgaagatgagtggcggcagctatgcctgttgctgcggcattcatttgaatctgacgatggaacgatgtga

SEQ ID NO: 41565 - DNA, 267 bp, Yersinia pestis
atggaaattgataataaagcccgtattcactgggcatgccgccgtggtatgcgtgaacttgatatctccatcatgccgttttttgaatatgaatatgatagcttgagcgataacgagaaacaggcatttatccgcttgcttgagtgtgatgacccagatttattcaactggctgatgaaccacggggagccgcaggatagcgagctatatcagatggtcaaactgattcaatcacgaaataaagcccgtggcccagtggcgatgtaa

SEQ ID NO: 41566 - DNA, 993 bp, Yersinia pestis
atggcctatcatactccgtttgctgcacagccaccggtcgcctcttccgggctacccttaacactgatctcactcgatgactgggcattggttaccttaacgggtgctgatcgggtcaaatatctacaaggacaagtcacggcggatatcgatgcgctatctgctgatcaacatgtactctgtgcgcactgtgatgccaaagggaaaatgtggagtaacttacggctgttttatcgtggtgaggggttggcctttatagagcggcgcagcctgctagataaccagttgagtgagttgaagaaatacgctgtattctccaaggtggtcattgaaccacagccagatgcggtactcattggggttgcaggtagccaggccaaaaccgcgctggcggaaatctttactgaattgcccagtgcagaacacccggtaacgcagatgggtaatagcacgctgttacacttctcactgcctgctgaacgttttctgttagtaacggatacagagcaggcgcagcagttggttgagaaactggctggtcgggcgcaatttaacgacagcaaacagtggctggcactggacatcgaggccggtttccccatcattgatgctgctaacagtgcacagtttattcctcaggcaacaaatattcaggcgttaaatggtatcagcttcacgaaaggctgttataccgggcaggaaatggtcgccagagcaaagtaccggggtgccaataagcgggcgctgtattggttggcaggtaatgccagccgagtacccgcagcaggtgaagatttagagtggcagctaggcgagaattggcgtcgtacgggtaccgtgctgtcagccattcaactcaatgatggcaccgtgtgggttcaggctgtgttgaataatgatctggccgcagatagcgtgttgcgggtacgtgatgatgcgctgggtacgctagccattcagcctttgccctactcactcgccgaagataaataa

SEQ ID NO: 41567 - DNA, 702 bp, Yersinia pestis
ttgaagaataaatcagggacacaacctctctttgcaacaccatccgtacccgccgcacaaacggccaccccaaccccggcttacccgtgggctgaagagctggcgaacagcctcagccatggtatcggtgtggtgttcggtattgtggggctggtattgctactggttcaggcggtgaacagtggtgccgataccaaagcgctcactagctatagtttgtacggtagcagtatcattttgttgtttttggcctctacgctgtatcacgccattccacatcgtagggcgaagctctggctgcaaaaatttgatcactgcgctatctacatcttgattgccgggacttatacgccgttcttattagtagggctagattcgcctctggccagaggtttgatggcggttatttgggggctggcactcatcggtgtgatctttaagttggcgtttgctcatcgttttgaagtgttgtcactggtgacctatctgaccatggggtggttatcgctgattgtcatttatcagctcgcggtcaagcttgagatcggggggttggcactgctggcgatagggggcttgttatatacggttggggtgatcttctatgcatcgaaacgtatccgttttggtcatgctatctggcacggttttgtgttaggcggcagtgtctgccattttatggcgatctatctatatgtttaa

SEQ ID NO: 41568 - DNA, 2880 bp, Yersinia pestis
atgactcagaatctcagccagcttgaacataacgatgcttttattcagcgccatattggctcctcagttgaacagcagcagcagatgttggccgccgttggtgccagttcgttaagtacgttgatccagcaaattgttccggcagatatccaattgcctggcccaccaccagtgggtgaggccgccaccgaacaccaggcgctggcggaactcaaagggatcgccagccagaatcaatgctataaatcctatatcggcatgggctacagcccggtactgaccccgcccgtcatcctgcgtaatatgctggaaaaccccggctggtacaccgcgtataccccttatcaaccagaagtttctcaaggccgccttgaggcactgttgaatttccagcaattgacacaagacttgacgggcttggatctggcatcggcctctttgctggatgaagccacggcagcggcagaatccatggcactggcgaaacgtgccagtaagctgaaagacgctaatcgtttctttgttgctgacgatgtccacccgcaaacgctggatgtggtattgacccgcgctgagacctttggttttgacgtgattgttgatcgcgcagaaaaagtactggaactagacggtatctttggtgtgctgttgcaacaagtcgggaccaccggcgagttacatgattacagcgccctgttggccgaactgaaaaaacgtaaaattattaccagtgttgccgctgatattatggcgttggtactgttgaccgctccgggtgcacagggtgcagatgtggtatttggttccgcacaacgttttggtgtgcctatgggctacggcggtccacacgcggcattctttgcttgccgtgatgaatttaaacgttcaatgccaggccggattattggggtgtcccgtgatgccgcaggcaatacggcgttgcgaatggcgatgcaaactcgcgaacaacatatccgccgtgaaaaagccaattccaatatctgtacctcgcaggtgttactggccaatattgccagtctgtatgcggtttatcatggcccacagggcttacagcgtattgctggccgtattcaccggatgactgacattctggctgctggcttgcagcacgcggggttgaccctacgtttcaaacactggttcgataccctaaccgttgaagttaaagataaagcggcggtactggcccgtgcattaagttttggcattaacctgcgtactgacattcatggcgcggtagggatcacactgaatgaaaccacctcacgcgaagatattcagacgctgtttgccttgttcgttggcgataaccacggtttggatatcgatcaacttgatgccgccgttagtcagcatagccaatcaattcaagacagtatgctgcgccgggacccgatcctgacccatccggtgtttaatcgttaccacagcgaaacggaaatgatgcgctatatgcatcgtttagagcgtaaagatttggcattgaatcaggcgatgatcccgctgggatcctgcaccatgaaattgaatgccgcggctgaaatgatcccaatcacttggccagagttcgctgaattgcacccattctgtccaccagaacaggctgcgggttaccagcagatgattggtcagctatcgcaatggttagtacaactgacggggtatgatgctgtctgtatgcagccaaactcaggggcgcaaggtgaatatgccggtctactggctatccgccgttaccatgagagccgcaatcaggcgaaccgccatatctgtctgatcccaagttcagcccatggaacgaacccagcttcagcacaaatggcgggtatgtcggtggtggtggtcgcctgtgataaacaaggcaatattgatctgcacgatttacgtcagaaagcggaacacgcgggtgatgagctgtcatgcattatggtgacttacccatcaactcacggggtttatgaagaaactatccgtgaagtttgccagatcgttcatcagtttggtgggcaggtgtatctggatggcgcgaacatgaacgcccaagttgggatcaccacaccgggttatattggcgcggatgtttcgcatctcaatctgcataaaactttctgtatcccacatggcggcggtggcccaggtatggggcctattggcgtgaaagcccatctagccccgtttgtccctggtcatagcgtggtgcaaattgatggcatgacgacgcaacaaggggcggtttctgctgcaccgtttggcagtgcttctattttaccgatcagttggatgtatatccgcatgatgggggctgatggtctgaagcaagccagtcaggtcgcgatcttaaatgccaactatattgctactcgcttgaaaaatgcttatccggtgctctataccggccatgatggccgtgtggcgcacgaatgtattttggatatccgtccattgaaagaagcgaccggcatcagtgaaatggatatcgccaagcgcttgatcgacttcggtttccatgcaccgaccatgtccttcccggttgcgggtacgttgatggttgaacccactgagtctgaaagtaaagttgagttagatcgctttattgatgcgatgttggctattcgcgccgagatcgagaaagtggctcaaggcgaatggccattggaagacaacccgctggtgaatgccccgcatactcaggctgaattggttggtgagtggacacatccatacagccgcgaactggcggtattcccggtggcgggtgtactggagaataaatactggccaaccgtaaagcgtctggatgatgtttacggtgatcggaatttgttctgttcatgtgtgccaatcagtgactatgagtaa

SEQ ID NO: 41569 - DNA, 1098 bp, Yersinia pestis
atggctaagcagaccccgctgtatgaccaacatgtcgcgtgcggtgcgcgtatggtagattttcatggttggatgatgccattgcattatggctcccaaattgacgaacaccattttgtgcggcaggacgcaggcatgtttgatgtctcccacatgaccatcgttgatttgcacggtaaccgtacccgtgagtttttgcgctatctgttggctaacgatgtagccaaactgacccaaccgggcaaagccctttacaccgggatgctgaatgaatccggcggtgttatcgatgatttgattgtttacttcctcagcgaagattatttccgtttagtggttaactccgccacccgtgataaagacctcgcttggataagtcagcatgctgaaccttatcaggtcgaggtcacggtgcgtgacgatctggcactgattgcagtacaaggcccacaagcccaacaaaaagttgccacgttactgaccaccgagcagcaacaggctattgcgggcatgaagccattctttggtattcaaaccggcgatttatttattgctaccacgggttataccggtgaagccgggtatgaaattgcgttgccgaaacagcaggttgttgcgttctggcagcaactattggccgccggtgtgaagcccgcaggtcttggtgcgcgtgatacgctgcgcttagaagcggggatgaacttatatggtcaggaaatggatgaaaaaacgtctccgttagccgctaatatggggtggacagtggcctggcaaccagaagatcgtcagtttattggtcgtgctgcgttggaaaggcagcgaatgaaggggactgagcaattggttggtctgatcatgacggaaaaaggcgtgttacgtaatgaattgccggtgtatttttttgatgccgcaggcaatcagcatgttggggtgataaccagcggttcattttcgccaacactgggtttcagtattgcgctagcccgtgtacccgcaggtatcggtgaacatgctgtggtacaaatccgtaaccgtgaaatgccggtacgggtaacaaaacccggttttgtgcgagcgggcaaagccatcgtattgtaa

SEQ ID NO: 41570 - DNA, 1221 bp, Yersinia pestis
atgcaatcatttgacatagttatcgccggtggtgggatggtgggtctggcgctggcttgtggtttacaaggcagtggcctgcgtatcgccattatcgagcatcagcctgcaccgatgccattaacggcaccgttgaccggtgagctggcactgcgagtctcggcgatcaacgcagctagtgagcgcttactgcaaaaaatcggggtgtgggaaacgattcaggcactgcgtgctagcccgtaccacggtatggaagtgtgggataaagacagcttcggcaaaattgcctttcatgcggatgaatatggcttcagccatcttggccatatcattgaaaatcaggtcattcaacaagcattgtggcagcgggccagccaactaccagaggtgacggtcttggcacccgccagcttcaaacaagtggcttggggcgagactgaagcgtttatcaccctaaccgatgaccggatgctcagtgctcggctggttgttggggctgatggcgcacactcatggttacgtcagcatgcggatattcctctgaccttctgggattatgcccaccatgccttggtggcaactatccggactgacgagccgcatcaggctaccgcgcgtcaggtattccacggtgacggcattttagctttcctcccctttagcgacccccacctcagttctattgtctggtcattaccgcctgagcgtgccgccgagttagccgtgctgcccgccgagcaatttaaccgtgagttggcgatgacgtttgatatgcgccttgggcaatgtcagcttgagagtgagcggcaaacgttcccgctgaccgggcgttatgcccgtagctttgccgcgcaccggctggtgttggtcggcgatgcggcgcataccgtgcatccattggctgggcagggcgttaatctgggctttatggatgtagccgaattagtgtctgaacttcggcgtttacagcgtcaagggaaggatattggtcagcatctctatctgcgccgttatgaacgccgccgcaaacacagtgctgcgatgatgctggcgagtatgcagggcttccgtgatctgtttgctggcaacaatccggctaaaaaattattacgtgatattgggttaacgctggccgatcacttgccgggggttaaaccgcaattggtacggcaggcgatggggctgaatgatttgccagaatggctggagcgttctcaataa

SEQ ID NO: 41571 - DNA, 597 bp, Yersinia pestis
atgccgcaaaatccacaacatgcccttgagcggcaacgtatccgcgcggaaatccgtgagcatcggcgtctgctaacacccgttcaacagcaacaatcggcacatctggcggcacagcacattgccgagcaccccaaaatccagcaagctcacacggtagccgtgtttctctcctttgacggcgaacttgatacccagccaattattgagcaactgtggcagcagaaaaaacaggtttatttgcctgtcctccacccgtttagccccggtaatttattatttctgcgctatcgcccagaaagcccgctaatccgcaaccgactgaaaatccttgaaccccaactcgatgtgcgagaagtcttgccattgcatcaactcgatgtagtgattaccccattggtcgcctttgatcgccatggtcagcgtttggggatggggggcggtttttatgaccgaactctgcaacgctggcagcaaaatggcccttatcctattggattggcccatgattgccagttggtcgataagttaccgagtgaatattgggatgtgccgttgccagagattgtgacaccagcaaaagtgtggcagtggtga

SEQ ID NO: 41572 - DNA, 909 bp, Yersinia pestis
atgaaacgcccagactaccgtacgctacaagcgctggacgcggtgatccgtgaacgcggttttgaacgtgcggcacagaagctttgcatcacccaatcggcggtatctcaacgtattaaacagttggagaacctgtttggtcagccactgctggtgcgcacggtgccaccacggccaacggaacaagggcagaaactgcttgctctactgcaccaggttgagctgctggaagaagagtggctcggtaatgataacggggtcgatacaccgttgctgctatcgctggccgtgaatgctgacagtctggcgacctggctattaccggcgctgaaaccggtgctggctgatttacctattcggctaaatttacaagtggaagatgaaacccggactcaggaacgtttaaggcgtggtgaggttgttggcgccgtcagtatccagccacaaccactgccaagctgtctggtcgaccaactcggtgctctggattacctgtttgtggcatctaaggccttcgcagaacgctatttccctaatggcgtgacccgttcagcgttgctgaaagcacccgcggtggcatttgatcatctggatgatatgcaccaggcgtttttacagcaaaatttcgatttgtcaccaggtagcgtgccctgccatatcgtcaactcgtctgaagcctttgtgcagttggcccgccaaggtaccacctgttgtatgatcccgcatctgcaaatcgaaaaagagctggcctcgggcgaactgattgacctgacaccggggttattgcaacggcggatgctgttctggcaccggtttgcaccagaaagccggaccatgagaaaggttactgacgccctcttatcctacgggcgtcaggtattacgacaggactcgtttattgggcagtag

SEQ ID NO: 41573 - DNA, 780 bp, Yersinia pestis
gtgaagttgaagacattggctttggccgcaatgataggattagggacgttacctttggcgctgcaagctcaagcggccgaagtgccagaagggccgcatgttgtcacctcaggtaccgccagcgttgaggcaaccccagatatcgcgactatcgcaattgaagtcagtgtatctgccaaagatgctgcagatgccaaaaagcaggtcgatacccgcgtcgcgcaatactttgatttcctaaataaaagtggcattgaaaagaaagatgtcaaggccgctaatattcgtacccagcctgaatatgactaccagaaaagcggtgaagccgtattgaaaggttaccgtgctgtgcgtcaggttcaggtgacattgcgccagttggataaattaaatgatttgctggatggtgcgttgaaatcgggtctgaatgagatccgtgccgttgagttgggtgttgccagcccagaaacctaccgtgagcaggcgcgtaaaaaagccattgagaatacgattacgcaggccggcgcactggccgatggatttaaagttaaattaggcccggtttatagcattcgttaccatatagcgaattaccagccaatgccggtagctcgaatgtataaaagtgctggagcggcatccgacacggcggtggagcaaacctacgaacaacagaccatcaattttgatgatcaggttgatgtggtctttgagctgcaaacgggagccaacccggcatcgatcgcagctactgccaataaaacagttgctgctcagtaa

SEQ ID NO: 41574 - DNA, 870 bp, Yersinia pestis
atggaagaactaaacgtagttgaagggatcaataatgcaagcacctggttggcgaataaccaggacttactgatccaatacgcagtcaatattattgccgcgttattgatcctgattgtcggttcgatcatcgctaaagtgctatctggcatgctcaatcgggtgatgagattgcgtggcattgatgtcaccgttgccgacttcttatcagcgatggtgcgttacagcattctggctttcaccattgtggcggtactggggcggctgggtgtacaaaccgcatcggtcattgcggtcattggtgctgcgggtttggccgttggtttagccctacaagggtcgctgtctaactttgctgctggtgtgttgctggtcgccttccgtccgtttaaagcgggtgagtacgtcgatctgggcggtgtggccgggacggtggtgcaggtgcagattttctcaaccaccctacgtacggttgatgacaaaatcattgtggtaccaaatggcaaaattattgccaacaatattattaataccagccgcgagccgaaccgccgtaccgacatgattgtcggtgtggcatatgatgccgatattgatgtggtgaaaaaggttcttggtgacatcatcgcagctgatagtcggatcatacacgagaaaggggtgacggtgcgcttgaatgaaatggcaccgtcctcactgaattttgctgttcgtgtttggacgaccaatggtgatgcgcaagaggtgttttgggacttgactgaaaacttcaagcgggcgctggatgcgcacaaaattggtatcccttacccacaaatggatgtgcatttgcatcaggtggcaaaagccgaagccgagaagccggagtaa

SEQ ID NO: 41575 - DNA, 1164 bp, Yersinia pestis
atgtctgtaattaagatgaccgatctggatctggctggcaaacgtgttttgatccgtgcggacctcaatgttccggtaaaagaaggcaaagtgacttctgatgcgcgtatccgtgcctctctgccaactatcgaagcggcattgaagcaaggcgctaaagtaatggttacctctcacttgggtcgcccgaccgaaggcgagtacaacgaagagttctccttactgcccgtcgttaactacctgaaagagaagttatcttctccggtacgtctggcgaaggactatctggacggcgttgaaattgcagctggcgagttggttgttctggaaaacgttcgctttaacaaaggcgagaaaaaagacgacgaagccctgtccaagaaatatgccgcactgtgcgatgtttatgtgatggatgcttttggtaccgctcaccgcgctcaggcatcgactcacggtgtgggtaaatttgcccctatcgcttgcgccggcccgctgttgtcagcagagctggaagcattgggtaaagcgctgggtaacccagcgcgtccaatggttgctatcgttggtggctctaaagtttcaactaaactgaccgtgctgggcgcgttgtctaaaatcgcggataaactgattgttggcggtggtatcgctaataccttcgttgcggctcaaggccacaatgtcggtaaatctctgtacgaagctgatctgatcccagaagcgaaaagactgctagagacctgtgatatccctgttcctactgatgttcgtgttgccactgagttctctgaaacggcagccgcgacgctgaaacccgcgaacgaaattaaagatgacgaacaaattttggatctgggcgacgaatctgcggagcgtctggctgagatcctgaaaaatgccaaaaccattctgtggaatggtccggttggtgtgttcgagttccctaacttccgtaaagggaccgagatcgtggctcgcgccattgcagaaagcgaagcattttctatcgcaggcggtggtgatactttggcagcaatcgatctcttcggtattgctgaccaaatctcctacatttctactggcggtggtgctttcctggagttcgtcgaagggaaaaaactgcctgccgtagtgatgctggaagagcgcgctaagcagtaa

SEQ ID NO: 41576 - DNA, 342 bp, Yersinia pestis
atggcatatataccaaagaattattcccgattggaaagcggttatcgggagaaggcactgaaaattttcccctgggtttgtggtaaatgctcacgggagtttgtctattccaatctgcgagagctaacggttcatcatattgatcatgaccacggtaataacccagaagatggcagcaattgggagatgttatgcctgttttgtcacgatcatgagcattccaaatatacagaggtggatttatacggctcaaccgtggttgccggagatgatgcacaaaaggatcaaggcgtcgccacccataacccatttgctaatttgaaatctttaatgaaaaaataa

SEQ ID NO: 41577 - DNA, 1995 bp, Yersinia pestis
atgtcctctcgtaaagagcttgccaacgctatccgcgcactaagcatggatgccgtgcaaaaagcgaagtccggccatcccggagccccgatgggtatggcagatattgccgaagtcctgtggcgtgattatctgaaccataatccaactaacccacactgggctgatcgtgaccgtttcgtcctgtcaaatggtcacggctccatgttgatttatagcctgttgcatctcacaggttatgacctgccgatggaagagctaaaaaatttccgccaactgcactctaaaacgcctggccaccctgaatatggttataccgctggtgtagaaaccaccactgggccattggggcaaggcattgccaatgctgttggttttgctatcgcagaacgcacgctgggggcgcagtttaaccgcccaggtcacgacattgtcgatcaccatacctacgcctttatgggcgatggttgcatgatggaagggatctctcacgaggtttgctctctggccggtacgatgaagctgggcaaactgacggctttctatgatgacaacggtatttctatcgatggtcatgttgaaggctggttcactgatgacacggcggcccgtttcgaagcctacggctggcatgtggtacggggtgttgatggccataacgcggactctattaaagcagctatcgaagaagcacataaggttaccgacaagccttcattgttgatgtgcaaaacgattattggttttggctcaccaaacaaagctggaacccatgattcccatggtgcgccattaggtgaagcggaagtggcagcaacccgtgaagcattaggttggaaatacccggcatttgaaatcccacaagatatctatgcggcatgggatgccaaagaagcgggcaaagccaaagaagcggcctggaacgagaagttcgctgcgtatgccaaggcttatccagaactggcggctgaattcaaacgtcgtgtcagcggtgaattaccggctaactgggccgttgaatccaagaaattcatcgaacaattgcaagccaatccagcaaatattgccagccgcaaagcctcacaaaatgcgctggaagccttcggtaaagtgttacctgagttcctgggcggttctgctgacctggcaccgagtaacctgactatctggtctggctctaaatccttgagcgacgatctggctggtaactacattcactacggtgtccgtgaatttggtatgtctgccatcatgaacggtattgccctgcacggcggtttcatcccttacggcgcaaccttcctgatgtttgtggaatatgcccgtaacgcagtgcgcatggcggcactgatgaaaatccgtagcgtgttcgtttatacccatgactctattggtctgggcgaagatggcccaacccatcagcctgttgaacagatggccagcctgcgtgttaccccgaatatgagtacctggcgtccttgtgatcaggtcgaatctgcagtggcatggcagtatgcgctggaacgtaaagatggcccaagcgcactgatcttctcccgacagaatctggcacagcagccacgtactgcggagcagctagccaatatcgccaaaggcgggtatgtgctgaaggattgtgcaggccagcctgaactgatcctgattgctaccggctctgaagtggagttagcagttgctgcggctgatcaactgacggccactggccgtaaagtccgcgttgtctctatgccatcaactgatgcattcgataaacaagatgcggcttaccgtgagtcagtattgccatctgcggttagcgcacgtgttgccgtagaagcgggtattgcggattattggtacaaatacgttggcctgaatggcgcggttgtcggtatgaccacgtttggtgaatcagcgccagctgaattgctgttcaaagagtttggtttcaccgtggaaaacgtggtggcgaaagctcaggcgctgctgaagtaa

SEQ ID NO: 41578 - DNA, 324 bp, Yersinia pestis
ttgaatcaaccgatatggtggtttagaacatatggggtaagcggaacagtaatcattaattttatggaggcgctcatgggcatactatcttggattatttttggccttatagccggtattttggcgaagtggattatgcctggtgaggatgggggtggatttatcatgaccatcatcttgggtattattggtgcattggtcgggggttatatcagcactttctttggaatgggaagagttgacggatttaatctgggcagctttgtagtggcagtaatcggctcactggttgttctgtttatttatcggaagttaagaagctag

SEQ ID NO: 41579 - DNA, 321 bp, Yersinia pestis
atgggctggttcagcgtctgtaaggtgaatgatatcaaaccagatttcccgttttcggctcaagcgggtaataacagagtgggtatttatctggtggagggcgagtattttgcgatggaagatatttgtcctcatgcctatgcattactaagccaaggaattaatgatggtgaaatcattgaatgcccgctacatggtgctctgtttaatgtgcggacagggcagtgtttgcgtgagccgggcgatcgcgatttaaacacctatgctgtgcggatcaatggcgatcagatcgacgttaatttggatggcgatggcgagtag

SEQ ID NO: 41580 - DNA, 1155 bp, Yersinia pestis
atggctaaacacctatttacgtcagaatctgtctctgaaggacatccagataaaatcgctgaccagatttccgacgccgtacttgatgcaattcttgagcaagacccaaaagcgcgggttgcctgcgagacctatgtcaaaacgggaatggtattggttggcggtgaagttaccaccaatgcatgggttgatatcgaagagatcacccgccgcacaatacgcgaaattggttatgtacattccgatatgggttttgatgctaactcttgtgcggttttaagcgctatcggtaagcagtctcctgatattaatcaaggtgttgaccgcgaaaacccactggagcaaggtgcgggtgaccaaggcctgatgttcggctatgccaccaacgaaaccagtgtcttaatgccagcgcccattacctatgctcatcgtttggtagagcgtcaggctgaggtgcgtaaaaatggtgccttaccatggttgcgcccagatgccaaaagccaggttaccttccaatacgacgacggtaaaatcgtgggtattgatgcggtcgtcctgtcgactcagcattcagaagatatcaatcagaaagatttgcacgaagccgtcatggaagagatcatcaagccagttctgcctgctgaatggatcactgcccataccaaatactttatcaacccaactggccgttttgttatcggtgggccaatgggtgactgcggtctgactggccgtaaaattattgttgatacctacggcggcatggctcgtcatggtggcggcgcattctcgggtaaagatccatcaaaagtggatcgctctgcggcatatgctgcccgttatgttgcgaaaaatattgtggcggcgggtctggctgaccgttgtgagatccaagtatcttacgccatcggtgtggcagaaccgacctccatcatggttgaggctttcggcacggagaaaatcccagcagaccaactgaccctgctggttcgtgaattcttcgatctgcgcccttatggcttgattaagatgctggatctgttgcacccaatctaccgtgaaactgcagcctatggtcactttggccgtgagcatttcccgtgggaaaaaaccgacaaagcagcgttattacgtgatgctgcgggtttgaaataa

SEQ ID NO: 41581 - DNA, 708 bp, Yersinia pestis
atgttacgcaatattttgttcttgctggttttatcttcgccactgttgcctctgatcagtcacagtcacggcatcaataacttctcccaggcgaaagcggtggccgctaaaattcaccaagatgcacctggcagcttctactgcggttgccaaatcgactggcaaggtaaaaaaggtatccctgacctaaacagttgtggctatcaacccagaaaaaatgcagcgcgagccgcgcggattgaatgggaacatgtggttcctgcctggcaatttggtcatcagcgccaatgctggcaacaaggtggccgtaaaaactgtgccaaagatccggtttatcgtcagatagaaactgacttgcataacctgcaacctgctattggtgaagtgaatggtgaccgtaacaatttcatgtactcgcaatggaatggcggcagtggccaatatggtcagtgtgcaatgaaagtggattttaaaaacaaattggcagaaccaccggtacgtgcacgtggtgccattgcccgcacctacttttatatgcgcgatcaatatcaactgcggctatccagccagcaaagtaaactctttggggtctgggatcgtcaatatcccgtcaccgactgggaatgcttacgcgatgagcgaattgcgaaaactcaaggtaatcataatccttatgtacaacgcgcttgtcagcgacccaaaagctaa

SEQ ID NO: 41582 - DNA, 732 bp, Yersinia pestis
atgcgtataccccgcatttaccacccacagcccttgcaggccaataccgaactggcgctcactgatgaagccgcaaatcatgtcggccgcgtactacggatgactgaagggcaaagcctgcaattatttgacggcagtaatcagatttttgacgctgagattatacgggcagataaaaagaatctgattgtccgactcgctgaagggcaatgggaagatcgggaatcccctctgaatttacatttagggcaggttatttctcgtggggaaaaaatggagtttaccgtccagaaatctattgaactgggcgttaatgtgattaccccgctgttttcagcacgttgtggcgttaagcttgatggcgagcgtctgacgaaaaaaattcaacagtggcaaaaaattgctatcgccgcctgcgaacaatgtggccgcaatacgatcccagagatccgcgatgccatgcaacttgctgattggtgtgctgaatccgatgacagcttgaaactgaatctgcacccacgtgctagcaacagtattaataccctcccttcctcactcaacaaagtgcgtttgctgattggcccagaaggtggcctctctgctgatgaaattgcgatgacctcgcgcctcggatttacggatatcctgctggggccacgagtgctgcgaacagaaactaccgcccttaccgcaattactgcgttgcaggtgcggtttggcgatctgggataa

SEQ ID NO: 41583 - DNA, 423 bp, Yersinia pestis
atggctaatcgcacaattattgcttttgattttggtaccaaaagtatcggtgtcgccatcggtcaggaagtcaccggaacggccagagcgctaaccgcgtttaaagcacaagatggcaccccggattggcagcaagtcgaaaagctgttgaaagagtggcagcccaatttagtggtagtcggcctgccgctcaatatggatggcactgaacaaccactaaccgccagagctcgtcggtttgccaaccgtctgcatgggcgctttggtgtacaggtcgccttacaggatgaacgcctcagtacggtagaagcccgcgccaatctgtttgaccgcggtggctatcgcgctctggataaaggcagtgtcgatgcagcctctgcggtgatcattttggaaagctggtttgatgagcaagcaggttga

SEQ ID NO: 41584 - DNA, 1077 bp, Yersinia pestis
gtgtttagccgtataaaagccaaacgcattgatttagaaaaccctgaccttgccagtgatggctttaacaaacaggattttgccaataaggtggcggctagtgtagatcataatgcttcagatctgcacctctgtaccggttttcaccccgtattacgtatcgatggcgagctaaaaacctttactgactggccgaaggtcactgctggttggttaaatgggctacgtcggcatatgttgagtgacgcacaagaaagccgattacagcaacaggggcaggttgactgtgcctataccaccgtgggcagtcaaaggttacgggcgaatattttccagcaacgacagggccaatccattgcttttcgcattattcctgctatttgtccgtcactgacacaattggcggcaccacctattttgaaccaattgattcaacaggataatggactaattctggtaacgggggcgacgggcagcggtaaatcgacgacgctgagtgccatgataagcgcgattaatcagcaacaggcacgacatattattacccttgaggacccgattgaatttattcatagcagtcaatcatgtttgatccagcaacgagagcttggtcgccatactcactgttttagtcgtgccctgaatggggcattacgtcaggatccagatattattttactcggagagttacgggatctggagactatccgattagcgctgacagcagcagaaaccgggcatctggtgctagccacattgcatacccgcacggcaacacaggctattgatcggctgattgatgtttttcctcctgaggagaaagccgttatacggacgcaactggctgccagtttacgcggtgttatcacgcagaaattgtgtcgtcaaaatggcggtgggcgtatagctgtatttgagatactcacgcaaaccacggcagtcagccatttgatccgagaaggtaaaacctatcaattaccaaccgtgatacaggccggagggcaatgggggatgcaaacctttgagcaaagtatcgcacaacggcaaaaacagggggttttggctatcaatcactga

SEQ ID NO: 41585 - DNA, 699 bp, Yersinia pestis
atgagtactatccaacagaatctacaggatgtcagagcgcggatcgcaacggctgcacacaattgcgggcgctctccagaagaagttacattgcttgcagtcagtaaaaccaaacctgtggcggctatcgaaaaagccatcgccgctgggcaatatgcttttggtgaaaactatgtgcaggaaggggtggataaaattcactccttcgtggataacaaaacgcttgaatggcactttatcgggccgctgcaatccaataaaagccggttagtggctgaaaattttgcctggtgtcataccgttgatcggttgaaaatagcccagcgtctgagtgcccagcgcccagcggctatgccagcgttaaacgtactgattcagattaatatcagtgatgagcaaagcaaagcggggatttccttgagtgaactccccgccttggctgacagcattagtacattacctaacctgtgtttacgcgggctgatggctatcccagcgccagaacatgattatcagcggcaattggccgtatttacgcaaatgaatcaggcgttcttgactttaaaagcccgctaccctcagatagatacactttctatggggatgactgatgatatggacgccgccattagcgccggcagtacactggttcgaattggtaccgccatttttggtgcccgcgtttataacgcggattaa

SEQ ID NO: 41586 - DNA, 939 bp, Yersinia pestis
atgattcaattccatcaagtcagtaagtattttgccggtaaacgggcggtagataacctatccctacagatttctaaaggggagtttaccgtgctgataggtacctccggttctggtaagtcaaccaccttaaaaatgattaacaggttgattgaacacgatgaaggaaaaatccgttttgccggtgaggagatccgtaactataaacctgaagatttacggcggcgcatggggtatgcgattcaatcaatagggctatttccacattggacggtagaacgcaatattgccacggtgccacagttgctgaaatggccaaaggatcgtatccgtcaacgtgttgttgaactgctggaactgttgcatctggatccacaacagttttgtcaccgctatcctcatcaattatctggagggcagcaacagagggttggggtcgcgagagcgttggcggtggatcctgaagtgctattgatggatgaaccttttggtgcgttggatccggtaacgcgttcagcgttgcagcttgaaattacccgtattcatcaattgtcggggcgcactatcgtgctggttacccatgatattgatgaggcattgagtctggctgatcgcatcgttttgatggatgaagggcgagttattcagcagggaacgccccttgaaatgttggcccagcctgccaatgattttgtccgtgatttctttggccgcagtgatctcggtattaaattattgtcacttgggcgagtagaacaacgtgttagatgtggtgaaacgctggcagggcagccgatactgggtaccaccagcttgcgcgaggcactttccctgtttgtttcccgtcagacggataaattaccggttgctgatgaacacgggcagccactaggcgttctctattttgctgatttggttgcgaataaggaaagagtatga

SEQ ID NO: 41587 - DNA, 837 bp, Yersinia pestis
atgaagccagcagaaaccaaacctgataatacagcagtgggtgatgtgaaaagtattaaaccggggctgcggttttggttttggctaaaagatcctctgtgttgggcgctgctcatcctgtgtgggttggtcttcggtatgacctcactacagcgtttctttaccgcattgttcccagaacttgatcggcctatctatttgcaagatacctttttttcattggtggtcgctcatgtattactggtattggcctccagtagtattgctgttttcatcggtgttactaccgggattgcagtaacgcgcccggcaggaaaggagtttcgttcggtagtggaaacggttgtggcgatggggcaaacatttccccctgtagcggtactcgccattgcggttcctgtgatggggttcagtgagaaaccggcgattattgcactggtgctttatggcttattgccgattttacaaggcaccattgcgggtattgaatccgtttcgaccagtatccgtgaagtggcggcaggtgttgggatgagtgcgaggcagatcctctggcaggtggaattacctttggctgcgccagtgattgtggcgggtattcgcacttcggtaatcatcaatataggtactgcggctatcgcatcgacagtagggaccaagacgcttggctctccaattattatcggcctcagtggctttaataccgcttacgttattcagggggccgccgttgttgcgctcttggcgattattactgatatgattttcgaccgttggactcggcggttgtcacgctggagggaacgacactctctttctgctccccgaacggattaa

SEQ ID NO: 41588 - DNA, 594 bp, Yersinia pestis
atgcaaaaaatagtattagccaccggcaaccccggcaaagtacgtgaactggcaaacctgctggccgactttggtttggatgtcgtcgcacaaaccgaactgggcgttgagtctgcagaagagacgggcttaacctttattgaaaacgccattttaaaagcccgccatgcagcgcaaaccaccggtttaccggccatcgccgatgattcaggcttagcagtagacgcgttaggcggcgctccggggatttattccgcacgctatgccggtactgatgccagtgaccaagagaatctggaaaagctgttggtcgcattgcaaaatgtccccgatgaaaaacgcggtgctcagttccattgcgtattggtctatatgcgtcatgctgaagatccaacaccgctggtgttccacggccaatggccaggggtaattgctcaccaacctgctggggctgctgggtttggctatgaccctattttctatgtacccgcgctgggtaaaaccgcagcggaactgactcgtgaagaaaagcacgcggtatcccatcgtggtcaggccctgaaattgatgctggatgcgctgcgcgatgcttaa

SEQ ID NO: 41589 - DNA, 1443 bp, Yersinia pestis
atgatgagcaagaagaaaggattaaccaccgcggcaggcgctcccgttgtcgataataataatgttattacggctggccgccgtggcccgatgctactgcaagatgtttggttcctggaaaaattagcccattttgaccgtgaagtgatccctgagcgccgcatgcatgctaaaggctccggtgcatacggtacgttcaccgtgactcatgatattacccaatatactcgcgcaaaaattttctcagagatcggtaaaaaaacagacatgtttgtccgcttctccactgtggccggtgaacgcggtgctgcagatgctgaacgtgatatccgtggttttgccatgaagttttataccgaggaaggcaactgggatttggttggtaacgatacaccggtcttctatttacgtgatccactgaagttcccggacctgaaccacgtggtcaaacgcgaccctcgtaccaacctgcgtaacccggtttataaatgggatttcttctctcaactgccagaggcgctgcatcagttaaccatcgatttcagtgaccgtggcttgccaaaatcttaccgtcatatgcacggtttcggtagccatacctttagcctaatcaatgccaataatgaacgtttttgggttaaattccatttccgttgccagcaaggcattgaaaacctgatggacgatgaagccgaaaaactgattggttctgatagagaaagctcgcagcgtgatctgtatgaagcgattgagcgcggtgacttcccgcgttggaaactacagattcaggtaatgccggagcacgaagcatcacaaacaccttataacccatttgatctgactaaagtctggccgcacggtgattacccgctgatcgatgtcggctacttcgaattgaatcgcaacccggaaaactacttcgctgaagtggaacaatcctcattcaatccagctaacgttgtccctgggatcagtttctccccagaccgcatgttacaaggccgcctgttctcatacggtgatgccgcccgctatcgtttaggggttaaccatcatcagatcccggtgaacagtgctaaatgtccgttccataattatcatcgtgacggcgcaatgcgcgttgatggtaacagtggtaatggcgcaacctatgagccaaacagctttggcctgttccaagaacagcctgatttcagcgaaccgccactgacattggaaggggcggcagatcattggaatcaccgcgaagacaccgactatttctctcaaccacgggcgctgtttaacctgctcagtgaagaagagcatcaacgcatgttcacccgtattgcgggtgagttatcgcaagttcctgaagctatccaacgccgccagatagcgttgtttacgcaggttgacccggcttatggcgccggtgtgaaaaaagcacttggcctgaattaa

SEQ ID NO: 41590 - DNA, 510 bp, Yersinia pestis
atgaaaaaatgctcaatcatattagccagtgtattactagcgacatcaatcaatgccattgctgatacgcctacgcctctcaatcagcagcagccattagaaaaaatcgcaccttatccacaagctgaaaaagggatgagccgacaggtcatttttcttgagcctcaaaaagatgaaagccgctttaaagttgagctgctgatcggtaaaactctcaacgttgactgtaaccgccacatgctcggcggcaatctggaaaccagaacattatctggttggggattcgattatctggtgatggataaaatctcacaacccgcctcaaccatgatggcttgccctgaagacagtaaaccgcaagtgaaatttgttaccgccaatttgggcgacgcggcaatgcagcgttacaacagccgcctacccattgtggtctatgtaccgcaaggggtggaagtcaaataccggatctgggaagcgggcgaagatatcagaagtgcgcaggtcaaatag

SEQ ID NO: 41591 - DNA, 1131 bp, Yersinia pestis
atggcctataccactttttcacaaaataaaaataatcagttgctcgaacccatgttcttcggccaatccgtcaacgtggcacgtttcgaccaacaaaaacacgcgattttcgaaaaactgattgaaaaacagctctctttcttctggcgtcctgaagagatcgacgtatcacgcgatcgtatcgattacaacgcgttacccgatcacgaaaaacacatttttatcagcaacctgaaataccaaaccttgctggactccattcaaggccgtagccctaacgtggcgctgttgccgttgatctcaattcctgagctggaaacctgggtggaaacctggtcgttctcagagactatccactcacgctcttacacgcatatcatccgcaatatcgttaacgacccatcagttgtttttgatgatatcgtgaccaacgaagagatccttaaacgcgccaaagatatctccgcttattacgatgatttgattgagatgaccagttattaccatctgctgggggaaggtacccaccaggttaatggtaagaccgtggtagtaaaattgcgtgatttgaaaaaacagctctatctgtgcctaatgagcgttaatgccttagaagccattcgtttctatgtcagttttgcctgttctttcgcttttgccgaacgtgaactgatggaaggcaacgcaaaaattatcaaaatgattgcccgcgatgaagcgctgcatttgacgggtacacagcatattctcaacctgatgcgtttgggtgaggatgatccggaaatggcagaaattgccgaagagtgccaacagcaatgctacgatctgtttgtactggcggcacagcaagagaaagagtgggctgaatacctgttccgtgatggctcaatgatcggcctaaataaagagatcctgtgccaatacgtagaatatattacaaacatccgtatgcaggcggtcggtctgggcataccctttagcacccgcaccaaccctatcccatggatcaattcttggttagtttccgataacgttcaggtcgcgccacaagaagtggaagtcagttcctatctggtgggtcaaattgattcagaagtcagtgctgacgacctgagtgatttcgagctgtaa

SEQ ID NO: 41592 - DNA, 2289 bp, Yersinia pestis
atgaaccaaagcctacttgttactaaacgcgatggcagcaaagaacgcattaatctggataaaatccacagggtcatcgactgggccgccgaaggtttacataacgtctcggtatcacaagtagagttgcgttcacacattcagttttatgatggcatcaaaacctctgacattcatgaaacaattatcaaggccgccgcagacttgatctcccgtgatgccccggattatcaatatctggctgcccgtttagccattttccacctgcgtaaaaaagcctatggtcagtttgaaccccctacgcttttcgctcatgtgtcgaaaatggtagaaatgggtaaatatgacaaacatctgctggaagattacaccgcagaagaatttgagcagatggacactttcatcgaccattggcgcgatatgaatttctcctacgctgcggttaagcagttggaaggtaaatatctggtgcagaaccgtgtaagcggtgagatctatgaaagtgcccaattcctgtacattctggtttcagcttgcctgttctccggctacccgcgtgaaacccgtctggattacatcaagcgtttctacgacgctatctctacgtttaaaatttcactgccaacaccgatcatggccggtgtgcgtacccccacccgccagttcagctcttgcgtactgattgaatgtggtgacagcctggattctattaatgccacctccagcgctatcgtgaaatacgtgtcacagcgtgccggtattggtatcaatgcgggccgtatccgcgcgttgggtagcccaattcgtggcggtgaagcattccatacgggttgcatcccattctataagcacttccagacggcggttaaatcctgctcacagggcggtgttcgtggcggcgcggccacgttgttctacccaatgtggcatctggaagtcgagagcctactggtcctgaaaaacaaccgtggtgttgaaggtaaccgtgtccgtcatatggattacggtgtgcaaatcaacaaactgatgtatcagcgtctgttgaaaggtggagatatcaccttgtttagcccttctgatgtaccggggctctatgatgcgttctttgccgatcaagatgaatttgaacgcctgtatgtcaaatacgagcaagacagcagtatccgtaagcaacgggtgaaagcggttgagctattctctttgatgatgcaagagcgtgcttctactggccgtatctatattcaaaatgttgaccactgcaacacgcacagcccgtttgatccgaaaattgccccggtgcgtcagtctaacctgtgcctggaaattgcattaccgactaagccgctgaatgacatcaacgatgagaatggcgaaattgcactctgtacgttgtcagcgttcaacctcggtgccattgatagcctcgatgatttagaagatctggccatactggcagtacgtgcactggatgccttgctggattatcaggactacccgattgcagcagcacaacgtggtgccatgggccgccgtaccttggggattggggtgattaactttgcctattatctggcgaagaacggcgtgcgttattctgacggcagtgctaataacctgacacaccggactttcgaagccattcagtactatttgttgaaagcatctaacgctctggcccgtgaacaaggcgcttgcccgtggtttaacgaaaccacgtattcacaaggtattttgccgatcgatacctataagaaagatttggatgccatcagcaatgaacctctacattacgattgggaaacactgcgtaaagagattcagactcatgggttgcgtaactccacgttgtcggcattgatgccatccgagacctcatcgcagatctccaatgcgaccaacggtattgaaccaccgcggggttacgtcagcatcaaagcctctaaagatggtattctgcgtcaggtcgtgcctgaatatgaacgcttgaaaggcgcttacgagctgctgtgggaaatgccgaataatgacggctacctgcaactggttggtttgatgcaaaaatttgtcgatcaagcgatatcggcgaacaccaattatgatccaacccgcttcccatcaggtaaagtaccgatgaagcagttgctgaaagatttgctgaccacctataaatttggtgtgaaaacgctttactatcaaaacacccgtgacggcgctgatgatgtgcaagaagacattcaatcaagcctgccgggtgatgacgactgcgaaggcggtgcatgtaagatttag

SEQ ID NO: 41593 - DNA, 2676 bp, Yersinia pestis
atgagcgaccttgccagagaaataacaccggtcaacatcgaggaagagctgaaaagctcctatctggattatgcgatgtccgttattgtcggacgtgcgttaccagatgtccgtgatggactgaaaccggtgcaccgtcgcgtactgtttgcgatgaatgtactgggtaatgactggaataaaccatacaaaaaatcggcccgtgtagtcggggacgttatcggtaaataccacccgcatggtgacagcgcggtctacgacactatcgtgcgtatggcccagccgttctcactgcgctatatgctggtggatgggcagggtaacttcggttccgtcgatggtgactccgccgcggcgatgcgttataccgaaatccgtatgtctaaaattgctcacgaattgttagcggatttagaaaaagataccgttgacttcgtgcctaactatgatggtacggaacaaattccggctgttatgccgaccagaatccctaacctgctggtaaacggttcgtcgggtattgcggtagggatggcaaccaatattccgccacataatctttctgaggttattgatggctgtctggcttatatagaagatgaaaacatcagcattgaagggctgatggagtatatccctggcccagacttcccaacagcagccattattaatggccgccgtggtattgaagaggcttatcgtactggtcgcggtaaggtctatatccgcgcacgtgctgaagtcgaagcggatgccaaaacgggccgtgaaaccattattgttcatgagatcccgtatcaggtgaacaaagcacggttgattgagaaaatcgccgagctggtaaaagaaaaacgtgtcgaaggcatcagcgcgttacgcgatgagtctgataaagacggcatgcgcatcgtgattgaaatcaaacgtgatgcggtcggggaagtggtgctgaataacctctactctctgacacaattgcaggtgactttcggtatcaatatggtggccttgtctcaggggcaaccgaagctgcttaacctgaaagacattctggttgcttttgttcgtcaccgtcgtgaagtggtgactcgccgtaccatttttgaactgcgtaaagcacgtgatcgcgcccatatccttgaagcgttggcgattgcactggctaacattgatccgattatcgaattgattcgccgtgcatcgacccctgcggaagcaaaagccggtttgattgccagtccttgggagttaggtaacgttgcttccatgctggaacgtgctggtgatgacgcggcccgccctgagtggctggaagcggaatttggtatccgtgacggtaaatattaccttaccgagcaacaggctcaggctattttggatctgcgtttgcagaaactgacaggtctggagcatgagaaactgctggatgagtataaagagctgctcaccttaattggcgagctgatctttattctagaaaatccggatcgcctgatggaggttatccgcgaagaattagtggcgatcaaagagcaatataacgatcttcgtcgcactgagatcaccgcgaatacctctgatatcaatattgaagacctgattaatcaagaagatgtggttgtgacgttgtcccatcagggctacgtcaaataccagccgttgagtgattacgaagctcagcgtcgtggtggtaaaggtaaatctgctgcacgtatcaaagaagaagactttattgatcgcctgctcgttgccaatacccacgataccatcttgtgcttctccagccgtggccgtctctattggatgaaggtctatcaactgccggaagccagccgtggggctcgtggccgtcccatcgtcaacttgttgccgcttgagccaaatgagcgtattaccgccattctgcctgtgcgcgaatatgaagaaggctgtcatgtctttatggctaccgccagcggtactgtgaagaaaacggcattgacggagttcagtcgcccacgtagcgccggtattatcgccgttaatttgaacgaaggtgatgagcttatcggtgtggatctgacggatggcagcaatgaagttatgctgttctcagcattgggtaaagtggttcgtttcccagaagggcaggttcgctctatgggccgtaccgcaaccggtgtccgtgggatcaacctcaatggcgatgatcgggttatttctctgatcattcctcgtggtgatggtgaaatcctgaccgtaactgaaaacggttatggtaagcgtactgcagtggcagaatatccaaccaagtcccgtgcgactcagggggttatctccattaaagtcagtgagcgtaatggtaaggttgtcggtgctgttcaagttgcaccaactgaccaaatcatgatgatcactgatgctggcacactggtacgtactcgcgtatccgaagtgagtgtcgtagggcgtaatacccaaggtgtgaccctgatccgtaccgcagaagatgaacatgttgttggtttgcaacgtgtcgctgaacctgaagaggatgatgatatccttgatggcgaatcatcagaaggtgaagagggcagcgaagaaaacgcggcactaaatgcaccatcagatgatgttgccgatgaagacactgatgcagaagacgacactgatgtagaagacgacaacgcataa

SEQ ID NO: 41594 - DNA, 654 bp, Yersinia pestis
atgaacaaccttaatgtaattattgctgatgaccatccaattgttttgtttggcatccgaaagtcgcttgagcaaattgaatgggtaaacgttgtcggagaatttgaagactccactgcgcttattaacaatttgtccaaacttgatgccaacgtgctaattactgacctctctatgccaggggataagtatggtgatggcatcacattaatcaaatatataaaacgacattatccagatttggctataattgtcttaactatgaataataatccggctatcttaagttctgtcttggacttagatatcgacggaatagtattgaaacagggcgcacccgctgacttacctaaggcattggccgcattacaaaaagggaagaaattcactcctgaaagcgtagccaaactactcgaaaaaatcagtgccaatggttacggtgacaagcgtttgtcaccaaaagaaagtgaagttttgcgactctttgctgaaggttttctggtaacagaaattgccagaaaacttaaccgcagtatcaagaccattagcagccagaagaaatctgcaatgctaaagctgggcgttgataacgatatcgctttgctaaattatctttcgtctgtgacaattagccaagtggataaagaactgtaa

SEQ ID NO: 41595 - DNA, 936 bp, Yersinia pestis
atgaataaagaagcactagcaaaaaaaggggccggcgcactggcattacttattctgagtcatcctgccgtggccaacaataatacggatacagcaggcaacgtgactgtcagcacctcgcttggattattgaatgccgagtcaatcgaatctgtttatcaatccagtgaacctaaccaaaagctcagtcagttaaactgggaagccaacaatacacccatcgtaaaaatggatatcgcctgggatgcgttaccccgactaaccctaacagccaagggctggagcacgctttcatcaggtcagggagtgatggataattatgattggcttaccccacaacaaacacagtggagtgattggtctcatcacgaaaaaaccaatttgaattatgccaatgaaattgacataaatgcgaagatttggtttttaaaacaacacaattatcgggttgggcctattttaggttatcaggaaaacaatcaaagctggacagcttatggtggtaactttaattataataatggtgcaaatatctttactgctcctgacggcattgttggcgttggttataaacaaaaatttgatatgctttatattggcttagcaggaagttatcgctatcaacaattagaatttaatgccttattgaaatacagcaattgggttaatgccaatgcatacgataatcactataaccgcaaagtttcatttaaagacagtagcaagaattcaagttactactcggccgttattgatgttggatattacttcacagaaaatactaaacttttcgtggaagccgcttggaaccaatattctgaagggcgaggagagacacaaacgctcaactacgccaccgggaatgttggcagtagtaaatcaggtattgagtatcaaagccaaacccttaccgtgggttttcagtacaaattttaa

SEQ ID NO: 41596 - DNA, 993 bp, Yersinia pestis
atgatcagaactgaacactcttcttctacgcaagagagcggtagcactctccatcgccataaacgttgggagaaattattacatcacccggccatgttgccatttattggttttgttgtgctatttgtcttaatgagcgggttaaatgacagttttttgaccgtaaataacctcactaacgtggcgcggcaggtgtcgattaatgccattatcgcggtaggcatgacttgcgcgatcttgaccggggggatcgatctttcggttgggccagtcatggcgttgtcagggtctattgctgccgggctgatgctggccggtattcctattccgttagccatgatggccgctctgttagtcggtgccttatttggcctggcgaatgggagttgtattgcttatctgcggatgccgcctatcatcgtgacgctggcctctatggggatcgcccgtggtttggcgttgttgtacaccggggggtaccccatctccggtttacctgacatgttttcattctttggccgaggtacggtactgggtattcaagtccccattctgatcatggccggtgtttatctgttcgcttggatcatgctcaaccatttatcgtttggtcgctatatttatgctatcggtggcaacgaagaagcggcgcgtttgagtggtatccgtgtgtcgcgctataaaatgctggtatatgtggtcagtggcctgacagccgcgttggccgggctggtactgacttcgcggctaatgagtgggcaacctaatgcgggcgaagggtttgaactggacgctatcgccgccgttgttttgggcggtgcggcaatctccggaggcaagggggcgattattggtacgttggtaggggcgatgatgttgggggtgttgaataatggtctcaacctgatgagcgtatcgccttatatccagaatgtcgtgaaaggcggcattattcttgcggcgatctatctcagttccgttcggcgcaaataa

SEQ ID NO: 41597 - DNA, 1437 bp, Yersinia pestis
atgagctatcaacagttaccgaaagattttttatggggtggcgcggttgcggcacatcaggttgaaggcggctgggataaaggcggcaaaggcgtgagcattgctgatgtcctctctggtggctcccatggggttgaccgtgtgatgacagacggagtactggaagggtatcgttatccaaaccatgaagcagttgatttttatagccattacaaagaagacatcgcgctgtttgccgaaatgggcttcaaatgtttccgcacctcaattgcctggactcgtatcttcccgcatggcgatgaacagcaacccaatgaagccggcctgcaattttatgacgatatgttcgatgaattgctgaaatacggtattgaaccggtgattacgttatctcacttcgaaatgccgtggcatctggtcaaagaatatggtggctggaaaaaccgtaaagtggtcgatttctttgtaaaattcagtgaagtcgtcatggcgcgctacaaaagcaaagttaaatattggatgaccttcaacgagataaataaccagcgtaactggaaatatccactgtttggttattgctgttctggtgtggtgttcactgaacaagagaacccagaagagaccctgtatcaggtactgcatcatcagtttgttgccagtgccaaagtggtcaagctgggtcatgccattaatccggaatttaagattggctgtatggtggcgatggtgcctctgtatcctttctcctgccatccagatgacatgatgtattccgttgaagctatgcgtgagcgttatcttttcggcgacgttcatatgcgcggttattacccttcatatattttacaagagtgggcgcgccgtggtttcaatatccatatggaagagggggacctcgagactctgcgtgatggttgcgccgattacatggggctgagttattacatgagtaacgcggtctctgcgattaatccaggtagcggcaattcactctctggttttgagggcagcgtgccgaacccacacgtcaaagcctctgattgggggtggcagattgatccggtaggtctgcgttactctctgagtgtgttgtatgaacgctatcagaagccgctatttattgttgaaaatggttttggtgcgatagataaagtggcagcggatggcatggtgcacgacgactaccgcattgcttatctaaaagcccatatcgagcagatgaaaaaagcggtatttgaagatggcgtggatctaatgggttataccccatggggatgtattgactgcgtatctttcactaccggtgaatacagtaaacgttatggctttatttatgtcgataaaaacgatgatggcaccggtacaatggcgcgttcacgtaagttaagttttgattggtataaaaaagttattgccagcaatggtgaagttctttaa

SEQ ID NO: 41598 - DNA, 888 bp, Yersinia pestis
atgtcgttgtctccttcttctaaaaactcactgccattactccccattttgttgctcgtgatcgccatgatctcaatacaaagtggtgcatcactggcaaaaagcttattcccactggtcggtgcacaaggtattacctcgctgcggctcggcatcggtacacttattctgtttgttatttttaaaccttggcggatgcggtttgctgcaggcagccgtttacccctattaatttatggggtggcattaggtgggatgaacttcttgttctacatgtcgttaaaaacggtgccattaggcatcgctgtagcactggaattcacagggcctctggccgtcgctatgttttcttcccggcgtgcggtagattttatctgggtggggctcgccattctggggttatggttcctgttaccactggggcataacattggcaccattgatttatttggtgcagcctgtgctttaggtgcaggggcctgctgggcaatctatatcatttcgggtcaaaaggccggaggtgaccatggcccagggaccgtcgcggtcggctcgttgattgcggccttgattttctgcccaattggggtggcctataacggcatggcactgttcgatccggcgatcttgcccattgcactggccgtcgccattttgtctactgcattaccttactcactcgaaatggtcgcgttaactcgccttcctgcccggacatttggcacattaatgagtctggaacctgcattagccgcaatttctggcctggtgttcttaaatgagcatctgaccttggtgcaatggctcgcgttagcatcaattatcagtgcctccgttggtgccagcctgaccataaaacctaaaccacaacttgaccaggtcacctga

SEQ ID NO: 41599 - DNA, 285 bp, Yersinia pestis
atgaccactatcaatgtagaagtacgtaacgaccagggtaagggtgcgagccgccgcctgcgtgcagcaaataaatttccggcaatcgtttacggtggttcagaagcagctatttctattgctctcgaccatgacaccaccaagaaccttgaactgaaaccgggcttttatgattccgtactgactctggttatcgacggtaaagaaactaaagttaaagtacaggctgttcagcgtcacgctttcaagccaaaactgactcatatcgacttcgttcgcgtttaa

SEQ ID NO: 41600 - DNA, 1758 bp, Yersinia pestis
atggcgttcacactacggccttatcaacgagaagcggtcgatgccacggtggcttattttcgacgccacaccacacccgcactcattgttctaccaaccggcgcaggcaagagtttagtgatcgcagaacttgcgaaactggcccgtggccgtgtgttggtattagcgcatgtcaaagagttggtagcacagaatcacgcaaaatactgcgcatacggtcttgaggccgatatctttgccgccgggttgcaacagcgacaaagcgagggaaaagtggtctttggcagcgtgcaatcggtggcccgtaatctgccgctatttgatagcgcattttctctgctgattatcgatgaatgtcatcgtatcagcgatgaagatgacagccagtatcagcaaatcattcagcatttacgcacggggaatccgcagttacggctgttggggctgacggccaccccttatcggctggggaaaggctggatttatcagttccactatcacggtattactcgtggtgatgaaaaagccctgttccgtgactgtatttatgaattaccgctgcgttatatgattaaacatggctttctggtgccacctgaacggctggacatgccggtcgtacagtatgatttcagccgcctgaccagcaacagtgatggcttgttccgtgaggcagatttagatcgagaacttaagcaacaacaaagaattaccccacatattgttagccaaataatcgaatatgcggctcagcgtcgcggtgtgatgatttttgccgccaccgtagagcacgccaaagaagtctatggcctgttgcccaaaggtgaagccgcgttggtcagcgcggggaccccacctacggaacgggatgcgctgatcaatgcctttaaacagcaacaattgcgctatttggtcaatgtgtcggtactgaccaccggttttgatgccccccatgtggatctgattgccattcttcgtccaaccgaatccatcagtttatatcaacaaattgttggccgaggcctgcggctgtttcccggtaaagaggattgcttgattctggattatgcgggtaatccccatgaccttttcacgccagaagtgggcacgagcaaacctcacagcgggagccaaccagtacaagtcttctgccccgattgtggttttgccaatatcttctgggggaaatgcactgagtccggcgaaataattgagcactatggccgccgctgtcagggctggtttgaggatgatcagggtgcacgtgcgcaatgtgactaccgttttcgctttaaatcctgcccacattgcggagcagaaaatgatattgccgcccgtcgctgccatcaatgccaggcggttttggtcgatcccgacgatatgctgaaagccgccctgaaactgaaagatgcgctggtattgcgctgtggcggtatgcagctagaaacgggccaagacgccaaaggcgagtggctgaaagcgacctattacgatgaggatggcaccaataccagtgagcgcttccgattaaccacacctgcacaacgtatggcattcgaacagatattcctgcgccctcaccagcgcgcaccgggcattgccctaaaatggcacaccgccgctgatattatcgcgcagcaggcgttgctacgttatccggattttgtggtcgcccgccgtcgggggcagtggtggcaaatcagggagaaggtatttgattacaaggggcgttttcggcgggccgatgcccttgcctga

SEQ ID NO: 41601 - DNA, 708 bp, Yersinia pestis
atgcgattggacaagtttttatctcagcaattaggggtcagccgggcgttggtagcgcgtgaactgcgggcaaagcgtgtgactattgatggcgaggtggtcaaaagtggtgccatcaagctgacaccggaacaagacgtgcgatttgatggcaatccgttacagcagatggttggcccccgttattttatgttgaacaaaccgcagggctatgtgtgttcgacggaagatcccgatcatccaacggtgttgtatttccttgatgagccagtggcttacaaactccatgccgctgggcggttggatatcgatactaccgggttggtcttgatgactgacgatgggcagtggtcacatcgcgtcacttcgccacgtcatcattgtgaaaagacctatttggtgacgttggaacatccgctatccgatgacaccgcacagcaatttgctgacggtgtccaactgtacaatgaaaaatccctgaccaaaccggctcaactggacgttatcgagccgcaacgggtgcgtttgaccatcagcgaagggcgttatcatcaggtgaagcggatgtttgctgctgtggggaaccgagtgattgagttacatcgtgaacgcattggtgatatcacgcttgatgatgatttagcccctggtgagtaccggccgctgacgacagaagagatcgccagcgtgggtgccccacacttgtaa

SEQ ID NO: 41602 - DNA, 1254 bp, Yersinia pestis
atggaaagcaaagtagttgttccggcagaaggtaagaaaattactgtcgatgctcagggtaaactggttgttccgcataatccgatcattccatttattgaaggtgacggtattggtgttgatgtaaccccggcgatgatcaacgtggtagatgctgcggttaagaaagcttataacggtgaacgtaaaatttcctggatggaaatttacactggtgagaaatcaacccatgtctatggtaaagatgtttggttgccagaagaaaccttagatctgatccgtgattatcgcgttgctatcaaaggcccgttgaccactcctgtcggtggcggcatccgttctttgaacgttgctctgcgtcaacaacttgacctgtatgtgtgtctgcgtccggtgcgttattatgaaggcaccccaagcccggtaaaacaccctgaactgaccaacatggtgattttccgtgaaaacgctgaagatatctatgcgggtatcgaatggaaagcgggttcacccgaagcagagaaagtgatcaagttcctgcgtgaagagatgggtgtgaagaaaatccgtttccctgaacaatgtggtatcggtgtgaaaccgtgttcagaagaagggactaagcgtttggtacgtgcagcgattgaatatgcaattaccaacgatcgtgaatcagttacgctggttcataaaggcaatattatgaaattcaccgaaggcgcgtttaaagactggggttatcagttagcgcgtgaggaatttggtggtgaactgatcgacggtggcccatgggttaaaatcaaaaacccaaataacggcaaagaaattatcgttaaagatgtgattgccgatgctttcctgcaacagatcctgctgcgtcctgcggaatatgatgttatcgcttgtatgaacctgaacggtgattacatctctgatgcattggcagctcaggttggcggtattggtattgctccgggggctaacattggtgatgactgcgcactgttcgaagccactcacggtactgcaccaaaatatgctggtcaggataaagtgaacccaggttctattattctttcagcagaaatgatgctgcgtcacatgggctggtttgaagccgctgacttaatcattaaaggcactgaaggcgcaattcaagccaagaccgtgacttatgatttcgaacgtctgatggaaggcgctaagttgttgaagtgtagtgagtttggcgacgccattattaagcacatgtag

SEQ ID NO: 41603 - DNA, 504 bp, Yersinia pestis
atgagtacagcaaaactggtaaaaacaaaaccctccgaactgctttatacccgtaatgacgttgaggagcatgttaaagttgctacgattaagcgattgaaccaaatggtcattcagtttatcgatttgtcgcttatcaccaaacaggcccattggaacatgcgcggtgctaactttgttgctgtccatgaaatgctggatggcttccgtactgcccttaccgaccatctggatacctttgccgagcgtgctgtacaactcggtggtgtggcattgggtaccgcacaggtcattaatgataaaaccccgctaaagagctacccaaccaatatccatagcgtgcaagagcacctaaaagcattagccgagcgctatgcgatagtcgcaaacgatattcgtaaagcgataaccgaagttgaagatgaaaacagtgcggacatgtttactgccgcttcccgtgatctggataaattcttgtggtttatcgagtcaaatattgagtga

SEQ ID NO: 41604 - DNA, 657 bp, Yersinia pestis
atgcagtttgaatggagcgctatttggcccgccatcccacttctgcttgaaggtgccaagttgaccctatggatttccgtcctggggctacttggtggcctgattattggggtgatagccggtcttgcccgcgcctatgggggttggctgagcagtcatatcgccttagtttttattgagttgatccgcggtacgcccattgtcgtgcaggtgatgtttatctacttcgcgctacccatgatgataccgctacgtatcgatcctttctctgccgccgttgtgacgatcatcattaactccggtgcctatatagcggaaatcacccgtggtgcggtgctgtctatccacagtgggttccgtgaagctggtttggcactcggtctctcccaacgtggaactctgctttacgttattgcgcccctggcactgcgccgtatgttgccaccgctaggcaaccaatggatcgtcagtatcaaagacacctcactgtttatcgtgattggcgtagccgaactgactcgtcagggtcaagagattattgccggtaatttccgcgccatggaaatatggagcgcggtggcggtgatctacctgattatcacgctggcactgagcttcgttctccgtcggttagaaagaaaactgaaaataatatga

SEQ ID NO: 41605 - DNA, 1200 bp, Yersinia pestis
gtgcaaaaaaaccggacatcccacattggtttgatttttatccttgggttgttgtcgatgctgatgcctttggcgattgatatgtatctgccaagcatgccgattattgcgcaggagtttggggtcgagagtggccgtgtgcaaatgacgctgagcgcatatgtactgggttttgccattgggcaaatgttctatgggccaatggctgacagcatcgggcgtaagccggtcattttttgggggacgctgatttttgcgcttgcaggtatggcatgtgcgttggtgcagtcggtcgagcaactcattaatatgcgcttcctgcatggcttatccgccgccgccgcaagtgtggtgattaatgccttgatgcgcgatatgttcaccaaagatgagttctcccgaatgatgtctttcgtggtattggtgatgacgattgcccccttgctcgcacccattatcggtggtgcactgttggtgtggtttagctggcatgctattttctggaccatggcgggggcggcactggttggtgcggtgttagtggcgctgtttatccaagaaacattgcctcctgaacggcgacagaaatttcatctgcgcacgaccataggtaattttggctcgttatttcgccacaaacgcgtactgagctatatgctggccagtggtttctcttttgccggtatgttctcattcctcagcgccggtccttttgtttatatcgatttaaacggtgtttccccgcaaaactttggttattactttgcactgaacattgtctttttgttcttgatgacctttatcaacagccgtaatgtgcgccgtttcggggcgctgaaaatgttccgttttggcctgatagtgcaatttgtgatggggatctggctggtagtggtttgtgtcgctggcctaggattctgggccttagttctgggcgtagctgcctatgttgggtgtatcgcaatgatcacgtctaacgcgatggcagtgatattagatgatttcccgcatatggcagggaccgcctcttctttggcggggacgttgcgctttggtattggtgcggtggtggggacgttactgtcgatggcttcgtcgcgcagcgcctggccaatggtcagttcaatggcattttgtattattgtcgcgatgttgttgtatctgtatgccagtcgcccaagtcataaaaccgtgtcataa

SEQ ID NO: 41606 - DNA, 723 bp, Yersinia pestis
atgattaacttcaaaaacgtctccaaacactttggcaaaattcaggtactccacgatatcaatctgaatatcacccagggtgaagtggtggttattattggcccgtccggttcaggtaaatcgaccctactgcgctgtatcaataagctggaagtgattacccgcggccagttgattgtcgatggtttggatgttaatagccccaacatcgatgagcggcaaatccgtctggaagccggcatggtattccagcagttttatctgtttccgcatctgactgccttggaaaacgtcgcctttggcccaacaaaagtgcgtggcacatccaaggaagaggcaaaaaaacaggctctcgcgttgttgtctaaagtggggttggaagaccgtgcccaccattatccggctgagctgtctggcggccagcagcagcgtgtggctatcgcccgtgcactggcggtaaaacctaagctgatgttattcgatgaacccacatcggcattggacccggaattacgccatgaagtcttgacggtgatgaaagatttggccgaagagggcatgaccatggttatcgtcacccacgaagtgggctttgctcagaaagtggcatcgcggctaatctttattgataaaggccggatagcagaagatggtgatccagacagtttaatctccaatccgcccagcgaacgtttacgggaattcctgcaacacgtttcctga

SEQ ID NO: 41607 - DNA, 1593 bp, Yersinia pestis
atggcgacctcaccactattggatatccaaaacctcagtgttgcgtttagtcaggcaggcgttcagcgtgaggttgtcagcgaactgtcattacaaatcaacgctggagaaacactggcgctggtcggggaatcaggatcggggaaaagcgtcaccgcgttgtccgtgttacgtttgctaccatcaccgccagtagtgtatcccacaggtgatattctgtttgcgggcagctcattgctacatgctgatgagccaacactacggcgcattcgtggtaatcagatttcgatgatcttccaagaaccgatggtgtcactcaacccgctgcataatattgaaaaacagttggcagaagtgctctcactgcaccggggtatggggcaagaagcggcgcgggctgaaattatccaatgcctcgacagagttggcattcgtaatgccaaagggcgattagccgattttccccatcaactttctggcggtgaacgccagcgagtgatgattgccatggcggtattaacccaacccaaattattgattgccgatgagccaaccaccgcactggatgtttctgttcaggcgcaaattctgagcttgctgaaagagttaaagcaagagatgaacatgagcctgctgtttatcacccataacctgaatatcgtgcgccgattagcggataacgtggcggtgatgcgggaaggccgtaaagtggagcagaacaaccggcaggcgctcttcagtgccccgcaacacccctacactcgccagttactggatgctgagtcacaggatgccccgttgccactcgcgcagaatacccagccactgcttgtggttaaagagttgcaagttgccttcccgatcaaacgtggtttactgcgccgcaccgtcgatcaccactatgcgctaaaaagcctcagttttgacctgaagcccggcgaaagtctgggcttggtgggggagtccggttcgggtaaaagtacctccggtctggccttgttacgcttattgccatcacagggtgaaatctggtttagcgggcaaccgctgcaccaatttacccccaaacagatgctgccctatcgcagccgtattcaggtggtcttccaggacccttactcagcattgaacccacgtttgaatgtgcaacagatcattgcggagggcctggaagtgcatcaaaaactcagtgcagcgcaacgtgaagagcgagtgattaaggcaatggaagaagtcggattggatccagccacccgctctcgttatccaactgaattctcgggggggcagcgtcagcgcattgcgattgcccgcgcgctgatcctgcaaccccaactgttgatccttgatgaaccaacgtcttcactggataaatcggtacaggcgcaaattttggccctactgaaatcccttcagcagcgttaccaactcagctacttgtttattagccatgacttgcaggtcgtgcgttcgctctgccatcaggtgattgtcttaagacaaggagaagtggtggaacaaggtgattgtcaggcaatatttgcggcaccaaaacaactatatactcagcaattattagaattagcagactaa

SEQ ID NO: 41608 - DNA, 1326 bp, Yersinia pestis
atgtcagtattagaaaatcgtgtacggctatctgggctggtattgatgctaagcggattggctgctattactgcgccggtagccgccgagccatcgggctatactttagaacgtgtggttattttgagtcgccatggtgttcgctcgccgaccaaacaaacgcagcttatgaatgatgttacgccagataagtggccacaatggccggtaaaagcggggtatttaacgccacgtggtgcggagttggtcacattgatgggggggttttatggtgattactttcgcagccttggtttgttagcggcgggatgtccggcagaggggggggtatatgcacaggcagatatcgatcaacgtacccgcttaaccggacaggcatttcttgatggtgtggctccggggtgtggtttgaccgtgcataatcaggccgatttgaaaaagaccgatcccctgttccatccggtagaggctggcgtgtgtaagttagacgccgcacaaacagataaagcgattgaagaacagttgggcgggccgttagatacggtgagccagcgctacgctaaaccttttgcccagatgggggacgtgctgaattttgcggcttctccttattgcaaatctttgcaacagcaaggaaaaacgtgtgattttgcccactttgcggccaatgaagttaacgttaataaagaagggacaaaagtgaccctcagtgggccactggcgttatcatcgacattgggtgaaatcttcttattacaaaacgcacaagccatgccagaggttgcctggcaacggctaaaaggggcggagaattgggtatccttattgtcattacataacgcgcaatttaatttaatggcaaaaacaccgtatatcgcccgtcataaagggacgccattattacagcagatagatacggctttaacccttcaactggatgctcaggggcaaaagctacccatttcagcccaaaaccgggtcttgttcctcggtgggcatgataccaatattgccaatattgcgggtatgctgggagccgactggcagctacccgagcaacctgataatactccaccaggtgggggattggtttttgaactatggcaaaatccggataaccaccagcgctacgttgcggtgaagatgttctaccaaacgatggatcagttgcgtaatgccgaaaaattggatctgaaaaataacccagcgggtattatttccgttgcagttgctggttgtgaaaataacggtgacgataagctttgcgagcttgatacattccaaaagaaagtggctaaggtaattgaacctgcctgccacatctaa

SEQ ID NO: 41609 - DNA, 1809 bp, Yersinia pestis
atgtttttacgcctatttgctaccttgatactttcggccatgagttttgggttagctgccgaaaccattaaagagggcgtttcttttgccatattgggcgaccccaagtactcatcggattttagccattttgattatgtcaatccagcggcccctaaagggggaaatattactctgtcggcgattggcacatttgataatttcaaccggtatgcattgcgtggtacctctgcagctcgaacggagagactctatgattcattgttcagtccctcaagcgatgagattggcagctactatccattaattgcggaatcagcgcgctattctcccgacttcagttggattgaggttgatatcaacccccacgcccgttttcatgatggtgccccgattactgccgaggatgtggccttcaccttcaacaaatttatgactgaaggggtaccacaatttcgattgttctataaaggcgttaaagtcaacgctatttcccgtctgacggtacgttttgaatttcctgaacctaacaaagataaaatgctcggcctacttggttttccggtgatgcccaaacatttctggaaagatcataagctgagtgacccactcagtacccctccagtcgccagcggcccttaccgcatcagcaaatacaaaatgggccaatatgtcacttatgaacgggtaaaagattactgggccgccaatctgccggttaaccggggccaatataattttgacactatccgttatgattattatctggacgacaaagtcgccttagaagcctttaaagccggagcctttgatttacggacggagtcctcaccgaaaagctgggcgacgcagtatgcgggcggtaacttcgccaagaactatatcgtcaaacaggatattaccgacaactcggcacagaacactcgctggttagcatttaatgtgcaacggcccctcttcagtgaccgacgcgtccgccaggcgctgactttggccttcgattttgaatggatgaacaaagccttttatttcaatagctatcagcgtgccaatagcttcttccaaaataccgaatatgcggcaacaggttatccggacagtgcagaactggcttggctcgcgccattgaaagataaaatacccgcggaagttttcacccagatttatcaaccaccacacacggatggtagcggctattcgcgagataacctgctcaaagccaaagagttactgaatgaagcgggctgggaagtcaaagaccaacaactggtgaatagtaaaaccggtaaaccttttgaatttgaattgctattacccagcggcagcgattttcagtatgtgcaaccgttcaaacacaatttgcagcgtttaggtatcacgatgaagatccgcgaagttgacagctcgcagtttattaatcgcttacgcagccgggatttcgatatgatcccaacggtttacaacgccttcccttacccaagcccagacctgcaaatcttgtggagttcagcctacattgattccacctataacagacccggtattaaagatccggccatcgaccaattaatcgcccagattgtcagccatcaggatcaaccagaggccttactctctctggggcgtgcccttgaccgggtattgacctggaattatttgatgatcccgatgtggtattccaatcatagccgcttcgcctattgggataaactctcgatgccagcggttcgtcccacctattcgctagggtttgatagctggtggtttgatgttaacaaggcagctcgcctgccagtagaacgtcgttag

SEQ ID NO: 41610 - DNA, 1011 bp, Yersinia pestis
atgacattgttaactcatctccctgcaaacatggtcgcgattgaaatcacccagtttggtggaccagaggtattagtcccagccaaacggccaacccccatgccagccgctggcgaaattttggtgaaagtatctgccgctggagtgaatcggcctgatgtcatgcaacgtcgtgggcaatatgcgcccccaccgggtgcctcagatattcccggattagaagttgccggcgaagtggtcgccactgccgcggatgtcacgcgttttaaaattggggacaacgtctgcgggctgatcgcgggcggcggttatgcgcagtactgtgtcatacatgaaaccaatgcgttaccgatccctcaggggcttagcgccattgaagccgccgcacttcctgaaacgttctttactgtctggaccaatttattccaacgtggtcacttcactgcaggcgaaaccgtactcattcatggcggttcttcaggcatagggacaacagctattttgctgagcaaagcttttggcgcggcaacggttattgtgacggtaggttcggaagagaaacgtcaggcgtgcctgaatctgggcgcagatattgctattaattatcacactcaggattttgtcgctgaaaccaagcgggcaaccgccggtaaaggggcagatgtgattgtcgatttaattgctggtgattatgtcgcacgcaattatgacgcagcggcgatgaatggccgtattgttcagattggtacacaaaatggtcatgccaaagaccttaacctgatgctgatgttaataaaacgtctaacacataccggctccacactgcgctcccgtacagttgcagagaaagcattaattgccaacgaacttgaacaacacgtttggccactgctgagtgagggtaaaatgaaaccacagattttcagtaccttcccgctggaagccgccgcaaaagcccatgaactaatggaaagcagtacacacataggtaaaattgttctcaccgcttga

SEQ ID NO: 41611 - DNA, 801 bp, Yersinia pestis
ttggtcagatcaatttggtattttctacgccaatgtctgatgcaggaaattaaggttatgcggttatatcaggaagtgggcagccaactgcgggaagcgattgtcagtgggcgatactcagtgggcgatcgtttaccaccggagcgtgatattgccgaaaatttcagtgtcagccgtagtgtggtgcgtgaagccctgattatgctcgagctggagaagctggtagaagtacgcaaaggctccggtgtttacgtggtgaatgtgcccacgatgtcgcttaatggtgagtcggctacgtcaatcgatagtggctacggcccgtttgaactgctacaagcccggcaattgttagagagcgaagtcgcggcttttgccgcaatgcaagccaccaaagccgatatcattaaaatgcgtaatgctattgagcagggaaaagccgcactgacggctggcgcgatagatgaaagcgctgatgagttgtttcattgtttgttagcgcaatcgacacaaaatagtgtgctggccaatatggttgcgcagacctggcaagtccggaaaagtagtgcaatgtggcagggggcgcatagtcataccgccgattttagctaccgttggcaatggttggatgatcaccaaaaaatcttgcaagccgtgcttcgccgcgacagtaaagccgctaagcaggccatgtggcagcatttggagaatgtaaaattgaagttgctggagatctctgatgctgaccatccagattttgatggctacttatttgagtctgcgccatatcagattgaagagtaa

SEQ ID NO: 41612 - DNA, 2700 bp, Yersinia pestis
atgcgtaaattagaaaaaacagatgcaaaccgtagtaataataagaaaccttttgctattgcactggaagcaaaaaatagtctcgaacaaacattattcaagttaaatacgcatttaaatggtttgacggaagaggatgccagagagcggctggaattatacggtattaatcaggttgcgcatgaaaaagcgccaccggcttttcttcagttattggccgcatttaataacccgtttatttttgttttaattattttggcgtctatcagtttctttaccgattattggctgccattacaagagggtggggaaactgatcttatcggggtgagcattattgtgacaatggtgctgattagtggcttattgcgattctggcaagaatatcggacgaataaggcggccgaagcactgaaatcgatggtgcgtaccaccgcgacggtactgcgtcgcggccactatggtgctaaaccaactcagcaagaaattccaattaatcagttggttccaggcgacattattctgttgtctgcgggtgatatgatccctgccgatttacgcctgattaattcgcgtgatttatttgtcagccaggcgatcctcaccggtgaggcgattccggtcgaaaagtatgatgcgatggggtgtgtcagctcaaaatccgtggatgcgggtgccggcagtgagggggaactgcttgaactctctaatatatgtctgatggggacaaacgtggccagcggtacggcaatgggggtggtggtcgccacgggggggcatacttactttggttcactggctaaatctattgtggggactcgcgcgcaaacagcctttgatcgtggtgttaatagcgtcagttggttattaattcgctttatgttggttatggtgcccattgtcttgttgatcaatggctttaccaagggcgattggacggaagccgcattgtttgccttggcggttgctgtgggtttaacgccagaaatgttgccaatgattgtcagttctaatctggcaaaaggggccatcgcgatggcccggcgtaaagtcgtggttaagcgtttgaatgcgatacagaattttggcgcgatggatgtgctatgtaccgataagaccggcaccttaacccaagatcgtatcattctggagcaccacttagatgttagtggttgtaacgacaataaggtattgcagctggcatggcttaacagcttccatcaaagtggaatgcgcaacctgatggatcaggcggtaatcaaatttagtcgtggcaagccagaaatagaggcgttgcgcaacttcaataaagtggatgagttaccgttcgattttatccgtcggcgtttgtccatcgtggtaaaagatgcgcaacaacaacagcacctaatttgcaaaggtgcggtggaggagatgctcagtatctgcactcatgtgcgggaaggtgatgacatctttccactggatgctgcccgccgtgcaacgctacaagctctggctacgcaatataatgaagatggttttcgtgtcttgttgctggcgacccgagagttaggggctcaggtcagccctgtgccgttgaatattgacgatgaacgagatttagtggtgcaggggttactgacatttcttgacccaccgaaggaaagtgcagcggcggcgattgccgcattgcgggagaatggtgtcgccgtcaaagtattaactggcgataatccaattattaccgcaaaaatttgccgggatgttgggctggaacctggggaaccactgaatgggcgtgatatcgaagcaatggatgaggctacgttggcgcgggaagtggaattacgcacggtatttaccaaactcacaccgttacaaaaatcacgtgtgctaaaaatgctacaaagcaacggacataccgtgggcttcttgggcgatgggatcaatgatgcaccggcattacgtgatgccgatgtgggcatttcagtggatactgggaccgatattgctaaagagtcagccgatattatcctgctggaaaaagacctgatggtactggaagccggggtgattaaagggcgcgaaactttcggaaatatcatcaaatacttgaatatgactgccagttctaactttggtaatgtgttttcggtattagtggccagcgcatttattccgtttttacccatgctggctatccatttgctattacaaaacttgatgtatgacatttctcagctctctttgccgtgggataagatggacaaagagtttttacgtaaaccgcgtaagtgggatgccaagaatattggccgctttatgttatgggttgggccaacatcatcaatttttgatattacaacctatgcgttgatgtggtttgttttcgccgcgaacagtgttgaacatcaggcactgttccagtcagggtggtttattgaagggttattgtcgcaaactctcgtcgtacatatgttgcgtacgcaaaaaattccgtttattcaaagtactgctgcattaccggtgttattgaccacaggtctaattatggccatcgggatctatattcctttctcaccattaggcacattagtggggttagagccgctgccatggcaatatttcccttggttagcgggtacactgatttgctactgtgttgttgcgcaactgatgaagcggttctatatccgccgtttcggcgaatggctttga

SEQ ID NO: 41613 - DNA, 1497 bp, Yersinia pestis
atgagtgagtatcatgaaaaaaataatgcactcttcaagtcgattaccgcgttagacggcgctttatttatcaatggtgagttccgcaaaggcgcgggggggcgtctgccagtggaaaacccggctaccggcaaagtgatcggtcatctcgcggcggctactccagaggagatcgaagaggcggttgctgcggcgcgtcgcgcttttcctgcctgggccgccgaacggccaaaggcccgagcgaatgcgttgcaccgtttgggtgatttgatcgccggcgatgccctgaatatggcgcggaacatgaccatcgaacagggcaagccggttaacgaagcgcaaggtgaaatactgaagctcgccgaaatttgtcatttttatggcgaagaagcgactcgcgtgcaaggtgacgttgtgccgaatgaccctccgggttttcaaagtcttgtcgtgcgagaaccggttggggtggtgggggcgattaccccttggaattacccggccgaactggtgggatggaagctgtgcgccagccttgccgcaggctgtaccctcattatcaaacctgctgaactgacaccctacacggcgctggccatcgctgaaaaatgccttgaagcgggtattcctgccggtgtcgtcaatgtgttgacggggaagggggaacaggttgggcaggcgctggttgaacatccacaggtcgataaaatagcctttactggttccagcgcggtcggtttgcatatccagcaaagttgcccgcaggttaagcggttgtcgctcgaactcggcggcaatggtccgatggtggtgaccgcctgcgcagatgtggctgccgcagttaagggcgcggtgcgtcgtagcttccgcaactgtgggcaggtctgcattgcgatcaatcgtatttatgtccaccgctcatgctatcgggcgtttgtgagcaaaatgggggtggccaccaatgggttgcgccttggcaatgggttggacgatccagcggcggacttgggtgcgatggcctctgtagagccactgaacaaaacgcgtgcgcaccttgaggatgctctggcaaagggggcgcgcttggttgcgggggggaaagcaccagagggggtggaatatgccaagggccatttcttccgtccgactgtgctggccgactgcacacaccaaatgcgcgtcatgaccgaagagacgtttggcccgctggtcggcttagcccctttcgatgatatcgatgaagtgattagtcgagcgaatgatactccctatgggctggcagcttacgtttatgcacgagatctggcggctatccaccggctgtcagcggcgttggactacggcaatgtggcaatcaataacgtcgatgccagcatgatgaatgcgccctatggggggcgtaagcaaagtggtgtgggctacgagcatggccgtgaggggttgctggagtatttcaatttcaagcacatccgcttgtaccacggtatcggggactaa

SEQ ID NO: 41614 - DNA, 1554 bp, Yersinia pestis
atgcaggcgcttttgggcattgatatcggcacctcggggtgtaaggcgttgctgatcggtatcgatggtgcggtgatcgccgccgataccgcgagttatccattatctcaaccccaactcggttgggctgaacaagatcctgagctgtgggtcgagggggcgcgtcgagccgtggcaggagcattggctaaagcgccaacgctggagttgctctgcgtggggctatccgggcaaatgcatgggctggtatcacttgatgctgggcatcaggtgttgcgcccggcgatcctctggaacgaccaacgcaatagtgctgaatgcgagcagattaccgaggcagcgggggggctaaaaggattgttggcggcgactaacaaccgaatgttggtgggctacaccggtggtaagattgtgtggatgcagcagcatgagcctgatctcttcgctcgcatgaccaccgtactgaaccccaaagactacttgcggctgcgtttgacgggggaggtcgccactgaagtttcggatgcctcggggaccgggcttttcgatgtacgtgcacgccagtgggcgagcgatcttattgagaacgtggggattgaccgcgctttactgccccccgtatttgaatcgcaggtgatctctggccaggtctcagcggtgggggccgagctattcggtattcccaaaggcacgcccgttgctggtggtggcggtgatgctgtgatacagaccttcggttctggggtgatcgctccgggtgagttacaaaccaccatcggcacggcgggcatccttgcagcggcattggatacaccacaggcgaaccccgacgggcggttacaggttttttgtcatgttgtggctgataaatggcactgcatgggggtctcgctgaacgctggcggcgcgatgagttggtttcgtgacacgttttatgtgggtgttaatgcggcggttccttcttttgatcagttcacaccttctgatcagatcacaccttcttttgagcagatcgttgctgaggcggcagccagcccggcaggggcgcgcggtctgctgttcttaccttatctgaatggtgaacgttgccctcatcctgatcctgcggcgcgcggtgccttcattggtctgacagcctgccacaatcgtggcgatgtggcacgtgcagtcatggagggggtggtccacgcccttgtggatatgcacaccttgatgaagccattgggcatcaatgggcgggttgtaaaaacatccggtggcggtgcacgttcgcccctttggcggcagatgcaggcagatattttcggctgtgatgtccttaccacaaaaggggctgctgaaggcgccgcattcggtgccgcgctggtggcgggattggctatcggggtttggcccgatgcgacgagcgcgacggcgaactgccgtatcatcacgcgcgaaccccccaatcccgcaaccgcggcggttgttgctgaggcccaacgcatttaccgtactctttacccggcgctgagagaaaccttcgcagaacttggcgaccccacctttatgtag

SEQ ID NO: 41615 - DNA, 3696 bp, Yersinia pestis
gtggtggatacagtaatcgataataaggtcaaggaattgcaccagcagttggcgcaacgcattttggtactggatggtggtatgggcaccatgatccagagctaccgattagaagaagcagattaccgaggcgcgcgttttgctgactgggcaagtgacctaaaaggtaacaatgacctcttggtgctctccaagccagaagtcatcacggcgatccataatgcctaccttgaagccggtgctgacattctcgaaaccaatacctttaactctacctccattgcgatggcggactatcagatggcgtcactgtcggctgaaattaactatgaagccgcccgtctggcccgtatctgtgccgatgaatggagcgcccgcacgccagaaaaaccacgttatgttgccggggtgctggggccaaccaaccgtactgcctccatctcccctaaagttaatgacccggcgttccgtaacgtcagttttgatcagttggtcgaggcctatcgtgagtctacccgcgcgctgattgaagggggtgttgatttaattatgatcgaaacggtcttcgatacgttgaatgcgaaggccgcgacctttgcggttgaaagcgaattcgaagtgatgggcgtgctgttgccggtgatgatttccggcaccattaccgatgcctccggccgtacgctgtctggtcaaacgacggaagctttttataactcgctgcgccatgtcaaaccgctgtcgtttggtctgaactgtgcgctggggccggatgaactgcgccaatatgttgctgagttatcgcgtatctctgaatattatgtcagtgcgcacccgaatgccggtttgccgaatgcttttggtgaatatgatctggaagccaaagagatggctgagcagattggcgagtgggcacgtgccggatttttgaatattgtcggcggttgctgcggtaccacaccccggcatattgcggcgatggtcaacgctgtcgctggggtgcctccgcgcccgttgcctgatattccggttgcctgccgtttggccgggctggagccactgactatcgatgccaataccctgtttgtgaacgtcggtgagcggaccaacgtcacgggttcggcacgctttaaacggctgataaaagaagagaagtacggagaggcgctggatgttgcccgccaacaggtcgaaagcggcgcgcagatcatcgatatcaacatggacgaaggcatgttggatgccgaagcggccatggtgcgtttccttaatctgattgccggggagcctgatattgccagggtgccgattatgatcgactcctcaaggtgggatgtgattgaaaaaggcctgaaatgtattcaaggcaaaggcatcgtgaactccatttcgatgaaagagggcgttgatgcctttattcatcacgccaaactggtacgccgttatggtgccgccatggtggtcatggcctttgatgaaaccgggcaagccgatacccgcgcacgcaaaatcgagatttgccgccgtgcgtataaaatattgacggaaaccgtcggtttcccaccagaagatattatcttcgatccgaatatttttgccgtagcgacggggattgaagagcataacaattatgccgtcgattttattgaagcctgtgccgatatcaaagccgagttgcctcacgcgctgatttctggcggtgtctccaacgtttccttctctttccgagggaatgatccagtacgtgaagccattcatgcagtgttcctctattacgctattcgcaatggcatggatatggggattgttaacgccggtcaattggcgatttatgacgacctgtctgatgaattacgtgatgcggtcgaggatgtgatcctcaaccgccgtgatgacagtactgagcgcctgctggatttagcagaaaaataccgtgacagtaaaagtggcgaggtcgcgatccagcaagcagaatggcgtggttggccggtggtgaaacggttagagtattcgctggtaaaaggcattactgaatttattgagctggataccgaagaagcgcgccagcaggcagatcggccaattgaagtgattgaagggccgttaatgtctgggatgaatgtggttggtgacttgtttggtgaaggaaaaatgttcctgccacaggttgtaaaatcagccagggtaatgaaacaggcggtggcctatctcgaaccttatattgaagccagtaagcagaagggtaccaccgccggtaaaatcttattagcaaccgtcaaaggcgatgtgcatgacatcggcaagaacatcgtgggtgtggttttgcagtgtaataactatgaaatcatcgatctgggcgtgatggtgccgacggaaaaaattctgcgcactgcacgggaagagaaggtggatattatcggcctgtctggtctgattaccccgtcgctggacgagatggttaacgtggcgaaagagatggagcgccaaggctttacgctgccgttgctcattggtggcgcaacgacatccaaagctcacaccgcggtcaagattgaacaaaattatagcggttccaccacgtatgtctctaacgcctcgcgcagtgtgggcgtggtatccgcgttgctatcggatacgcaacgggaggcatttgtggcaaaaacccgcaaagaatatgagactgtacgtatccaacacgcccgtaaaaaaccgcgcaccccgccggtcagtttgcaggctgcacggaataacccaacggtgattgattgggagaactacactccgccagtggcccataaattgggggtacaggtggtggaggccagtattgaaactctgcgcaactatatcgactggacgccattctttatgacctggtcgttggcaggcaagtatccgcgcattttagaagatgaggtggtgggggaggaggccaagcgcctgctcgccgacgccaatgctttgttggataaattgtccgccgaggatctgctgcatccaaaaggcgtggttggtctgttcccggctaacagcgtcggcgatgatatcgaaatttaccgtgatgagcggcgagatgaggtactggccatcagctatcatttacgccaacagaccgaaaaaaccgacttcccgaactactgtttagctgactatgtcgcgcctaaatccagtggtaaagccgattattttggtgcgtttgcggtgaccggtggcttggaagaagacgcattggccgatgcttatgatgcgcaacatgatgactacaataaaatcatgattaaggcattatcagaccgtctggccgaagcctttgccgagtatctgcatgagcgagtacgtaaagtgtattggggttttgcaccgaacgaaaatctgagcaacgaagagttggtgcgcgaaaattatcaggggatccgcccggcaccgggctatcccgcttgcccggagcacaccgagaaaggccaaatttggcagttgttggatgtcgaaacccacaccggtatgaaactgaccgaatcctacgccatgtggcctggggcttcggtatcgggttggtatttcagccacccagacagcaaatattttgccgtagcacaaattcagcgtgatcaggttgaggattatgccgcccgtaaagggatgcccactgccgaagttgaacgctggctagcccctaatctgggttacgatgcggattga

SEQ ID NO: 41616 - DNA, 498 bp, Yersinia pestis
atggcaggactagcaaccgtcacgaaactggctggcgaaacggtaggacaagaattcctgatttttacgctgggcgatgaagagtacggcatcgatattctgaaagtacaagagatccgaggctatgatcaggtgactcgtattgctaacactcctgcgtttattaaaggtgtgaccaacttacgcggcgtcattgtgcctatcattgatctgcgggttaaattcgcccagcaaggtgtcacttataacgaaaataccgtggtgattgtgctgaattttggtcaacgcgtggtgggtattgtcgttgatggtgtgtcagatgtcctgtcgttgaccaacgagcagatccgtccggcacctgaatttgctgtgactctcgcaacagaatatctgaccggtttaggctcgcttggcgaaagaatgttgatcctggttgatatcgaaaaactgctgagcagtgaagagatgtcgttgattgatagtgtttctaaggcgtga

SEQ ID NO: 41617 - DNA, 1236 bp, Yersinia pestis
gtgaataaatggacaaagctttgcttcctcattttgggtggagggacgattttcaaactctccagtatgaaagatgtgttttacatccctatgcaacaagactgggggctaacgaatacacagattggttttggttttaccgtatatgccatcattcagaccgttggcttattcagttctctttatattgctgatcgtttttcgaaaaagatcttactgcccgtagggttgatcggtgtgggcctctgtggcgcatacttagccacgcttccaccgtttaccggttatctcatcgcctttggtgctatggcattttttggggaagtggtttactggcctgtactgttgaaagcagtaaggttgctgggaaccaaagaagaacaaggacgcatgtttggttttctggaagcgggtcgcggtgtgattgatgtacttatcgcttctggtgccctgtttgtttttgttcagtttggtgaaggtaaagcggggatgcaggccgggctaatctattacacgatagccacgatattggttggcgtcattacttggtttatcgtagacagtgatgacaagattaaggtagataatgcagataaagttaataaacatgttttggcggggatcaaagatgttattaaaagccctaacttgtggttggcttctttctgtatcttctttgtctattccgcctattgcggcttaacctatttcataccattcctcaaagatatttatggattgccagtcgctcttattggcgcttacgggatcattaatcagtacggtctcaaaatggtaggaggacctgttgggggattcctcgctgacaaagtcgcaaaatcaccgacagtttacctgaaatggacatttttaatttcggccatagcgatgatcttattcatccaattaccccatgattcgatgaacgtatacttgggtatgatggcaacactcggcttcggagccattatcttctctcagcgcgcaatcttcttcgccccgatggatgaaattggtacttctcgtgaacatgcaggttcggcaatggccttcgggtgtattatcggctatatgccgtccatgtttgcctacgcactttatggctcattattagataattttgaggggattcaggggtacaactacatattttcactcatggtagcgtttagtcttcttggttttatttgtgccactattttaacaaaaagaatgcgtgcagtagctgtagcctaa

SEQ ID NO: 41618 - DNA, 1308 bp, Yersinia pestis
atgacgatctctcgtactcaacaaattcagcagttggaacaggaatggacatcgccgcgctggaaaaatatcactcggccttatagcgccgaagatgtcatcaagctgcgtggttcggtcaatccagaatgtacgttcgcacaaaatggtgccaaaaaactgtgggaattgctgcacggcgggtcgcgtaaagggtatatcaactgtctgggggcattaaccggtggtcaggcgctacaacaggcgaaagccggtgttgaagccatttatatgtcgggatggcaggtggcggctgatgctaatacggcatctagcatgtatccagatcagtcactgtatccggtcgactctgtgcctgcggtggtgaaacgtatcaacaatagcttccgccgcgctgatcaaattcagtggtcgaataatattgagccaggtagtaaaggctataccgactatttcctaccgatcgtcgcggatgcggaagcgggttttggcggtgtgctgaacgcgtttgaattaatgaaagcgatgattgaagcgggggcggcaggggttcattttgaagaccaattggccgcagtgaaaaagtgtgggcatatgggcggtaaggtactggtgccgacacaagaggccattcaaaagctggttgctgcccgtttagccgcagatgtcttgggtgtaccaacgctgttgattgccaggactgatgcggatgcggctgatttattgacctcagattgcgacccctatgaccgggagtttattaccggcgaccgtactgctgaaggttttttccgcacccgtgccggtattgaacaagcgatcagccgtggcctggcgtatgccccttatgctgatttggtgtggtgtgaaacctcgacacctgatctggctctggccaaacgttttgccgatgctgttcatgctcaattccccggaaaattactggcttataactgttcaccctcctttaactggaagaagaatctgaccgaccagcaaattgccagcttccaagatgaactctccgccatgggctacaaataccagtttattacgctggcgggtattcatagcatgtggttcaacatgttcgatctggcccatgcgtatgcgcagggtgaaggcatgaaacactacgttgagaaagtccagcaacctgagtttgcctctgtggaccgcggctacacctttgcttcccatcagcaagaagtggggactggctacttcgataaagtcaccaatattattcaggggggcgcatcatctgtaacggcactgaccggttcgacggaagagcagcagttttag

SEQ ID NO: 41619 - DNA, 702 bp, Yersinia pestis
gtgattaattttgtgaagttaatgtgtaatgtgaagttaatgtgtaaatggggggcgatattgatgtcacccttctttctttctgcttgcgtaactaaccagctttcagatgatatccggggccatgagaaaggctacacgcattataatgatgatattattgtcggcgtgtctttggctaagcagggtgataataaaaactgggcatttgtcggtacgcatttcgattatgtgttgtcatcgggagccgacgagttcttaacgctattagttaccgggcagattgataaaaagaagattgaggtagtcagggacggtagctttaatcttaataagaaaaaggatggcttcacagggaaaatcgctctgaaatatcgttatcagacggcggaagagcgaggcaaaatagagccgctgataaaaggggctgattggaattgtccaagcctcacggaaacaacgggtatttgcaatattaacctgaataatctggtcggcactattcacagaaaaggtgctacaccggccgatatcttccgttttgaacatcctttgcaagtgaagttttatagtaaaaatacgacctcagctaagagggcgctttacccggtggccgtagcggcagatgtcgtgatgttgcccgtgtatctattgagtgctgctgccgtggccgctttctatggtgtggtctcattgaattag

SEQ ID NO: 41620 - DNA, 1845 bp, Yersinia pestis
atgaacctattatatttaacaattctgctgccactgctgggcttcttgctgttggcattctcccgtgggcgctggtctgaaaataccgcggctaccgttggggtggggtctatcgggctgactgcgctggtgacgttgtatgtggcggtggatttcctcagccaaaaagccactggcgtacaggtgtttaatcagacgctgtggaactggatgtctgttggcacctttaacattccgctgaccctgacattggacggtttgtcgctgaccatgttgtcggtggtgaccggtgtcggcttcctgatccacatgtatgcctcgtggtatatgcgtggggaagagggctactctcgcttcttcgcctataccaacctgtttatcgcgagcatggtggttctggttctggcggataacctgttgctgatgtatctcggctgggaaggcgtggggctgtgcagttatctgctgatcggtttctactacaagcattctgccaacggtgcggcggcgatgaaagcctttatcgtgacccgtgtgggtgacgtattcctggcttttgcgctgttcattctttaccaagagttgggcacgctgaacatccgcgaactgatgattttggcaccgcagaaactggagatgggctcgaccgccattacctgggcgacgctaatgctcttggggggggcggtcggtaaatcagctcagttgccgctacaaacctggttggctgatgcgatggccggcccgacgccggtttccgcgctgatccatgcggcgaccatggtgaccgccggtgtctatctgattgcccgtactcatggcctgttcctgatggcccctgaagtactgcatttagtcggggttatcggtgcggtcacactggtgttggcgggctttgccgcactggtgcaaaccgacatcaagcgggtgttggcgtactccaccatgagccagattggctacatgtttctggcgctgggcgtacaggcgtgggatgcggcaatcttccatttgatgacccatgccttctttaaagcgttactgttcctttcctcaggctcagttattctggcctgccaccacgagcaaaatatcttcaaaatgggcggtctgcgtaagaccattccattggtctatatctgcttcctggtgggtggtgcagcattggcagccttgccaatcgtcactgccggcttctatagcaaagacgaaattctgtggggcgcattggccagtggccatatcaatctgatggtagcagggttggtcggggcattcctcaccgcgctgtatactttccggatgattttcattgtgttccatggtgagccaaaaactaaagcacatccggttaaagggatcacccatagcctgccgttaatcgtgttactggtgctgtcgacctttgtcggtgcgttgataacaccaccactggcgggtgtgttgcccgagcttcactttggtgacgagggcaaaatgccgttggaaattttctccggtgtcttggtggtgatcggtattgcactggccgcgttcttgtatctgggcaaacgccaattggttaacagcattgcgcaaagtgcgccgggccgcttctttacggtctggtggttccatgcgtggggcttcgactggttgtaccataacctgtttgtccgcccgtatctgtggattgcaaaactgttgcaacgtgatccgctgaattcactgatgaatacaccggcggtgctttcgcgctggagtaatcgcggtctgaccgtcagtgagaatgggcaggtgcgttggtacgccgcctctataggtttgggtgcagtgattgtgctggctctgttgcttttcgtgtag

SEQ ID NO: 41621 - DNA, 390 bp, Yersinia pestis
atggcggataagaatctcagatttttggtggtagacgatttttcgaccatgcgtcgtattgtcagaaacctgctaaaagagctgggttttcacaatgtggaagaagccgaagatggtgttgacgcattgaataaattacgagcaggtggtttcgattttgtggtttcagactggaatatgccgaatatggatggcctggacttgctgaaaacaatccgtacagacggtgctttggctacgttgcctgttctgatggtgaccgcagaagccaaaaaagagaacatcatcgcagcagcgcaagccggggccagtggttatgtagtgaaaccgttcactgccgcgaccttggaagagaagctcaataagatttttgaaaagttgggtatgtaa

SEQ ID NO: 41622 - DNA, 645 bp, Yersinia pestis
atgaataaccatccaatgcccgcaaccgatgcggcatcagccagtgatattattagccgtattggcagtctcacgcggatgttacgtgacagtttgcgagagttaggtcttgatcaagccattgctcaggccgccgaagcgatcccggatgcccgtgaccgtctggattatgtggttcatatgacagcacaggccgcagaaagggcgcttaactgtgtcgaggcggcacaaccgcgtcagaacgaactggaatcatcagcaaaggcgctaaaaattcgctgggatgagtggtttgccaatccaatcgagctgtcagatgcccgttcactggtcacggatacgcgagaatatttagcggttgtcccacagcacacttcatttaccaatgcgcaattattggaaatcatgatggcgcaggatttccaggacctgaccggtcaggttatcaaacgcatgatggatgtggtacaggaaattgagaaacagctcctcatggttttgatggagaatattcccgatatcccgtcaaaaccgcagaaaccgacggacagtttacttaatggcccgcagatggataaaaatgttgccggtgttatcgccagtcaagatcaggttgatgatttgctggatagtttaggtttttaa

SEQ ID NO: 41623 - DNA, 1386 bp, Yersinia pestis
atgaccatcaattcaggaacgaccaaggaaattatccggacgccagaaatgcacccgctgacctggcgtttgcgcgatgacaaacagcccgtgtggctggatgagtatcgcagcaaaaacggctatgccggggcagaaaaagcgttaaaaggcatggcgcccactgatgttgttaacgttgtcaaagacgctggcctgaaagggcgtggcggcgcaggtttctccactggtttgaagtggagcctgatgcccaaagacgacagtatgaacatccgctatctgctgtgtaacgctgatgagatggagccaggcacctataaagaccgtctgctgatggagcaattgcctcatctgctggtggaggggatgctgatcagtgccttcgcgctgaaagcctaccgtggctatatcttcctgcgtggcgaatatattgaagcggcagtgcatttacgtcgggcgattgctgaggccaccgaagccggcttgctgggcaaaaacatcatgggcagtggttttgatttcgaactgattgtccataccggtgcgggtcgttatatctgtggtgaagaaacggcgctgattaactcactggaaggccgccgtgctaacccgcgttctaagccgccgttcccggcctcttccggtgtctggggcaaaccgacttgcgtgaataacgttgaaaccctgtgtaacgtaccggccattattgaacatggcgttgagtggtatcaggggatcactgccggtaagagtaacgatgccggaaccaaactgatgggcttctcgggtcgggtgaaaaatccgggtctgtgggaattgccgtttgggatcaccgcccgtgagattctggaagattacgctggcggtatgcgcgatggcttgaaatttaaagcctggcagccgggcggggcgggtaccgatttcctgactgctgaccatctggatttgccgatggattttgagaatattgctaaagcaggtagccggttaggcaccgcgttggcgatggcggtagatcacgaaatcggcatggtgtctttggtgcgcaatctggaagagttcttctcccgtgagtcttgtggctggtgtacaccgtgtcgcgatggtttgccatggagtgtgaagatcttacgtgcattagagcgtggtgaaggccagccgggtgatatcgaaacgctagagcaactgtgccgcttcttagggccgggtaaaaccttctgtgctcatgcgccaggtgcggttgaacccctacaaagtgcgattaaatatttccgggacgaattcgaagccgggatcgccgttaaggcctatgaatctggaatgacgagcggcaacacccgagccatagccggtattcaacctaatctattaaaagcgcgctggtag

SEQ ID NO: 41624 - DNA, 519 bp, Yersinia pestis
gtggtgaatctggcagtcaatgcggctgaaccagcggccatgccagacgccttcgaattgagtgccgaagaacgtgatgctatcgagcatgagaaacaccattacgaagatgcccgtgctgcgtcgattgaagcactgaaaattgtgcagaagcaacgtggctgggtgccggatggtgcgatccacgcgattgctgatgtgctgggtatcccggccagtgatgttgagggggtcgccaccttctacagccaaatcttccgccaaccggtagggcgtcatgtgatccgctactgtgacagcgtggtgtgtcatatcaccggctatcaggggattcaggcggcactggagaaaaaactcagtatcaagccaggccaaacgaccttcgatggccgtttcaccctgctgccaacctgttgtctgggtaactgcgaccgtgggccgacgatgatgatcgatgacgacacccacagctacctgaagcctgaagagatcgagaagttactggagcaatatccatga

SEQ ID NO: 41625 - DNA, 648 bp, Yersinia pestis
gtggctacaccaggtttcccctccacggaacagcgtcttgggctctacccagtggtggactcattattatggatagaacgcctgctggcagccggagtcacgacgctacaactgcgcattaaaaatgcagacgatgctcaggtggagcaagatattgtcgcggccattgaattaggaaaacgctatcaggcgcgcttatttatcaatgattactggcagttggcggttaaacacggcgcttatggcgttcatctcggtcaggaagatctggaagccgctgatttagcggcaattcagcaagcggggttgcggctcggcatttctacccatgatgaacatgagttggcggtggcaaaaacactgcgcccctcttatatcgcactggggcatatttttcccactcagaccaaacagatgccgtcatccccacaggggttggcgtcgttaagccgtcaggtgaagaatacgccggattacccaactgtggctatcggtggcatcagtattgagcgggtgccacacgtattagcaaccggcgtcggcagtgtcgccgtggtcagcgccattacgttggcaagtgactggcaacgggcaaccgcacaattactgcacctgatcgagggtaaggagttggctgatgaaaaatga

SEQ ID NO: 41626 - DNA, 798 bp, Yersinia pestis
atgaaaaatgaccagacgctaagtgacagtgaatttttacgctatagccgccaactgctactggaagatatcggcccggaagggcaacgaaagctaaagggtgccagtgtgctgattgttggcctcggtgggctgggctcccccgcagcgctctatctggccgccgccggtgtcggtcagttactgctggcagacgatgaccagttggatctcactaatttgcagcgccagattctgtatcgtacagcagatatcggccaaacgttatcgaaccccacctcatcggttagccacaacaaggcccggttagcgcaacgccatttgcagcaactcaatccacagatccgcattgtcgcactggatacacggctgacaggacaagtattgaccgatgctgtcgctaatgcagatttagtactggattgcagtgacaatatggagacacgccatcaggtgaatgccgcctgtgtcacggcacaaaaaccactaatcagcggcagtgctgtggggttcagtggacaactgttggtgattgaaccgccctatgcccaaggctgctacgcctgtatttatccagataaagagttgcctcaacgtaactgccgtaccgcgggtgttctggggccggtggtcggtgtcatcggtaccttgcaggcgctggaagccattaaaatgctcgcgggaataccattagcactgagcggtaaattgcggctatttgatggcaaacagcagagttggagcaccctgcaactgacaagggcagcccattgcccggcgtgtggaggtgggttgtga

SEQ ID NO: 41627 - DNA, 1002 bp, Yersinia pestis
atgaccagccattggaggtggagtgcaatctcaccgccgagatgctgcttaatcaacttaaacaccaccagccgggaaccgcactggctattaatcaggtcattattccgcgcgccgattggcaaaatcatcggttgcaagcgggtgatcatattttgctgttccaagccattgccggaggatgacatgctgaaaattgccgataccacttttacttctcgtttatttacgggcacagggaagttctcctctcccgaactgatgctggaagcactccgcgcctcgggttcacaacttattaccatggccatgaagcgcgttgacttacagtcaggaaacgacgcgatcctcgcacccttgcggcagttgggcgtgcgcttactgcctaatacgtccggtgccaaaaccgctgaggaagctatttttgccgcacgtctggcccgcgaagccttgaatacccattgggtaaaactggaagttcatccagatgtgagatatttgctgcctgacccgatagaaacgctcaaggccgccgaagtgctggtgaaagaggggtttgttgttttaccttactgtggtgctgaccccgtcttgtgtaaacgactggaagaagtgggttgtgctgcggtgatgccattaggctcaccgataggatctaatttggggttacgtactcgcgacttcctgcaaattattatcgaacaatcgaaagtcccggtcgtcgttgatgcgggcattggtgcaccgagccatgcccttgaagcgctggaactgggtgccgatgccgtactggtgaataccgcaattgccgtagctcactccccggtgcagatggcccatgctttccggctggcggttgaatctggcgaacgggcacgcttggctgggcttggcgcttcaccgttcaatccttcacaacctgatacattacaactacgggccaccgccaccagcccgctaacgggtttcctcagccaacttgaggagcaagaccatgtctga

SEQ ID NO: 41628 - DNA, 4221 bp, Yersinia pestis
gtgaaagacttattaaagtttctgaaagcgcaaactaagaccgaagagtttgatgcgatcaaaattgctctggcatcgccagacatgatccgttcatggtcattcggtgaagttaaaaagccggaaaccattaactaccgtacgttcaaaccagaacgtgacggccttttctgcgcccgtatctttggcccagtaaaagattacgaatgcctgtgcggtaagtacaagcgtttaaaacaccgtggtgttatttgtgagaaatgcggcgttgaagtgactcaaactaaagtgcgccgtgagcgtatgggtcacatcgaactggcttctccaactgcgcacatctggttcctgaaatcgctgccatctcgtatcggtttgctgctggatatgccattacgtgacatcgaacgtgtactgtacttcgaatcctatgtggttattgaaggcggtatgaccaacctggaacgtcgccagattctgactgaagagcagtatctggatgcgttggaagagtttggtgatgagttcgacgcgaaaatgggcgccgaggctattcaggccctgttgaaaaacatggatctggaagctgagtgcgagatcctgcgtgaagaattgaacgaaacaaattctgaaaccaagcgtaagaaactgaccaagcgtatcaagttgctggaagcgttcgtacagtctggcaacaagccagagtggatgatcctgaccgtgctgcctgtgttgccgccagatctgcgtccattggttccgttggatggtggtcgctttgcgacttccgatctgaacgatttgtatcgtcgcgtgatcaaccgtaacaaccgtctgaaacgcctgctggacttggcggcaccggacatcatcgtacgtaacgaaaagcgtatgctgcaagaagcagtagatgcattgctggataacggccgtcgcggtcgtgcgattaccggctctaacaagcgtccgttgaagtcactggctgacatgatcaaaggtaagcaaggtcgtttccgtcagaacttgctgggtaaacgtgttgactactcaggtcgttcggttatcaccgttggtccatacctgcgtctgcatcagtgcggtctgcctaagaaaatggctcttgagctgtttaaaccgttcatctacggcaagctggaattgcgtggtcttgctaccaccatcaaagccgccaagaagatggttgagcgtgaagaagcggttgtttgggatatcctggatgaagttatccgcgaacacccagtgctgctgaaccgtgcaccaacccttcaccgtttgggtatccaggcgtttgaaccggttctgatcgaaggtaaggcaatccagttgcacccattggtttgtgcggcatataacgccgacttcgatggtgaccaaatggctgtccacgtaccgctgacactggaagctcagttagaagcgcgtgcgttaatgatgtctaccaacaacatcctgtcacccgcgaacggcgagccaatcatcgttccttctcaggacgttgtattgggtctgtactacatgacccgcgactgtgttaacgccaaaggcgaaggcatggttctgactggcccgaaagaagctgagcgtatttatcgcgctggcttggcatctctgcatgcccgcgtaaaagtacgtattaccgaagaaattcgtaataccgaaggcgaaagcattacgcgtaccagcattatcgatacgactgtaggccgtgctattttgtggatgatcgtcccgcaaggcctgccttactctatcgttaaccagccgctgggtaaaaaagctatctctaagatgctgaacacgtgttaccgcatcttgggcttgaagccaacggttatctttgctgaccagatcatgtacaccggttttgcttacgcagcacgctcaggcgcctctgtaggtatcgatgacatggttatcccagaagcgaaagcggggatcatcgaagaagctgaaactgaagttgctgagatccaagaacagttccaatctggtctggtcacggcaggcgaacgttataacaaagtgatcgatatctgggctgcggctaacgaacgtgttgctaaagcgatgatggataacttgtcggttgaggatgttgtcaaccgtgatggcgttgttgaacagcaagtttcattcaacagcatcttcatgatggccgactccggtgcgcgtggttctgccgcacagattcgtcagctggcaggtatgcgtggtctgatggctaagccagacggctcgatcattgaaacgccaatcaccgcgaacttccgtgaaggtttgaacgtacttcagtacttcatctcaacccacggtgcgcgtaaaggtttggcggataccgcattgaaaactgcgaactccggttacctgacccgtcgtttagttgacgtggcacaggatctggtggtgactgaggatgattgtggtacccataacggtatcgtgatgaccccggttatcgaaggtggtgatgttaaagagccactgcgtgatcgcgtactgggtcgtgtgactgcagaagaagttatcaagccaggttcggctgatattctggttccgcgtaacaccctgctggacgaaaaatggtgtgatctgttagaagaaaactccgtcgacagcgttaaagttcgctccgtagtaagctgtgaaactgatttcggtgtgtgtgctaactgctatggtcgcgacctggcacgtggccacatcatcaacaaaggtgaagcggttggtgttattgcagcacagtccatcggtgagccgggtactcagcttacgatgcgtacgttccacatcggtggtgcggcatctcgtgcggcagcagaatccagcatccaggttaagaacaaaggcagcttgaaactgagcaacgtcaagttcgtgaccaatgcggctggcaagctggttattacgtctcgtaataccgagctgaagctgatcgacgaattcggtcgtaccaaagaaagctataaagtgccttacggtgcggtaatggctaaaggcgatggcgcagaagttcagggcggcgaaaccgttgctaactgggatccgcacatcatgccagtggtcaccgaagtgagcggcttcattcgcttcgccgacatggttgatggccagaccattactcgccagaccgacgaactgactggtttgtcttctctggtcgttctggacagtgcagagcgtacgggtagcggtaaagacctgcgtccagcactgaaaatcgttgatgccaaaggcaatgacgtattgatcccaggtactgatatgcctgctcaatacttcctgccaggtaaagcgattgtacagctggaagacggtattcagatcggtgcgggtgataccttggcgcgtattcctcaggaatcaagcggtaccaaggatattaccggtggtctgccacgtgttgctgacttgttcgaagcacgtcgtccgaaagagcctgcaatcctggctgaaatcagcgggatcatctcgttcggtaaagagaccaaaggcaagcgtcgtctggtgatctcaccgttggatggtagcgatgcatacgaagagatgattccgaaatggcgtcagcttaacgtgttcgaaggtgaagttgtggaacgcggtgacgtggtttccgatggcccagaatctccacatgacattctgcgtctgcgtggcgttcacgcggttacccgctacatcaccaacgaagtgcaggaagtttaccgtctgcaaggcgttaagattaacgataaacacattgaagttatcgttcgtcagatgctgcgtaaaggcactatcgttgatgcaggtagcaccgacttcctggaaggcgagcaggcagaaatgtcccgcgttaaaatcgctaaccgtaagctggcagcagaaggcaaaattgaggctacgttcactcgtgacctgctgggtatcaccaaggcatccttggcgaccgagtccttcatctctgcggcttcgttccaggaaaccacgcgcgttcttactgaagcggcagttgccggtaaacgtgatgaattgcgtggcctgaaagaaaacgtaatcgtgggccgtctgatcccagccggtaccggttatgcttatcatcaggaccgtatgcgccgtaaagcacagggtgaagcgcctgttgttccacaagtcagcgcggatgaagcgactgcaaacttggccgaattgcttaatgccggttttggtaacaacaaaggctaa

SEQ ID NO: 41629 - DNA, 456 bp, Yersinia pestis
atgacaattaaaccctctgattcggtaagctggtttcaggtactccagcgcggtcagcattatatgaagacctggccagcggacaagcgcttggctccggtgttccccgagaatcgtgtcacggtagtgacccgttttggtatccgttttatgcccccattggccatttttaccctgacctggcagatagcgctgggggggcaacttgggccagcgatcgccacggcgctctttgcctgcggtttaccgctgcaaggattatggtggttaggtaaacgggcgatcacgccgttaccccctacgttattgcagtggtttcatgaagtgcgtcataaactgttcgaagcagggcaagcggtcgcccccatcgaaccgatcccaacttatcagtctttggctgatctgctaaaacgtgcctttaaacagttagacaaaacgtttctcgatgatttgtaa

SEQ ID NO: 41630 - DNA, 4029 bp, Yersinia pestis
atggtttactcctataccgagaaaaaacgtattcgtaaggattttggtaaacgtccacaagttttggacataccttatctcctttctatccaacttgactcgttccagaaatttatcgagcaagatcccgaagggcagcacggactagaagcagcattccgttctgtttttcctatccagagctacagcggcaattcggagctgcaatacgttagctaccgtcttggtgagccagtattcgacgtcaaagagtgccagatccgtggtgtgacttattcagcaccgctgcgcgttaaactgcgtctggttatctatgagcgggaagctccggaaggtacggtcaaagacatcaaagaacaagaagtctacatgggtgaaattccactcatgaccgaaaatggtacctttgttattaacggtactgagagggttatcgtatctcagttgcaccgtagccctggtgtgttctttgacagcgataagggtaaaacccattcatcgggtaaagtgctgtacaacgcacgtatcatcccttaccgcggttcatggttagatttcgagtttgatccgaaagacaacctgtttgtacgtattgaccgtcgccgtaaattgcctgcaaccatcattctgcgtgcattgaatttcaccactgcacagatcttggatctgttctttgagaaagtggtctttgagattcgtgataacaagctgcagatggaattggttccagagcgcttgcgcggtgaaacggcatcctttgatattgaagcgaatggcaaagtttacgtcgagaaagcgcgtcgtattactgctcgtcatattcgccagcttgaaaaagacggcattgaccgcatcgaagtaccggttgaatacattgccggtaaagttgttgctaaagactatgttgatgcgagcaccggtgaactgatctgtgccgctaacatggagctgtcactggatctgctggctaagttgagccaagctggccacaagcaaattgaaacattgttcaccaacgatctggatcacggtgcttatatctccgagaccctgcgtgttgacccaaccagcgatcgtctgagcgctttggttgagatctatcgcatgatgcgtcctggcgagccaccaacacgtgaagccgctgaaaatctgtttgagaatctgttcttctccgaagaccgctatgatttatctgcggttggccggatgaagttcaaccgttctctgctgcgtgacgagatcgaaggttccggtatcctgagcaaagaagacatcacagaagtgatgaaaaagctcattgatatccgtaacggtagaggcgaagtggatgatatcgaccacttgggcaaccgtcgtattcgttccgttggcgagatggctgaaaaccagttccgtgtaggtctggttcgtgttgagcgtgcagttaaagagcgtttgtctctgggcgaccttgatactctgatgccacaggacatgatcaacgccaagcctatctcggctgcggtgaaagagttctttggttccagccagttatcccaatttatggaccaaaacaacccgttgtctgagattacgcataagcgccgtatctctgcattgggcccgggcggtttgacccgtgaacgtgctggctttgaagttcgagacgtacacccgactcactacggtcgcgtatgtccaattgaaacgccagaaggtccaaacatcggtttgatcaactccttgtctgtatatgcacagactaacgagtatggtttcctggaaacaccttatcgtcgtgtacgtgatggtgtggtgaccgatgaaattaactatctgtctgctattgaagaaggcaacttcgttatcgctcaggcgaactccaacctggatgatgaaggccgctttttagaagatttggtgacttgtcgtagcaaaggcgaatcaagcctgtttagccgcgagcaagttgactacatggacgtatctactcagcaaatcgtatccgttggtgcttctctgattccattcttggaacacgatgacgccaaccgtgccttgatgggcgcgaacatgcaacgtcaggcggttcctactctgcgtgctgataagccgttggtgggtactggtatggaacgtgcagtggcggttgactcaggggtaacctctgtagccaaacgtggcggtactgttcagtacgtagatgcatcccgtatcgttattaaagttaacgaagatgagatgcacccaggcgaagccggcattgatatttataacctgaccaaatacacccgttctaaccagaacacctgtatcaaccagatgccgtgtgtgaatctgggtgagccaatcgagcgcggtgacgtgctggcagatggcccatcgacagacctgggcgaactggcattgggtcagaacatgcgcgtagcgttcatgccttggaacggttacaacttcgaagactccatcttagtctccgagcgcgtggtgcaagaagatcgcttcacaaccatccacattcaggaattggcatgtgtgtcacgcgacaccaagttagggcctgaagagatcactgccgatatcccgaacgtgggtgaagccgcgctctccaaattggatgaatccggtatcgtgtatatcggtgctgaagtgactggtggtgacattctggttggtaaggtaacgcctaaaggtgaaacccaactgacgccagaagagaaactgttacgtgcgatcttcggtgagaaagcgtctgatgttaaagactcttctctgcgtgtaccaaacggtgtttctggtacggttatcgacgtccaggtctttactcgcgatggcgtagaaaaagacaaacgtgcgttggaaatcgaagagatgcaactgaaacaggctaagaaagacctgactgaagagttgcagatcctggaagcgggcttgtttgcacgtatccacgcggttctggtttctggtggcatcgaagctgagaagctgagcaagttaccacgtgaacgctggctggaactgggcctgaccgacgaagacaagcaaaaccaactggaacagttggcagagcagtacgacgaaatgaaatctgaattcgagaagaagatggatgccaagcgtcgtaaaatcacccaaggcgatgatctagcacctggtgtgctgaaaatcgtcaaggtgtatctggcggttaaacgtcagattcaaccgggtgataaaatggccggtcgtcacggtaacaaaggtgttatctctaagattaacccaatcgaagatatgccttacgatgaaaacggtacgccggtagacatcgttctgaacccgctgggcgtaccatcgcgtatgaacatcggtcagattttggaaacccacttagggatggcagcgaagggtatcggcgagaaaatcaacgccatgctcaagaagcaggaagaagttgccaaactgcgtgagttcatccagaaggcctacgatctgggcgacaacgtttgtcagaaagttgatctgagcacctttaccgatgacgaagtactgcgtctggcagagaacctgaaaaaaggtatgccaatcgcaacgccagtcttcgatggtgcgacagagaaagaaatcaaggaactgttacagctgggtggcctgccaacgtctggtcagattaccttgtttgacggccgtaccggtgagcaatttgaacgccaggttactgtcggctacatgtacatgctgaaactgaaccacttggttgatgacaagatgcatgcgcgttctaccggttcttatagcttggttactcagcagccgctgggtggtaaagctcagttcggtggtcagcgcttcggtgagatggaagtgtgggcgttggaggcttatggcgccgcgtacacattgcaagaaatgcttaccgtcaagtccgacgatgtaaacggccgtaccaagatgtacaaaaacatcgtggatggcgatcaccgtatggaaccaggaatgccggagtccttcaacgtattgttgaaagaaatccgctctctgggcatcaatatcgagctggaagaagagtaa

SEQ ID NO: 41631 - DNA, 498 bp, Yersinia pestis
atggcactaaatcttcaaggcaaacaagcgattgttgctgaagttaaagaagtagccaaaggtgcgctgtctgcggttgttgcggattcccgtggcgttaccgttgataaaatgactgaactgcgtagagcaggtcgtgaagctggcgttcatatgcaagttgttcgtaacaccttgctgcgtcgcattgttgaaggcactccattcgaatgcctgaaagacacgtttgttggtccaaccttgattgcattctctgctgaacatccgggcgcagctgctcgtctgttcaaagcatttgctaaagataatgcaaaatttgaggttaaagcagcagcctttgaaggcgagttaatccctgcggctcaaatcgaccgcttggcaactctgccaacctacgaagaagcaatcgcacgtctgatgggaaccatgaaagaagctgccgctggcaagctggttcgtactctggctgcgctgcgcgatcagaaagaagctgcttaa

SEQ ID NO: 41632 - DNA, 705 bp, Yersinia pestis
atggctaagctgaccaagcgcatgcgcgtgatccgtgacaaagttgatgttactaagcaatacgatatcaacgaagctgttgctctgctgaaagagctggctactgctaaattcgtagaaagcgtggacgttgccgttaacctcggtatcgatgcacgtaaatctgaccaaaacgttcgtggcgcgactgtgttgccacatggtactggccgttcagtacgcgttgctgttttcgctcagggtgcaaatgctgaagcggcgaaagaagcaggcgctgaattggtaggtatggacgatctggctgatcagatcaagaaaggcgaaatgaacttcgacgtcgttattgcttctccagatgcaatgcgcgttgttggtcaattgggccaaatcttgggtccacgtggcctgatgcctaacccgaaagtgggtaccgttacacctaacgttgctgaagcagttaaaaatgctaaagcaggtcaggttcgttatcgtaatgataaaaacggtattatccacactaccattggtaaagttgatttcgactcagataagttgaaagagaacttagaatctctggttgttgcgctgaaaaaggctaagcctgctacagcgaaaggcatatatatcaagaaaatcagcctgtccactaccatgggtgctggcgttgctattgatcaaagcggcctgactgcagtagtgaactaa

SEQ ID NO: 41633 - DNA, 2154 bp, Yersinia pestis
gtgtcccgtacaataatgttgatcccaacaggcaccagcgttggtttaaccagcgtcagcttaggtgtcatccgttccatggagcaaaaaggggtaagcttgagcgtattcaagcctatcgcccagccacgtgcgggtaatgatgctcctgaccaaaccacgaccatcatccgggcgaactccagcatcactgctgctgagccgctgaacatgaactacgtggaaaccttgctgagttctaaccagcaagatgtcttgatggaagaaattgttgcccgttatcacgaaaataccaaagacgcagaagtggttctggttgaaggtctggtgcctacacgcaaacatcagtttgccaatgcactgaactatgaaatcgctaaaacgctgaacgctgaaatcgtctttgttattgcccttggtaatgactcgccagatcagttgaaagagcgtatcgaactggcccgctccagttttggtggcagcaagaacaaaaacatcactggcgttatcatcaataaactgaatgccccggttgatgaacaaggccgtacccgccctgacctgtctgaaatctttgatgactccaccaaggccagtgttgcgaacatcgatccaagccagctattcgctaacagcccgatccctgttctgggttgtgtaccgtggagcttcgagctgatcgccacccgtgccattgatatggccaagcacctgaatgcccgcattattaacgaaggcgatattaaaacgcgtcgagttaaatccgtgacattctgtgcgcgcagcatcccgcatatgctagagcacttccgtccgggttctctgctagtgacctcagcagaccgccctgatgtgttggtgtctgcctgtttggcggcgatgaacggtgtggaaatcggtgccatcctgctgacgggaggttatgccattgatgatcgtatcaataatttgtgtgaacgtgccttccaaactggcttgccagtatttatggttgataccaacacctggcagacctctctgagcctgcaaagctttaatctggaagtcccagcagatgaccatgagcgtgttgagaagttgcaaaactacgttgccagccatatcagcagcgagtggatcgactccctgaccgccgcctctgagcgcccacgtcgcttgtctccaccggccttccgttatgagctgactgagttggcccgtaaagctggcaaacgtatcgtactgccagaaggcgatgagccgcgcaccattaaagccgcgtctatctgtgctgaacgtggtatcgccacttgtgtcctgttgggtaacccggaagagatccaacgcgttgccacatctcaaggtgttgagttgggtaaaggcgttgaaattatcgaccctgttgcggtacgtgagcaatatgttccacgcttggttgagctgcgtaagagcaaaggcatgaccgaagtggttgcccgtgaacagttggaagacaacgtggttcttggcaccctgatgctggagaaaggggaagttgacggtctggtttctggtgcagtacataccaccgcgaacaccatccgcccaccactacagttaatcaaaactgcaccgggcagttcgctggtctcctctgtgttcttcatgctgctgcctgaccaggttctggtgtacggcgactgcgcgatcaacccagatccaacggcggagcaactgtctgagattgctatccaatcggctgattctgcggcagcctttggtatcgaacctcgtgtggcgatgatctcgtactccaccggtaactccggtgccggtagcgatgtcgaaaaagtgcgtgaagcgactcgtctcgcccaagaaaaacgcccagatctgatcatcgatggcccgttacagtatgatgcggcaatcatggcggatgtggctaaatctaaagcgcctaactcaccggtagcaggtagagcgaccgtgttcatcttcccagacctgaacaccggtaacaccacctataaagccgtgcaacgttctgccgacctgatctctatcgggccgatgttgcaagggatgcgcaagccggtgaatgatttgtcccgtggtgcgctggtagacgatattgtctataccgtggcgctgacggcgatccaatcagctcaggctgattcagccgcgtcttaa

SEQ ID NO: 41634 - DNA, 429 bp, Yersinia pestis
atggctaagaaagtacaagcctatgtcaagctgcaagtagcagctggtatggcgaacccaagcccaccagtcggtccggctctgggtcagcagggtgttaacatcatggagttctgtaaagcgttcaatgctaagactgaaagcattgaaaaaggcctgccgatcccagttgttattactgtttattctgatcgctctttcactttcgttactaaaaccccgccagcagcagttctgctgaaaaaagcggcaggtattaagtctggttctggcgtgccgaacaaagacaaagtaggtaaagtgaccagtgctcaggtccgtgaaatcgcagaaaccaaagctgcggatatgactggttctgacgttgacgcgatgatgcgttcaatcgaaggtactgctcattccatgggcctggtagtggagggttaa

SEQ ID NO: 41635 - DNA, 1113 bp, Yersinia pestis
atggtttataggtattcgatgcgttatttggctgttattctccctttgttgacgttgctctcagcttgtagtagccagccgacacctcctgttgctgcaaccccgtcagatagccctgttcagggcggttttttgcttgagccggaacatacgggccagttgcaaaacggtgattttgcctttaacccagataccacgcgttttgttgacaaaatggtgcgtgagcacggttttgatcgccagcaactgcacgatgtattggctcagacccagcggctggactgggttattcgtttgatggataagcaagcgccgacgtcccgaccaccttctgagccaaacggtgcctggaatcgctatcgcaataaatttattactcctgataatgtgcagaacggtgtggttttctggaaccaatatgaaggtgcgctgcaacgtgcctgggaggtgtacggtgtgccgccggaaattatcgtcggtatcatcggggttgaaacgcgttggggccgggtgatggggaaaacccgaatcatcgacgccttggcgacgctatcctttgcttacccacggcgtgcaacattctttacgggtgagttggaaaccttcttattaatggcgcgtgctgaggggaaagacccactcagtctacggggctcctatgcgggggcaatgggctatggtcaatttatgccatcgtcatttaagcgctatgcagtggattttgatggcaacggccacatcaacttatgggatcccgttgatgctatcggcagtgttgccaattacttcaaatcccacggttggacgaaaggtgcgccggtagctgtacctgccaacggacaggctccaaatctcgaaaatggatttaagacccgttatccaatctcaactttagcggcagcagggcttagccccaaagggtcgttaggcgattatcaggaggccagtttgctgcgctttgatgtgggtaccggttatcaatattggtacggtttgcccaacttctacacgattacccgctataaccacagtacctattatgcgatggcagtatggcagttaggggaagccgtgggcagggcgcgcaaaggggagtcaatgattacccaatag

SEQ ID NO: 41636 - DNA, 546 bp, Yersinia pestis
atgtctgaagcacccaaaaagcgttggtacgtcgttcaggcgttttccggttttgaaggccgtgtagcacaatcgctacgtgagcatatcaagttacatgacatggaagagctgtttggcgaagtcatggttccaacggaagaagtcgtagagattcgtggcggtcaacgccgtaaaagtgaacgcaaattcttcccaggctatgtgctggtccagatggtcatgaatgatgccagctggcacttagtacgtagcgtgccacgtgtaatgggctttatcggtggtacatccgatcgcccggcaccaatcagtgataaagaagttgatgcgattatgaatcgtcttcagcaagtgggtgataagccacgtccgaaaacactgtttgaaccaggcgaattggttcgtgttagcgatggtccgtttgcagacttcaacggtgttgttgaagaggtggactacgagaagagccgcttgaaagtatccgtttctatttttggccgtgcgacaccggttgaattggatttcagtcaggtagaaaaaggctga

SEQ ID NO: 41637 - DNA, 444 bp, Yersinia pestis
atgttaaaaacactgttaacgtcggatgtcattcaggttgtcagccaggcaaaagattggcgtgatgctatcgcgatctcatgccaaccgcttatcgataatggtgcggtagaagctcgctatgttgaagcgatttatcgctcccatgaagctattggcccttattacgtagtcggtcctggtattgcgatgccacatgcccgcccggaagacggcgtaaatagactctctctggcactaactgtcatcaccgagggggtcactttcaatgcagaaggtaacgacccggtaaaactgctcatcgtgttagcggcaacagacagcaatagccatattgaggctatttcccaactcgctcaattgttcgataccgctagtgatgtgcaagccttacttaatgctaaaacaccgcaggatattctgtcagtgattgcacgctattaa

SEQ ID NO: 41638 - DNA, 1185 bp, Yersinia pestis
atgtctaaagaaaagtttgaacgtacaaagccgcacgttaatgtgggtactattggccacgttgaccatggtaaaactaccttaactgctgcaatcaccaccgtattggctaaaacctacggcggtagtgctcgtgcattcgaccagatcgacaacgctccggaagaaaaagcgcgtggtatcaccatcaacacttctcacgttgaatatgatactcctgctcgtcactatgcacacgttgactgcccaggtcatgctgactacgttaaaaatatgatcaccggtgctgctcagatggatggagcgatcttggttgttgctgcaaccgatggccctatgccgcagactcgtgagcatatcctgctgggccgccaggttggtgtcccatacattattgtcttcctgaacaaatgtgacatggttgacgatgaagagttgctagagttggttgaaatggaggttcgtgagcttctgtctcaatacgatttcccaggcgacgacactccagtcatccgtggttcagcgttgaaagccctggaaggtgacgctgagtgggaagctaaaattatcgagttggcagaagctctggatagctatattccgcaaccagaacgcgctattgatagaccattcctattgccaattgaagacgtattctctatttctggtcgtggtactgtagttactggtcgtgtagaacgtggtattgttaaggtcggcgaagaagttgaaatcgttggtattatcgatacgattaaaacaacttgtactggcgttgaaatgttccgcaagctgctggatgaaggccgtgctggtgaaaatgttggtgttctgctgcgtggtactaagcgtgacgatgttcagcgtggtcaagtactggcgaaaccaggttctatcaagccacacacgaagtttgagtcagaagtttatattctgagcaaagatgaaggcggccgtcatacaccgttcttcaagggctaccgtcctcagttctacttccgtacaactgacgtgaccggtaccattgagctgccagaaggcgttgaaatggtcatgcctggtgacaacgtaaacatggttgttaacctaattgctcctatcgcaatggatgatggtctgcgcttcgcaattcgtgagggtggccgtactgttggtgctggcgttgttgctaaagtcattgaataa

SEQ ID NO: 41639 - DNA, 780 bp, Yersinia pestis
atgcgcagaacgctccttactatattgtcctttttaaggacagtgcgactcttaacgacactgacactcttaatattatcggttgtggcgactgtggctcgtgctgaagtgatgatcagtgggacacgtgttatttatgaagagaaacaacgtgagggggtggtaaaggtttccaatacgggcgatatgccggtcctgcttcaggcctggatagataaaggtgatgcgaacgcacgcccagaggctatcaaggtgccgtttagtgtaacccccccagtagtacgtttagaccctaaaagggatcagactattcgtctttttcgcactgatggtggattagcggctgatcgtgaaaccctattttggtttaacttattagaagtcccgccaaagccaatccaaagtgcggctggtggtgagaacaaaatgcaattggctttccgtaccagaattaaaatgttttaccgccctgaaggattaaccgtattacctgcgcaagcggccaagagtctcgcattttcaatgaaaggcaatcagatcgtcataaagaatgcctcaccgtattacattaccttgagaaagctagaattacgcacgtcagagaaagggcctgtattggctaattttactaaaatcaataataaaatggttgccccttttagtgaactaagcttacctacgagtgcaaaagcatcgatcaataattcggcacaagttttttattctgttattaatgatcagggcggcgaaactcaaggtacgcaaaaactgacccaataa

SEQ ID NO: 41640 - DNA, 2613 bp, Yersinia pestis
atgcttagtgctttcatattttttcaaaaaaacgagtgcctaaaatatttaccggcattctctttcgctatttgtggtattggtggcatgttatatattccgtcatctgccgccgagaattctgaatacgttgaatttagtgacgccttcctccgttttcccgttgatgccacccgctacagtgagggtaatcctgtttcccccggtgagcgtcaggttgatatctatttaaatgatcaatggattggtcgtcaggaaatgcgttttgccttgccgtcgccagaatcgaaagttgccaccccctgttttgacgtaaaactctttgatgagttgggggttgatacggcgaagttatcttccgataccgtgaaattgctcgaaagtcgcggggcatgctctccgttgagtcgtttgctggaaggtggaaatgctattttcgacgacaatcagcaacgcttggatattcaggttcctcaagcttatctgatccgccaggctcgcggttatgtgcatcctaaatattgggatgatggcgtgacagcggccaccttgaaatatgactataccggttaccgcagtaaccagaatgatatcggtagccagacttatcaatatctggggctcttgggcgggcttaactggcaaagctggcgtctatattaccgcagtgcattgaatcgaagtgatagccaaggctttgattatcagaacctggccacttatgttgaacgggccgttccctcgctatacagcaaaatgactattggtgattcaaacacggatggtcaggtgttcgacagccttagctatcgcggcattgagttgacctcagatgaccggatgtatgcggattctcagcggggttatgcgccagtggtacggggtgttgctcgaacgaacgcccgcgtcgtggtgcgtcaacaggggcggcctatttatgaaacgacggtacccccagggccttttgtcattgacgacctctacccgaccggtcaggggggcaatctcaatgtcaccattaccgaagcggatggcagcgaacagacatttatcgttccttttgcctcgatagcggagttgctgcgaccgggaaccacgcgttactcattgatggccggtgagtatcgtgacaattcgatggtagataaaccggtcctctttatgggaacggtgcgtcatgggttatccaatttactcaccggtaacggcgggatggttgcggctgaaggctatttatcagcctctgccgggctggcatttaacacaccagttggtgcagtggcatttaatgtgacgcaagcacaaacccgtctgcctaataaagataatcaacgtgggcaaagtattggtatgacctatgctaaatccttgccggaaaccaataccaacttgaccatcgccagttatcactattccagtaacggtttttatacaccagcagaagctatgcgaatgcgtgattatttacagcatggtgaagtcaataatacgcagattgattcaagttggccgaatggcagtgatcgctacgatgatagttttaagtatcgtcgccgcaatcaggcgcaagtgagtatcgctcagggcttacctgatggctatggctcgttctacgcaaatgccaatgtgcaggattactgggatggacgtaaccgcgatatgaattttcaattcggctacacgaatagctataagtcgctgagttataacgtggcgcttaatcgcttgcgtgatatacctagcggcgattgggacaaccaattaagtgtttccctttcgattcctctggggacacatgctggtgcaccacgtttgagctccagttattccaatactcgtggtagcagtgcaatacaaaccggggtttccggctctgcgggtgaggataatcaatttagctatggcgtatctgcagcgaataaccgtagcgatgaaaatggcagttataacaccctaggtgcgaatggcagttggcaggcaccttacgccacggtgggcggtagttattcgaagagtaacagctatgatcaagccagtgccagcttgtcagggggggtagtggcttatcgtggtggggtgatattggcccctgcactgggtgataccgtcggtattattgaggctccagatgctgcgggagcgcgtgtcggcagctactccagtatgtatcttgatcgtcgtgggcgtgcgatattgccttatttaagtccgtatcggcagaatgaggttgaattagatccgaaagggctatctgcagatgttgagtttaaaagtactagccaaaaagttgcgccaaccgcaggtgctgttgcattggtaacattcgagacctcaaccggttattcggttttagtcagggggcatctggcagataacacccccttgccgtttggggcggaagtaaaagatggcggagggacccgcgtcggctttattgctcagggcggtcaggcaatggtccgagtgaatcaacaagccggtaatctgcgcgtgatatggggtgatggcatcggtgagagttgcagttttgactataaattgccggaaggtaacctagtaaaaggtcatctggtcaaaggtgactaccggcgcttagaggtgatatgcaaatga

SEQ ID NO: 41641 - DNA, 1038 bp, Yersinia pestis
atgtcgaatcagcgttcctctctaaaacaccttaatacctttgcgctacctgcttatgcaagcaatgtcattagtgctggctcagtagaaacattaattgcggcttggcatgaatcaaaagccaagcgacagccggtactattactaggtgaaggtagcaatgtgttatttattaaaaatttctctgggacagtattactcaataggattatggggattacttctaccgaagacagtgctgcttggtatttacatgtcggtgctggggaaaattggcatcaactggtatgtcattcactgcaaaataatatgccggggttggaaaatttagcgttaattccaggctgtgtcggctctgcgccgatccaaaatataggtgcctatggcgttgaattaaaacaagtatgtgaatatgttgatttacttgatatggataaaggtactattcagcgtatctccgctgaggagtgtcagtttggttaccgtgacagcatttttaaacatcgctatgggaatggatttgctatcgtatctgtcggtattaaattgatgaaatcatggactccaacgctgggttatggcgacttaatacatatggacccattaacagttactgccacagatatttttaactctgtctgtacaatgcggcggagtaaacttccagacccaatggtcactggcaatgccgggagtttcttcaaaaaccctgtagtaagcgcagcaatcgctgaggagatcgtacattgttaccccaatgctcctcattatctgcagccagatgggtcagtaaaacttgcagcaggttggttgatcgatcagtgttcacttaaggggtaccagattggtggtgccgcagtacaccagcaacaagctctggtgctgattaaccagtcagaagcgactggccaagatgtaatacatcttgcacgttatatccgccagcaggtcgcacagagattttcaatctggctagaaccagaggtacgctttattgctgataatggtgaagttaatgctgtggagcatttatcgtga

SEQ ID NO: 41642 - DNA, 1368 bp, Yersinia pestis
atgaacccatcaacaagtgatggcttacctgtacctcaacgctatgccgcgatactggttattgctttaggtattatgatggcggtattggacggcactattgccaacgtggcattaccgactatcgcacgtgacctcaataccagcccagcgacatctatctgggttgtcaatgcttatcagctcgccatcaccatctcactgctttccatggcgtcattgggcgatatcattggttaccggcgggtttatcaagctggcttactgatattcagcgtgacctcactgttttgtgctctgtccgattcgttatggaccctgacgtttgcccgtgtgctacaagggtttggcgcggcggcattgatgagcgtcaataccgccctgattcgtatcatttatcctcgagcccaacttggtcgaggtattggtatcaataccttgattgttgctgtgtcttcagccgcggggcccagtattgccgctgccgtgttgtctgtcgcctcttggcaatggctgttcgccctcaacgtgccaattgggctattagcgtggtgtttaggtataaaattcctacccgccaataatacgaaaagcaacggcaatcgctttgatatcaccagttgtgttctgaatgcgctgacatttggcttattgatcaccgcaatcagtggtttttcccaagggcaaagcccggcagtgattgctgctcaagtggttgccctattactgattggtttcttctttgtgcgtcgtcaactcacgcaatccttcccactgctccccgtggatttactgcgtattcctattttcgcgttgtcgattggcacttcaattttttcttttgccgctcaaatgctggcaatggtgtcgcttcccttctttttacagaccgtattgggccgcgacgaagtggcaaccgggctactgttgactccatggccgttggccaccatggtcattgctccgatcgcggggcgtttggttgagcgctatcatgcaggtttattaggtgggattggtctggctgtttttgccagtggtctattcttgctggcggtgttacccgccaaccccagcgacgtagatattatctggcggatgatactgtgtggcgcgggttttgggctgttccagaccccaaataatcatacgatcatttctgccgctccacagcatcgtagcggcggagccagtggcatgttggggaccgcccgcttgctaggacagacctcaggtgctgccttggttgcgctaatgttcaatatgttctcaaccaacggcacccacgcctccttgatactggctggctgttttgccagtatcgcggcactggtgagtctcttacgtgtaacacaaaaaagtcattag

SEQ ID NO: 41643 - DNA, 921 bp, Yersinia pestis
gtgcgaaaaacagaagctgatcggcataccaccgcggtgcagttaggcattaatccgctgacatggactaacgacgatctgccttctctgggggcggaaacatcgcttgaaacatgcctgagcgaaggtaaagaggcgggttttgcgggctttgaactgggcaataaattttcacgcgaggcgggggttttagggccaattctagagcatcatcaactgaaattggtctctggttggtattccgggcggctgttggaacgctcggttgaagaggagattgtggcggttcggtcacatctggcactgctgcgtgaactgggggctaaggtgatggtatttgctgaagtgtccggttgtattcatggtgaacagcaaacgccagtgcatctgcgcccaaggtttccgccagcgcgttgggcggagtatggcgcgaagctcaccgcctttgcccgttacacgcaggcactgggggtgcagattgcttaccaccaccatatgggcacggtgatcgaaagcgcgcaagatatcgataatctgatgattcatactggcgaagaggtcgggctgctactcgacacgggccacctcacctttgcgggggcggatccgctggcggtggcacaacgctggattgcgcggatcaaccatgttcattgcaaagatgtgcgcacgtcggtgctggccgatgtcaaaaaccgtaaaaccagttttctggacgcggtgttgagtggcgtatttaccgttccgggtgacggcggtgtggactatccacccatcatggcgttactcaaacaacacggttatcagggctggctggtggtcgaggcagagcaagatcctaatgtcgcccacccaatgacctatgcgcgcatgggctaccacaatttaagccgtctggcacataacgctgggctgatttaa

SEQ ID NO: 41644 - DNA, 1236 bp, Yersinia pestis
atggctgaattacctgctaaacgtcgttttacccgtattgatcgtctccccccgtatgtttttaatattacttctgagctaaagatggctgcccggcgtcggggcgaagatattattgacttcagtatgggcaatcctgacggcccgacaccgccgcatatcgttgagaaaatgtgcagtgtcgcgcaacgtgaagatactcacggttattcaacttcgcggggaataccgtgcctgcgtagagcgatttcccgttggtatgccgatcgctatcaggtggatatcgatcccgaaaatgaagctatcgtcactatcggctctaaagaagggctggctcacctgatgctggcaacgctggatcacggggatacggtactggtgccaaaccccagctacccgattcacatttatggtgccgtgatcgccggtgcgcaagtgcgttcagtgccgttgaccgaaggcattgatttttttggcgagctggaacgcgctatccgtgaaaccattcctaaacccaaaatgatgatcctcggttttccatccaacccaacagcgcaatgtgttgagttggatttttttgagcgagtcgtcgcgctggcgaagcaatacgatgtgctggtggtgcatgatctggcttatgcagacatcgtttatgatggctggaaagcgccgtcaattatgcaggtgccgggcgcgaaggatattgcggtagaattcttcacgctatccaaaagttacaatatggctggttggcggattggttttatggtcggcaatcctgaattggtcagtgccctggcccgaattaagagttatcacgattacggcacgttcacgccattacaggtagccgcgattgcagcattggaaggcgatcagcaatgtgtccgtgatattgctgagcaataccgccagcgacgtaatgccttagtgcgtgggctacatgaggccggctggatggttgataatcccaaagcctcaatgtatgtctgggcaaaaatcccagagccttatgcacatttaggttcactggagttcgctaaacgcttgctggcagaggcgaaggtgtgtgtctcgccggggattggctttggtgactacggtgacacgcatgtgcgttttgccttaattgaaaatcaggaccgtattcgtcaggcggtacgtgggattaagagcatgtttcgtgctgatggtttactgaaaccgggcaaatcttcccccaatgaaatggcctaa

SEQ ID NO: 41645 - DNA, 990 bp, Yersinia pestis
atggtttatcaagcaagttcctctcgctatcaggagatggagtatcatcgttgtggtcacagtgggttaaagctcccggccatttctctcggtctttggcataactttggtgacagcacacggtatgaaaatagccgtagcctgattcaccgagcgtttgatcatggcatcacccactttgatttagctaataattatgggcctccccccggctccgcagagctgaattttggccgcatcctacagcaagacctgcgcccttatcgtgatgaactgattatcgcctccaaagccggctataccatgtggcccggcccttacggtgactgggggtcgaagaaatatctggttgccagtatcaatcaaagcctgcaacgcatggggttggattatgtcgatatcttctatcaccaccgtcctgatcccaatacgccgctggaagaaaccatggcagcattggacctactggtgcgtcagggcaaagcgctgtatatcggtttgtccaattatcctgcagatcaagcacagcttgcctgtgaaattttgcgtgcactcggtaccccctgcctgattcatcagccaaaatattcgatgtttgaacgcgggattgaagcaggcttacaagatacgctggatgaatatggtgtcggctctattgccttttctccgttggctggcggtttattaactgatcgctatctggcgggtatcccagaagactcacgtgcagccagtgacagtaaattccttagccctgaacaactcacccctgaaaaactggtcaaaatacgccaattgaatgagttggccctcgatcgtggacaaaaattatcacagatgtctttagcctgggtgttgcgtggcgggagagtcacatcggcactgattggtgccagcaaagtcagccagattgatgatgctatcggcatgttagccaatacaaacttcagtgataaagaaatcaacgctatcgaacatattttagcctag

SEQ ID NO: 41646 - DNA, 2190 bp, Yersinia pestis
atgctctaccaaagcgaaacattacagcttcactggttggaaaacggtattgccgagttggtatttgatgctccgggttcagttaataaactggatactaaaaccgtagccaatttgggtgaagccttgaatgtgttagaaaaacaaagtgaactcaaagggttgctattacgttcagcgaagacagccttgattgttggtgccgatattactgagtttctatccctgtttaatgccccaccagaaaaactgcaccagtggctggtgttcgccaacaccattttcaatcgactggaagatttacccgtgccaaccatttcagcaattaatggatacgcactaggtggaggatgtgaatgtattttggcgacggatttccgtatcgcctccccagaagcacgtatcggcctcccagaaaccaagttgggcatcatgccgggcttcggtggttcggtccgtttaccacgcctgctaggcgctgatagtgcacttgagattattgccacaggtaaagatgttactgccaacgatgcactaaagattgggctggttgatgcagttgtcgaccctgagaaactggtcggttcagccttaactatgctgaaacaagctattgacggtaagctcgattggcaggcagcacgccgcccaaaactggaacccctaaaacttaatcctaccgaagcggctatgtgttttaccattgctaaaggcagagtcatgcaagtcgccgggaaacactatcccgcaccattgactgcagtaaaaactattgaagccgccgcaaaatttggtcgtaccgaagcgctgaacttggaaaccaacagttttgtccctttagcgggttccaatgaagctcgcgctttggtggggatttttcttaacgaccagtatgtaaaagcgcaagccaaaaaactgtccaaaggcgtcgctgcaccaaaactggctgcggttctgggcgcagggatcatgggaggtggaattgcctatcagtcagcgctgaaaagtgtgccagtcattatgaaagatattaatgaaaactcgctggatcttggaatgaatgaggccgctaaattactgaataaacagctggaacgcggcaaagtggatggccttaaaatggcaagtattctagcgactattcgaccaaccttggattatgcaggtattgaacgagcccaagtgatcgtcgaagctgtggtggagaacccgaaggttaaagccgctgtacttgcggaagtagaagcattaatcggtgaagataccgttttagcttccaatacctcgacgattcctattgatcagttggctaaatcactcaaacgccctgaaaatttctgcggtatgcacttcttcaatccagtacaccggatgccactggttgaaattattcgtggggcaaaaacctcagataaaacccttgcggcagtagtcgcttacgctacacaaatggggaaaaccccaattgttgtcaatgattgccctggtttcttcgttaaccgcgtcttattcccgtatctcgcaggctttggcatgttagtcagagacggtggggatttccaccaaattgataaagtgatggaaaaacagtttggctggccgatggggcccgcttatctattagatgtcgtcggtattgatactgcccatcatgcacaagcggtgatggctgccggtttccctgagcgaatgaacaaggattaccgtgatgcggttgatgtgatgtttgataaccaacgatttgggcaaaagaatggtcaggggttttaccgctatacgcaagatgcaaagggtaagccacgtaaagaaaatgacgaacaagtggataaattactggcagaaatcagccaacctctccaagaattcagcgatgaagacattattgcccgcaccatgatcccaatgatcaatgaagtcgtccgctgcctggaagaaggtattattgccagcgcagccgagggtgacatggcgctggtttatggccttggcttccctccattccacggaggagtcttccgttaccttgatacgctcggtagcgcaaattatgtcgaaatggctcaacgctatgcccaccttggtgcgttatatcacgttcctgcggggctacgagctaaagctgaacataacgaaagttattatcctgtggcagcagcgctgcttgatgtttctaccaatcaaccagcatga

SEQ ID NO: 41647 - DNA, 1164 bp, Yersinia pestis
atggaaaatgtagtcattattgatgccgtgcgtacaccgatgggccgctccaaagggggggcttttcgtcatgtacgggctgaagacctctctgcccatttaatgcgtgccgttatcagccgtaatcctgggttgaatgctgctgaaatcgacgatatttattggggttgtgtgcaacaaacgttggagcagggtttcaatattgcccgtaacgcgtctttattagccgaaattcctcacagcgtacccgctgttaccgttaatcgcctgtgtggctcatcaatgcaagctctgcatgatggcgcacgagccattatggtgggtgatgcgaagatcagtttgattggtggagtggaacatatgggccacgtgccaatgaaccacggcgtggatttccatccaggaatgggtcgcactgttgccaaagcggctggaatgatgggcttgaccgctgagatgttggctaaaattcacaatatcagccgccagtcacaagatgagtttgcattccgttctcatcaacgtgcttatgctgcgactcaggcagggcatttcgcaaaagaaatcgttgcaaccaatgggcatgatgcagaaggtgtattaaaacgctttgatttcgatgaagtcattcgtcctgaaacaaatctatccggtctagcagccttgcgccctgcatttgatccggtaaatggcacagttactgcagggacatcatcagccttgtccgatggggcttctgcgatgctgattatgagcgaatccagagcgaagtcattaggtttaaccccacgagcacgtatccgttcgatggcggtcgtaggttgtgacccctcaatcatgggctatggcccggtacctgctagtcaattggcattaaaacgtgctggccttgaattggcagatattggtttatttgagttaaacgaggcgtttgctgctcagtcactggcttgtctgaaaggtttaggtttgttagaaagcatggacgataaagtaaacctgaacggtggagccattgcattaggtcacccgttaggctgttcaggcgcacggatctctaccacattgttaaacctgatggagcgccgtgacgtacaatttgggctagcaaccatgtgtatcggcctagggcaaggtattgctaccgtatttgagcgcttatag

SEQ ID NO: 41648 - DNA, 1230 bp, Yersinia pestis
atgcttaatggccgtgctgtcgatacatctcgtcgcccattaaggaagattaaactctccttgatggggcctgcttttattgctgccattgcttatattgatcccggcaatttcgcaactaatattcaggcgggggccacgtttggctataccttgctatgggttgtcgtgtgggccaacgtcatggcgatgttagtccagttgctgtccgccaagctgggtatcgctaccggtaaaaatttggctgagcatatccgggaccgtttccctcgtccagtggtatgggcctactgggtgcaagccgaaattatcgtgatggcgaccgatttggctgagtttatcggggcggctattggctttaaattgctgtttggtgtgacgctactgcaaggggcggtgctgaccggtattgccacctttcttattcttatgttgcaaaatagggggcaaaagcctctcgaattggtgattggtgggctgctattgtttgtcgccgcggcttatattgttgaactgatcttctctcagccagatattgcggctcttggccgtgggatgctgatcccaaatttacctgatggtaacgccgtatttttagctgcgggggtgttgggggcgactattatgccgcatgtgatttacctgcattcagcattaacacaaaccgggggggaagagtctaaaactgagcgctatgcctcgaccaagtttgatgtagcgattgccatgacgattgcgggctttgttaatttggcgatgatggcaaccgccgctgcggcttttcatttcaatggttatgagaacattgctgaaatcgaagaggcttatataaccttgcagccgctgttgggtaatgctgcggccactgtttttggtttgagcttaatcgccgccgggctttcatcaacggtcgtgggtacgctggcggggcaagtggtcatgcagggttttgtgcggttttatattccaatgtgggtgcgccgtatagtcactatgttgccttcttttattgttattttagctgggatggatgcgacacagatattggtgatgagtcaggttttactgagttttggtattgcactggcactggtgccattattggttttcaccggtaataaagagttgatgggggagctggttgatacaaaaaccacccagattttaggtaaattggtggttctgatcgtggttgggttaaatgcctatttactgattagcctgctttag

SEQ ID NO: 41649 - DNA, 702 bp, Yersinia pestis
atgacaactttaagctgtaaagtaacctccgtagaggccattaccgatacggtgtaccgggtgcaattggtacctgaatcttctttttctttccgcgccgggcagtatttgatggtagtgatggatgagcgtgataagcgcccattctcgatggcttccacaccgtttcagcaggactttatcgagttacatatcggtgcttcggagctgaatttgtacgcaatggcagtgatggatcgcatcctaaaagagaaaaaactggatgttgatattcctcatggagatgcctggttccgtgaagggagcaagcgtccgttggttctgattgctggcggtactggcttctcttatgcgcgatccatcttgttagccgcgttagcggaacaacctgatcgcgaagtctctatctattggggcgggcgcgaagcggtacacctgtatgatttaggtgagttggaagcactatcgattaagtatccgcaactgaaagtcattcccgtagtagaacaaccggaagagggttggcgtgggcgcacagggactgtactgagtgctgtactacaagattacggttctttagctgagcaggatatttacatcgcggggcgttttgaaatggctaaaatcgcccgtgagcgtttttgtgtggagcgtggcgcacaggaagaacatatctttggtgatgcttttgcctttatctaa

SEQ ID NO: 41650 - DNA, 1416 bp, Yersinia pestis
atgaaaatcaaaacccgttttgcacctagtcctaccggctatctccacgtgggtggcgcgcgtactgcgctctactcctggctattcagccgccatttaggtggcgaatttgtgctgcgtattgaagacaccgatcttggacgctctacacaggaagctatcgatgccattatggacggtatgaactggctgaatctggattgggatgaaggcccgtatttccaaaccaagcgttttgatcgctataacgccgttattgaccaaatgcttgatgccggtacagcttatcgctgctattgctctaaagaacgcctggaagcattgcgtgaagctcaaatggctaacggagaaaagccccgctacgatggtcactgccgtgacagccaatgtactcatggcgctgatgagccgtcagtggtgcgtttccgtaacccgcaggaaggctctgttatttttgatgataaaattcgcgggccaatcgaattcagcaatcaggaactggatgacttgatcatccgcagaaccgatggttccccaacctataatttctgcgtggtgattgatgactgggatatggagatcacccatgttatccgtggtgaagaccatattaacaacacacctcgccagattaatattctaaaagcattaggtgcaccagtacctgagtatgctcacgtctcaatgattttgggcgatgatggcaaaaagctgtctaaacgccacggggctgttggcgtcatgcaataccgtgatgacgggtacttaccagaagcgttgttgaactatttagtccgtttagggtggtcccatggcgaccaagagattttctctattgaagagatgacccagttatttaccctggatgccgtcagtaaatcagccagtgcctttaataccgaaaaacttcagtggctgaatcatcactatatcaatagcctgccacctgaacaggttgccgtacacctttcatggcatgttgaacaactgggtattgatacacgtaatggccctgaactcgttgagatagtaaaactgctgggcgaacgttgtaaaacactgaaagaaatggcggagtcctgccgttacttctatgaagagtttgacgcatttgatgtagatgccgctaagaagcacctgcgccccattgcccgccagcctttggaagccgttaaagttaaactcgccgccatcaccgaatggaccacagagaacgtccacaacgccattcagggcaccgcggatgagttaggtgtcggtatgggtaaagtgggtatgccactgcgtgttgccgtgacaggcgttggtcaatcacccggcatggatgtgactgttcatgctatcggtcaagcgcgcacgctggcacgtattgataaagctctggcctttatcagcgaacgcgaagctcaacagtaa

SEQ ID NO: 41651 - DNA, 1023 bp, Yersinia pestis
atgagctatgcatttccgggcacctttcctggtcgccgtatgcgccgtgtacgctgtcatgatttcagccgccgtttggttgccgagaatcacttgacggtcaatgacttgatttacccggtgtttgtcatggaagggactcaccagcaacaagccgtttcttcaatgccgggggtctctcgtatgacaattgatctgctgctgaaagaagcagaagcaattgctaagctcggtgtgccggttatatcgctattcccggtcattgaagcagggaaaaaatcattatatgcagaagaggcatataacccggatggtttagttcagcgtactgtgcgtgcgttgaaagatgcagttcctgagctaggtattctgactgacgtggcactcgatccctatacgacccatggtcaagatggtgtgattgattctgatggttacgtgatcaatgatgtcaccaaagagattctagtgcgtcaggcactatcgcatgctgaagctggcgctgagattattgcaccaagcgatatgatggatggccgtataggtgcaattcgtgatcaattagagcgccaagggttagtgaacacccagataatggcttattcggctaagtatgcgtcttgctactatggcccattccgcgatgcaattggctcgagcagtaatctaaaagggggggataaaaaaacttatcagatggatcccgccaacagtgatgaagcactgcaagaaatagctcaagatttacaagaaggcgctgatatggtgatggtaaaaccaggaatgccatatctggatgttgtacgcagggtgaaagatacttttggtgttccaacctttgcctatcaggtgtctggtgaatatgccatgcatatggcagcgattcagaatggctggctccaagagaaaccgacggtgatggagtcgttgttatgctttaagcgtgcaggtgcggatggcgtattaacttatttcgcaaagcaagttgcgcaatggctacatgatgaccagatgcagcgctaa

SEQ ID NO: 41652 - DNA, 2013 bp, Yersinia pestis
atggaatcgataatccaacaaattaatcaactaagaacttcattgcgccatcatgaacatcaataccatgtgctggatgcccccgaaatccctgatgctgaatacgaccgtatgatgcaacaactgcgtgatttagaagcacaacatcctgaactggtgactaatgactcaccgacgcaacgggttggtgccgcgcctcttgatgcctttgaacaggtgaagcacgaagtaccgatgctgtctcttgataatgtgtttgatgaagaaagttatctggccttcgataaacgggtacatgaccggcttaaaacggcagaaccactgacattttgttgtgaactgaagctagatggtctggcggtcagtttattgtatgaaaatggtgaattggtgagagccgcgacacgtggtgatggcactacgggagaaaatattaccgctaatgtgcgtactattcgtgccattccactgcgcctacatggggataatgtcccgcggcgcgtagaagtccgtggcgaggtttttatgccacaagccggttttgaacagcttaacgaagaggctcgtcgcaaaggagggaaggtctttgccaacccacggaatgcggcggcgggatcgttacgccaacttgatccccgtattacagccaaacggccactcaccttcttctgctatggtgtcggtctgctggatggcggcgagctaccccgtagccatattcagtgtctgatgcaatttaaggcatgggggttacccgtgagtgagcgggtgaaactctgcactggcagtgatcaggttattgctttttatcgtcaaatagagcaagaccgcgcaggcttgggctttgatattgatggtgtggtgatcaaagttgatgatcttgctttgcaggagcaattggggtttgttgcgcgtgcccctcgctgggcgacggcatttaaattcccggcgcaggaacagatcacacaggtccgtgaagtggaatttcaagtgggtcgtaccggtgccattactcccgtagcccgtctggagccggttcaggtggctggcgtgattgtcagtaatgcgacattgcacaatgccgatgaaatcgaacgccttggtttgcgtattggcgatacggtcattgtgcgccgtgcgggtgatgtgatcccacaagttgttggtgtggtcatggaacaacgccctgatgatacgaaggagatcactttcccaagccaatgcccagtgtgtggctccgatattgaacgggtggaaggggaggctgttgcccgctgcactggcggcttgttctgtgctgcacagcgtaaagaggcacttaaacattttgtctcccggcgagcactggatgtagacggtatgggcgataaaattatcgaacaactggtcgagaaacagtatgttgaaaatccagctgatttattccaactgaccgcaggtaagttgacggggttagatcggatggggccaaagtctgcgcaaaatctgattgcggcgctggagaaggccaaacagaccacctttgcacgcttcttgtatgccttggggatccgcgaagtgggcgaagcgacggccgcaaatttagccgctcacttccgcactctggataatctgcgtgcagcagatattgagacgttaaaaagtgtgccggatgtcggcgaggtggtggctaaacatgtgatgaacttcctcagtgaggaacataatcagaaagtcatcgaagaactggagaaagtggtcagttggcctgagccgcagcaaattgtagtcgaggagagcgatagccccttcgctggaaaaacggtggtcctgacggggtcattgacgatcctttcacgggatgaagcgaaagaccgcctgacagcattaggcgcaaaagtgagtggcagtgtctctaaaaaaacgcatctggtgatcgctggcgaggcggctggttctaaactggcgaaagcgcaggaactcggaattaaagttattgatgaagctgaaatgatccgtttgctgggtgaataa

SEQ ID NO: 41653 - DNA, 987 bp, Yersinia pestis
atgatgcaggatttgcgtctgatattaatcgttgttggcgcgatcgccataatagcgttgttattgcatggtttgtggaccagccgtaaagagcgctcttcactttttcgcgatcgcccagttaaacgtacaaaacaagaacgtgttgaaaccccgatcgagagtctcgatgaaggggtaggagaagtgcgcgtccgcacgtctcacccacaagagaagccttcatttaatcatcttgacgatgatgacgatgaagtgccggttattcagcatgctgaaacaaaatcggctcaggttaagacagcatctcgtcaggcgccttttgcttcagtacaaacagattatgacgacccgcttttgggtgggctatctgctgaacaaccaccgcatgacttatcgcgtgatcctttgcttggcaaggctgatgaatcttattcacagccgcaacacgcagagccaccgcatgtggaaaaacctgcacatcaggtggctccacaacagcatgtggaatctcagcaagagcccgtcgctccagcacccgaagcgaaaccacaaaagctaaaagaaactgttttggtgctgcacgtcgcagcgcatcacggtggtgtgatcggtggtgaggtactactgcaaagtgttcttcaatctggtttccagttcggcgagatgggtattttccatcgtcatcttagccctgcaggcagcggaccggtcttattcagtctggcgaatatggtaaaaccaggttcgtttgaccctgacaccatgtctgatttttcaacgcccggtgtttcaatgtttatgatggtaccgtcatacggcgatgcgaatcagaactttaagttaatgctgcaatcagcccaacgtattgccgacgatgtcggtggtgtggtgttagatgatgaacgccgcatgatgaccccgcagaaattggaatcatataaggcgcgtatccgtgaagtgctggatgcgaatacaattgcttga

SEQ ID NO: 41654 - DNA, 813 bp, Yersinia pestis
atgattaaatggctgtggaaagcaaataaaccgcaagcggagatgcttgcgcaatggcatgaggcactgaatattcctttgctggctccattaaacgaaccagaacagcaacggttggtttcggtggccagtcaattattacaacaaaagcgcttcatccccctacaaggcttgatattaaccccattgatgcaagcacgcctcgctttgctattcgcactgccggttatggagctaggtgccaaatggttagatggctttcacgaagtccttatttacccttctccctttattgtcgcggaggactggcaagatgaccttgggttggttcattcaggccaaagcgtacagtctggccagagctgggaacaaggacctatcgtcctgaactggcaagatattcaagattcattcgatttatctggctttaatctggtgatccatgaagctgcccataaattggatatgcgtaatgggggtcattcaaatggcgtgccccccattgcgatgcgtgatgtggcggtatgggagcatgatctacaccacgccatggataatatccaagacgagattgatatggtgggtgtggaaggtgccagtatggatgcctatgcagccagcaatccagcagaatgttttgccgtattatcagaatactttttcagtgccccagagctgctggagggccgtttcccggcagtctatcaacatttttgccggttctaccgtcaagatccattagctcgactaaaacgctgggaaaactcgctggcagacaatccgcctcccgagaatactcactcgcaccgttag

SEQ ID NO: 41655 - DNA, 969 bp, Yersinia pestis
atgagcaagatatatgaagacaactctttaacaatcggccatacgccgctggttcgtctgaaccgtatcggcaacggacgtattttggcgaaagttgaatcgcgtaacccaagtttcagtgtgaagtgccgtatcggcgccaacatgatttgggatgctgaaaaacggggtattctgaccgcaggcaaagagctggttgaaccaaccagcgggaatacaggtgttgccctggcatttgtcgccgctgcacgtggctataaattaacccttaccatgcctgaaactatgagcattgagcgccgcaagttgctgaaagcactgggggcaaatttggtgcttaccgaaggtgccaaagggatgaaaggcgcgattgccaaagcggaagaaattcaagcaaccgatccagaacgctaccttatcttgcaacaattcagtaacccggctaaccctgaaattcatgaaaaaaccaccggccctgaaatttgggaagataccgatggtgatgtagatgtctttgtctccggggtaggtaccggtggtaccctaaccggtgtcagccgctatattaaaaacacccaaggcaaagccatcacgactgtggccgtcgaacccactgactcccccgtgattacccaagcgctggccggtcaagagatcaaacctggtccgcataaaattcaaggtattggtgcgggttttatccccggtaacctcgacttgagtctggttgatcgtgtagcgctggtcaccaatgaagaagctatttcgatggcccgccgtttgatggatgaagaaggcattctggcgggtatttcttcaggtgcagccgttgctgccgccgttaagctttcagaagaggaaggctttactgacaaaacaattgtggttatccttccctcctcgggtgaacggtatttaagtacagcattgttcgcagatttgttcacagagcaagagctgcaacagtag

SEQ ID NO: 41656 - DNA, 1728 bp, Yersinia pestis
atgatttcaggcattttagtatcaccgggtatcgcttttggtaaagcacttctactgaaagaagatgagattgtcatcaaccggaaaaagatctctgctgaccaagtggagcaggaagtcgagcgtttcaaagctgggcgcgccaaagcggctgaacagttagaagcgattaagaccaaagctggcgtaagcctaggcgaagagaaagctgccatcttcgaagggcatatcatgctgttggaagacgaagagcttgagcaggaaatcatagccctcatcaaagatgagcatgcctctgctgatgcagccgcttattctgtcattgaaggccaggcaaaagccctggaagaattagatgacgaatacctaaaagaacgcgctgctgacgtacgtgacatcggtaaacgcctgctgaaaaatattctcggtctgaacattgttgatctgagtgcgattcaggatgaagttattctggttgctaccgatttgacgccgtcagaaaccgcacagcttaatttggataaagtgttagggttcatcaccgatattggtggccgtacctctcacacctcaattatggctcgctctcttgaattacctgccatcgttggtaccagtaatgtgaccaagcaggtcaagaatgatgattacttgatcctcgatgcagttaacaacaaagtttatttgaatccaactgccgatgtgatcgagcagttaaaagcggtgaaaaaccagtacatcaccgaaaaaaatgaactggctaaattgaaagacctgccagctatcacccttgatggtcatcaggttgaagtggttgccaacattggtacagtgcgtgatatcgccggtgctgagcgtaatggcgctgaaggtgttggtctgtatcgtaccgaattcctgttcatggaccgcgactctctgcctacagaagaagagcagttccaggcttataaagcggtagcagaggccatgggttctcaggcagttatcgtccgtacaatggacatcggtggtgacaaagatctgccgtatatgaacttgccgaaagaagaaaacccattcctgggctggcgtgctattcgtatcgctatggatcgcaaagaaattctgcacgcacagctgcgggcaatcttgcgagcgtcggcgtttggtaagttgcgtatcatgttcccgatgattatttcggtcgaagaagtacgtgaactgaaagcagaacttgaactgctgaaaagccagctacgtgaagaaaataaggcctttgatgaaactatcgaggtcggtgtaatggttgaaacacctgcggcggcggttatcgctcgccatttagctaaagaagttgacttctttagtattgggacaaacgatctaactcagtatactctggcagtagatcgtggcaatgagctgatttctcatctctataatccgatgtcgccatcggtattgggcctgatcaaacaggttattgatgcatctcacgctgaaggtaagtggaccggtatgtgcggtgaacttgctggcgatgaacgtgctacactgttgctattgggcatggggctggatgaattcagcatgagtgcaatttcgatcccacgcatcaagaaaattatccgtaatacgaatttcgaagatgtgaaggtgttggcagagcaggcactggctcagccaacagcgaaggaattgatggatttggttaccacattcatcgaagagaaaacgctctgctaa

SEQ ID NO: 41657 - DNA, 756 bp, Yersinia pestis
atggtagatcaggagaaggaaaccacccattttggttttcgcaccgtagccaaagaacagaaagaaggcatggtggcagaagtttttcattccgtagcagctaaatacgatctaatgaatgacctgatgtcatttggtgttcatcgtatttggaagcgttttacggttgactgtagcggtgtccgtcgtggtcaacgcgtgttggatttagctggcggtactggcgatctgacagctaaattctcccgtttagtgggtgaacagggtgaagtcatcctggctgatatcaatgaatccatgttacggatggggcgtgaaaaactccgtgataaaggtattgtaggtaatgtcagctatgtacaggccaatgctgaagctttacctttccctgataatttttttgactgtattaccatttcattcggtttgagaaatgtcaccgaaaaagaaaaggcattgcgttctatgtttcgggtgctgaagccaggtgggcgtctgctagttcttgagttttctaagccgctcctcgaaccgttaagtaaagcctacgatgcctactccttccatatcttgcctaaaattggtgagcttgtggctcaggacgctgaaagttatcgctatctggcagaatctattcggatgcatcctgatcaagaaacactaaaaggtatgatggccgacgctgggtttgaaaacgtaacctattccaatttaaccggtggcattgttgcgttacatcggggctttaagttctaa

SEQ ID NO: 41658 - DNA, 975 bp, Yersinia pestis
gtgagtatagctattatcatcggcacacatggggctgcggcagaacaactgcttaaaacagctgaaatgattttaggtgaacagagtaatgttgcttatatcgatttcgtcccaggtgaaaatgctgaaacgttgattgagaagtacaacgatagattgaccgggctagataccagtaaaggtgttctattcttggtcgatacttggggtggtagcccgtttaatgccgccagtcgcattgctatcgataaagagaactatgaggtcgtcactggcgttaacattccgatgctggctgaaacctttatggctcgtgatgatgagccgtcattcgctgaattggttgcagtagctgtcgagaccggccgcgagggtgtgaaagccttaaaagcgcctgatgttaaaagtgataagcccgagacacaacccgcagctccagtgccaacagccaaggctcctgccgttgctttaggtccgaacgatcatatgaagatcgggctggcacgtattgatgaccgcttaatccatggacaggttgcgacccgttggaccaaagaaactaacgtaaaccgcattattgtagtcagtgatgaagttgctgccgacaaaatgcgtaaaaccttgctaacgcaagttgcccctcccggtgttaccgcacacgtggttgatgtagaaaaagcgattcgcgtttataacaacccgaaatatgccaatgatagggtcatgctgctctttaccaacccgactgacgttgttcgtctggttgagggcggtgtagacattaaatcagtcaatattggtggtatggcattccgtcaggggaaaacccaggtgaacaatgccgtctccattgatgaaaaagatattgaagcgtttaacaaattgaatgctcgcggtattgaattggaagtccgaaaagtgtcttcggatagccggctcaaaatgatggatttgattagtaaattaaataaatag

SEQ ID NO: 41659 - DNA, 1536 bp, Yersinia pestis
atgacaacttcaacatcgaaacagaccacgcaagataagcgcctgactgacggccctgactggacatttgagctactgcaagtgtatctcgaccaaatagatcgggtggcgaaacattaccggcttgatacttatccccatcagatagaagtgatcacctcagaacaaatgatggatgcctattcaagtattggcatgcccattaactatacccattggtctttcggtaaaaaatttatcgaaactgaacaaaaatataagtacggtcaacagggattagcctacgagattgttattaactcgaatccttgtatcgcctacttgatggaagagaataccatcacgatgcaagcactggttatggcccatgcctgttacggacataactccttctttaagaataactatttattccgcgcgtggactgacgccagctccatcgtggactacctactctttgcccgccactatattaatgagtgtgaagagcgctatggcgttgaagaggttgaacggttgctcgattcttgtcatgcgttaatgaattatggcgttgatcgctataagcgtccgcaaaaaatttcgctggtcgaggagaccgcacgccagaaaagccgtgaagagtatctgcaaagccaagtgaattccctgtggaaaacgttgccacgtaaagatcgagaagaagctcctgttcaggcacagcgctaccccaacgaaccgcaagaaaatatcctctactttatggagaaaaatgcaccgttgttggaatcatggcaacgtgaaatattgcgaattgtccgcaaagtcagccagtatttttatccccaaaaacaaactcaagtgatgaatgaaggctgggcaacattctggcactacaccattcttaaccatttatacgatgaaggccgggtcaccgaccgctttatgatggagtttctgcacagccataccaacgtcgtgtatcagccaccgtataacagcccttattacaacggcattaacccttatgctcttggcttcgctatgtttcaggatattaaacagatctgtcagtccccgaccgaggaagactattattggttcccagatattgccgggaaagattggttagataccctacattttgctatgcgtgattttaaagatgaaagtttcatcagccagttcttatcgccaaaaataatgcgcgatttccgcctgtttaccgtgttggacgacgacaagaataactacctggagatttcggctattcataatgaagaaggttatcgtactatccgcaatcaattgtccgcacagtataacttgagcaaccatgagccaaacattcaggtatggaatgttgatctacgtggagaccgctctctaacactgcgttatatcccgcatgaccgagcgccattagataaaagccgccagcaagtgatgaagcatattcatcggctgtgggggtttgatgttcatatggaacaattgaatgatgatggcagtatcgatttgctcgacagcattccgcagaaaaccagtaagatttaa

SEQ ID NO: 41660 - DNA, 750 bp, Yersinia pestis
atgaatagagactggccttaccctcctatcgttgcccatcggggtggcggatcactggcaccggaaaatacactggccgcaattgatgtcggtgcgcgctacggccataagatgatcgaatttgacgccaagctatcgcaggatgggcaaatctttttactgcatgatgacaccctggaacgtaccagtaatggctggggggtagcgggtgagttgacgtgggaaaaactgattcagctcgatgcgggtgactggttcagcaaggcatttcgtggtgaacgcttacctttactctctgaagtagcggcgcgttgtgcgcagcacgggatggccgccaatattgaaattaaaccgacaaccggcacggatgctccgactggccgggcgattgcgctcgccgctcgcgcattgtggcaagggcagccgatcccccccctgctgtcctctttttccgttgacgcgctggccgccgcacaactcgctgttcctgaactaccacgcggattgttgctggataaatgggatgacaattgggcggcactgaccacacaacttgattgtgtttcgctgcatattaatcacaaacagctaacagcagaacgcgtggcgttactcaaagccgctgggttacgtattttggtctacacggtgaaccaacccgagcgggcgcgggaattactcaattggggcgttgactgtatctgtactgaccgtatagatttactgggttcggactttaccggctgctga

SEQ ID NO: 41661 - DNA, 1320 bp, Yersinia pestis
atgtttaataattccattcataaagtgtcgatctgtatcgcgctaacacttacgtttagtgccaatgcgatggcagtgactgaaattcctttttggcattcgatggaaggagaattaggtaaagaagtcgattcaattgcggatcgttttaaccagtcgcagcccgattataaaattgttcctgtttataaaggtaattacgagcagagtttggccgcaggtattgcggcattccgttcaggtaaggcaccggctattttacaagtctatgaagtcggtactgccaccatgatggccagtaaggcgatcaaaccggtttaccaagtcttcaaagatgccaatattgattttgatgagtccgtcttcgttccaacagtggcaggctattacactgattctaaaactgggcgtttattgtctcagccgtttaacagctcgacccccgtgctgtattacaacaaagaggctttcaaaaaagcgggcttggacccagaacaaccgccaaaaacatggcaagaactggcagcagataccgctaagctacgcgctgcgggttctagttgcggttatgccagcggttggcaagggtggattcaaattgagaacttcagtgcttggcatggtcagccgatagccagccgcaacaatggttttgacggcactgatgcggtattggaattcaataaacccttgcaggtcaaacatatccaattgctgtcggatatgaataaaaaaggtgatttcacctattttggccgtaaagatgaatctacgtccaagttctataacggtgattgcgctattaccaccgcctcttctggctccctcgccagtatccgccattatgccaagtttaatttcggtgttggcatgatgccgtatgacgcagatgcaaaaaatgcgccgcaaaacgccattattggtggtgctagcctgtgggtgatggatggcaaagataaagagacttacaagggtgtcgcagagttcttgcaatatttggtcaaaccagagattgccgctgaatggcatcagaagacgggttatctgcccatcacgacggcggcatatgaactaacgaaacaacaaggtttttatgagcagaacccaggcgctgatgtagcgacccgccagatgctgaataaaccgccattgccttataccaaaggcctgcgtctcggcaatatgccgcagatccgtaccgtggttgatgaagagctggaagctgtatggaccgctaagaagacgcctcaggcggcattggataactctgtgaagcggggtgatgtgttactgcgtcgttttgaacaagccaataaataa

SEQ ID NO: 41662 - DNA, 1275 bp, Yersinia pestis
atgggctatttcattgacagacgacttaacggcaagaataaaagcatggtgaatcgccagcgctttttacgccgctataagtcgcaaattaaacaatcgattgccgatgccatcaacaaacggtcggtaaccgatatagaaagtggcgagtcagtttcaatacctatcgacgacatcaatgagccaatgtttcatcaaggcaatggtgggttgcgccatcgagtgcaccctggcaatgaccactttatcaccaatgaccgggtagaccgccctcaaggcggcggtggcggcggtagcggtcaaggtaatgccggtaaagatggtgaaggtgaggatgagtttgtctttcagatctctaaagatgaatacctggacttactgtttgaagatctcgccctgcccaatctgaaaagaaaccagtataaacagctggcagaatttaagacacaccgagcgggatatacctctaatggcgtgccagccaatatcagtgtggtacgttcactgcagaattcactggctcgccggactgcgatgaccgccagcaaacggcgcgagttgcgtgaactggaggcggcgcttactgtgctggagaattctgagccagcgcaattgttagaagaagaacgcttacgcaaggcgattaccgagttaaagcaaaaaattgctcgggttccgtttattgatacctttgatttacgctataaaaattacgagcgtcgccctgaaccctccagtcaagccgtcatgttctgcttgatggatgtctcgggatccatggaccaagccacgaaagatatggctaagcggttttatattctgctctatctcttcctgagccggacctataaaaacgtcgatgtggtgtatatccgccaccatacgcaagccaaagaagtggatgaacaggagtttttctactcgcaagaaaccggcggaaccatcgtctccagtgcactgaaattgatggatgaagtggttcaagagcgttataacccggcgcagtggaacatttatgccgctcaggcttctgatggtgataactgggcagatgactcaccgttgtgccatgaattactggccaaaaagattctaccggtggtgcgttactacagttatatcgagataacccgccgcgctcatcaaacgttatggcgcgagtatgaagatctggaagagaaattcgacaactttgccatacaacatattcgtgaacccgaagatatttatcccgtcttccgtgagttgttccacaaacagaccgtagataattag

SEQ ID NO: 41663 - DNA, 1287 bp, Yersinia pestis
atgaaacagctcaacttcgttaatgccattatttccagctttgtgttactggtcctcgcctcgtttgtgatggggttgcagttgcagttagacggcacccgattggtggtacaaggtgcttcggaagtccgttggttgtggattggtgccggttgtctggtggttttttgcttccaactggtacgcccgctcatacaacaagggattaaaaaagtctcaggcccggcgtgggtgctgcccagttttgatggcaccacaccgcggcaaaaactcttggcagccgtggttattatcgccgcagttgcctggccatttttagtctctcgcggctctgtcgatatcgccaccctaacgctgatttacgtcatgttggggctgggattgaatgtcgtcgtcgggctatcaggcctgctggtactgggttacggcggtttttatgccattggtgcctatacttacgcgctgctaaatcactattacggtttaggattttgggaaagcctaccgctggccgggataaccgccgcgctatcaggcttcctgctaggcttcccggtactgcgtttacgtggggattatctggccattgtgacactgggctttggtgagattgtgcgtattttactgctcaataacactgagatcaccggggggccgaatggcatcagccaaatccctaaaccaacgctgtttggtttggaatttagccgcacggcgaaagatggcggttgggataccttccataacttctttggcctgacttacgatcccagccaccgcatcattttcctgtatctggtggcgttattattggtgatcctgacgctgttcgtcattaaccggttactgcgtatgccgctgggccgtgcgtgggaagcactgcgtgaagatgaaatcgcctgccgctcactgggtctcagcccgaccaaaattaagctgacggcatttaccatcagcgcggcctttgcaggttttgccggtaccttgtttgctgcccggcaggggtttgtcagcccagagtctttcacctttgttgaatcggctttcgttctggcgatagtggtgctaggcgggatgggttcgcagtttgcagtcattttggctgccgtgttgctcgttgtttcgcgcgaattaatgcgagatctcaacgcttacagcatgttgctattgggggcgttaatggtcttgatgatgatctggcggccgcaagggttattgccgatgaaacggccacaactgaagctgaaagttgctgatgtaaaggctaagcagggagagcaggcatga

SEQ ID NO: 41664 - DNA, 879 bp, Yersinia pestis
gtgaaaactggtgctccccgttttaagccaggtaaaattcttgatgccttgggtgcgatgcaaaatagcctgactcgttctgctcagcgtattgctgcgtatattttggcgcaaccggctcaggttacccaattatctattgctgatctttcggcactcacacaggccggtgaagcgaccattattcgtttctgtcggacactgggttataaagggtttcaggatttcaaaatggacctggccattgaagtggccacccgccataacagtgaaaacagcctgttagatgccgatgtccaagagggtgacgatacgctggcgatcggcagcaaattacaatccgctatcaataatgtcttatctgaaacacttaatttgctttctattgagagtgttgaacaggtggtcaaagtgctgcgccctgcggatcgcatctgtatttttggtgttggctcctcggggatcactgcggaagatgccaaaggcaaactaatgcgcatcggcctgcgggttgatgctgcgacaaataatcacttcatgtatatgcaagcctctcttatgaacccgggtgatgttgccattggtatcagtcattcggggacctcggctgaaactgtgcaagcgctcaaattggcaaaagaggcaggggcgacgacagtagcgttgacgcataatatggggtcacggatcactgaattagccgattatgtcctgatcaatggtaaccggcaggggcagttgcagggggattccatcggcacaaaaatcgcacaactgtttgtgttggatctgatttacgccttattggtcaaagctgatccggcgcaggcggagagtattaaacgtaaaacgacgcaagcggttagccaaaatgggtga

SEQ ID NO: 41665 - DNA, 1005 bp, Yersinia pestis
gtggaatatatgactatcaaagtaggtatcaacggttttggccgtatcggtcgcattgttttccgtgctgctcaggaacgttctgacatcgaaatcgttgcaatcaacgatctgttggacgctgattacatggcatacatgctgaaatacgactctacccacggtcgtttcgacggtactgtagaagtaaaagacggccatctggttgttaacggtaaaaccatccgtgttaccgcagagagagatccggctaacctgaagtggaacgaagttaacgttgatgttgttgctgaagcaactggcctgttcctgactgacgaaactgcacgtaagcacatcgctgctggcgctaagaaagttgttctgactggtccatctaaagatgacacccctatgttcgttatgggcgttaaccacaaagcttacgcaggccaagaaatcgtttctaacgcttcttgtaccactaactgcctggctccactggctaaagtaatcaacgacaaatttggtatcgttgaagcgctgatgaccactgtacatgcgactaccgcaactcaaaaaactgttgatggcccgtctcataaagactggcgcggcggccgcggcgcatcccagaacatcatcccttcttctaccggtgcggctaaagcagtaggtaaagttattccagaactgaacggtaaactgacgggtatggcgttccgcgtccctactcctaacgtttctgttgttgacctgaccgcacgtctggagaaaccagcttcttataaagaaatctgtgctgcgatcaaagcggcttcagaaggcgagctgaaaggcgttctgggctataccgaagatgacgttgtttctaccgatttcaacggcgaaaaactgacttcagtatttgatgctaaagcgggtatcgcgctgaatgacaactttgtgaaactggtttcttggtacgataacgaaactggttactcaaacaaagttctggatctgatctctcacatctccaagtaa

SEQ ID NO: 41666 - DNA, 552 bp, Yersinia pestis
atggatgcgttggaactcttacttaaccgccgctcggcgtcccgtttaaccgctccggccccagccggtgaggtcttggaccatattattcacgcaggtatgcgagctccggaccatggtgccttgcagccatggcgctttgttctgattgaaaacgaagggttagtgcgttttagtcaattgttacaaaaagcggttcagcaagatggtgctgatgagacggtcttagagaaagcgaagcaggcaccttttcgtgctccgctgattattacggtgatcgcccatgtaactgagaatgccaaagtgcctaattgggaacaggttgtttctgccggttgtgcggtgcaagccatgcaaatggctgctttggcacaggggtttaatggtatttggcgcaccggttcttggacccaccacccagttgttcgtcaggggtttgcgtgtcgtgaacaagacgaaatagtcggctttttgtatctcgggacaccgcaattaaaatctgcaactaaaatcatgcctccagaccacagcgcttttgtccgctatttctaa

SEQ ID NO: 41667 - DNA, 1626 bp, Yersinia pestis
atggcaaaagaaaaaaaacgtggatttttttcctggctgggtcttggccgtcagagtgaagaaccagcagcagagccgctggcgactgaaaaagaaggcgttacagagcaagaagacgttattgaacaaaccggcgttattgagccaacagacgttattgagcaaaccgttgagcacgtcattagtgaaaaaacgactgaagctcccgcggagaatgcctttattgaggtagaactgcgcgagcaggtcgctgcggtaattcctactgagccgaataacgccataatgagtgagggcgtccctgacactttaccagagagggcggttgccgaatcagtagttgccgaattagtagagaccggtgacaacgcggccattgttcatgatgagattatcgagccaataacgcaggtaacggaagctggcggtgagctctctttagtaaaacctggcatcgagggtgataccactgaacagggcggccccacagacaatctgccaaaacggtcgttaacggaagacaaccttattattgatgttcccaccccgcaggcggtggtagaagaatcgcgggttgacgctgttgagcaacctaccgaaacttctgaagttgaagaagttgaagaagttgaagaagttgaagaagttgaagaagttgaagaaaaaattatcccggtagcggctcaagaacaagagcggccaaccaaagaaggtttcttcgcgcgtttaaaacgcagcttaatcaagactaaacagaatcttggctccggttttatggggctgttcagcggcaaaaagattgatgatgacttgtttgaagagctggaagaacagctcctgatcgccgatgttggtgtcgaaacaacccgtaaaatcattacttctctgacagaacataccagccgtaagcagttaaaagatgctgatgcgctgtacggcaagctcaaagaggaaatgtctgagattctgtctaaagttgacaagccattagatgttagcggcaagagtccgtatgtcattttaatggttggcgttaatggcgtgggcaaaaccaccactattggcaaactggcgcgccaattccaggctgaaggtaaatctgtcatgttggcggcgggtgatacattccgtgccgctgccgttgagcaattacaagtttggggtgagcgtaacaagattgcggttgttgcacagcataccggtgcagattccgcttcggttattttcgatgcgattcaggcggctaaagcccgtggtattgatgtgctgttggccgataccgctgggcgtttacaaaataaagcccacttgatggaagagctgaagaagattgtccgggtaatgaaaaaactggacggcgacgccccccatgaggttatgctgacactggatgccagtaccggacaaaatgcggtgagtcaggcaaaactgtttaatgaagcagtgggcctaaccgggattaccctaactaaactggatggtaccgccaaaggcggggtgatttttgccattgctgatcagtttgagatcccaatccgttatatcggtgtcggagaaggtatagaagatttgcggccatttaaggctgacgaatttattgaggctctttttgcccgagaggattaa

SEQ ID NO: 41668 - DNA, 1929 bp, Yersinia pestis
atgatgcgactgtttattgccgaaaaacccagtttagcgcgagcgattgcagatattttgccaaaaccgcatcgtcgaggtgatggattcatcgcctgtggtaatgatcaaatggtgacctggtgtgttggtcatttactcgaacaagcccagccggatgcttatgacagccgttatgcacgttggtcattagcggacttaccgatcattcctgaaaaatggcagctacaacctcgtccttccgtcagcaaacaactcaatgtgattaagcaactgttacagcaagccgatgaagtggtccatgctggcgacccggatagagaagggcaactgttagttgatgaggtgctggattatttgggattggccgcagagaaacggcaaaatgttcgtcgttgcttgattaacgatttaaacccacaggcggttgagcgtgcagtggagcgcttgcgttataaccgcgagtttatcccgctgtgtgtttctgcgttggctcgagccagagccgattggctctatggcatcaatatgactcgcgcctataccattcttgggcgcaatgcgggctatgacggtgttttatccgtcgggcgggtacaaacgcccgtattggggctggttgttcgccgtgatgaagagattgaaagcttcattcccaaagatttttttgaagttaaagcccacatagtgacgcctgcagacgaacgttttattgctctctggcagccgagtgactcctgcgaatcttatcaggacgaagaagggcgcttgttgcatcggccgcttgcagaacatgttgtcaatcgcataaccggccagcccgcgctggtgacatcctataatgataaacgggaatcggaaacggcaccgttgccattctccttgtctacattacaaatcgaagctgcaaaacgtttcggcctcagtgctcagcaagtattggatatttgccaacggttgtatgaaacgcacaaattgattacgtatccccgttcggattgccgatatctacctgaagagcattttgccgggcgtcattcggtgcttaatgccattagtcttcatcagtcagaccttttgccgcttgaggtcatggatagtgatcggcgcaaccgctgctgggatgataaaaaagtcgatgcgcaccacgctattatcccaaccgcacgtgccagcaaagtgaatttgacgacggatgaaggcaaagtataccggttggtggcacagcaatatctgatgcaattctgtccagatgcacagttccgtaagtgtgtgattgaattggatatcgctggcgggaaatttattgccaaggcacgctttttggccgaggcgggatggcggaccttactgggcagtaaagagcgtgatgaagagaacgaaggagcgccattgccggtggtagccaaaggggctgaattattatgcgaacgcggtgaggttgttgaacgacaaactcagccaccccggcctttcaccgacgccagtttattatcggcgatgacaggaattgcgcgtttcgtacaggataaagaactgaaaaaagttttgcgagccaccgatggcttgggtacggaagccactcgagcaggtattatcgaactgctcttcaagcgcacttttctctttaagaaagggcgttatatacatgccagccctgcgggacgcgcgttgattcatgcattaccggatattgcggcacggccagatatgacagcacattgggaatcaacgttgacacaaatcagtgaaaaaaactgccgctatcaagattttatgcaaccactggtgatgacattgcaggatttaattagtcaggcgaaacaaaatcgttctccacaggttttccgtgggttacccgtcggcccttcaggggcacccaagaaacgtaaaaaaatatcgtctaaggccaaggagagtaaatcatga

SEQ ID NO: 41669 - DNA, 2280 bp, Yersinia pestis
ttgaacaccaatagtaaaaaaacctaccttaacattgctatttcattcattctttacgcctcaacagcaatgaacgcaaacgccgattcatgtattgattatactgtcactgatatttgtgagcagagtaaatatgctgcgggtgaatttcataatattaagctgggtgatggtgtcactgctggtagcgaagatcaccattttgtctttaatggtgaaggatatgaattatacaattctaacgcgaatttctctgctcaaattgcctcaggtaccattcgctataccgaagtgaacaacagttactttactgtaaacgctcaccattttccggatgataccatctatgccggccgtgcagaaaataccacattgaatgatagcctgatgtgggtggcaacatcggctgatcagacactggctaaaggtaattcaatggtcgttgtttccacccaaatggccatggttgatcaaatttttgttacgacgttgaatgatggtagccttccatttgatcccgtcattaccaatagccgctatgaagatacgtcatatgaaatgttatggggtatgaaaaacgaggcaaaagggtgggataccaaagccacatcgcatgactccgtatttgttgatgccagcaagcagtctatcgaagccaatggtcacagcattggtgccacattttatggtagggccactcaggtggtcaaagctggcggtgagtcacaggatacccacttatttgatcacagttattcctgggtatatgccgaggctaaattaaccggtctgacggaggttaatgacgctgccactgtctatctgaatgccgcagcaactcaaggtgcttacgctgagaatgtcgttctcaacggcgaagatacaacattgatggtgcgcgcgagtctggataacaatgcctatgccacggtggataacctaatattgaatggcggtgaagtggttttccagcagagctctggcgaccaatatgcttcattaaacatcggcacactttccggctcgggctccttcctattcaatacctctattgctgaggggaaaggaaacttcgtgactatcgccaatgccagtggggaacataaggtgatagttaacgactctggccatgagatcacctcacctgatatgaccacattggacttgattcacgatctcagtggtgatgcaacattcacactggcctctatttctggagctaacatcattgaagtcgatggcggcacttacgtatatagcttgaatacctgggataattccgcacgagctggcggaaatctgtggtatttaggctcaggtttgaatacaggcactgagcttgaacccgaacctgaagagaaaacaaccccgtcaacggatgcggtgttgagtatggcctcatccaaccagtttattttcgatggtgaaatgcaaaatctgcgttttcgtaaaggggatttaaataataataaaggtgatggcgccagtgtttgggggcgttatttaaccaacaatactcgggtcaatgctgctcatgatgccgcttaccgtttgcagcaagatggctttgaaattggtgctgataaagtgctggaaatgtcttcaggtcaattagtcttgggtggttttacctcttatagcaataaccgagtgaaacatgctcgtggtggaaacagtacggttgatagttatagcttgggtgcctacggcacttatttcgataacagtggttattatgtcgatgccgtcgttaaagccaaccgttttaaaaactcactgaatgcccatatgaccaacggcggttcggtacaaagtgattataaccagaatgcaatcggtggctcactggaagccggttatcactacagcctgtcgaataattggttcgtagagccttatgttcgtaccagctattacacggcacaggataaagatattgcgctgaataatggcatgacagcgaatattgataataaccgctcagctaaaggtgaaataggtacacatctgggaacgaagattgacctgaataatggggctatcatccgcccttatgccaaagtcgctattgaacgagagttcatcaaatcaaataccgtgacgatcaatcaggttaacgactttaataatgatttatcaggacataccgcgaagtatggtttaggcatggatatcaacctgatgaaacagacttccgtttatgccgaagccaattaccgcaacgggactcatgtggagtcacctatcatggctaatatcggtttccggattaatttctaa

SEQ ID NO: 41670 - DNA, 465 bp, Yersinia pestis
ttgtcagaactgtgtccttgtggcagcatccttaattaccacgaatgctgcggcccctacatcctcggcactcaggttgcagcaaaaccggcaatattgatgcgctcgcgctattgtgcttatgtagaaaaaaatgtggattatctgattgctacctggcatccagactgtcatgcacaggagtggcgagaaagtatcattcaaggctttaccaagacggtgtggcatgggctaacagttattgctgagactcccggtcgccatcctgatgaagcttttgtggagtttattgcccgtttcaccgatgcagataatgcacagataacggcaatgcacgaacgttctcgcttcctacgtataaaagaacactggtactatattgacggtatccgcccctctttgggtagaaacgatacatgtctttgcggttcggggaaaaaacacaagaaatgctgtggccgttaa

SEQ ID NO: 41671 - DNA, 1347 bp, Yersinia pestis
atgaaggttacggtttttggtattggttatgtgggacttgttcaagctacagtgcttgccgaggtggggcatgatgtcctttgtatcgatattgatgctaataaagttgccgatttgaaaaaaggccgtattgctatttttgagccgggcttggctccgttggtcaaagaaaactatgaggcaggcagattacagttttcaacagatgcgcaagctggtgtggcacatggcgtcattcaatttattgctgtgggtacacctcctgatgaagacggtgctgccgatcttaaatatgtccttgatgtggccagtaccattggcacgtatatggactcacctaaggtcattatcgataaatctacagtgcccgtggggacagcggataaagtacatcaagttatacaagctattttggagcagcgcggtgagaagatagattttagtgtggtatcaaatcctgagtttttaaaagagggggccgcagttgctgattgtaaacggcctgaacgtattgttattggtattgatacggatgacagtggtgctctagagttaatcagtgaattatacgaaccttttaatcgaaatcatgatcgtatgctagtaatggatatccgtagtgcagaactgacaaagtatgctgcaaacggcatgctggcaacgaaaataagtttcatgaatgagattgctaatattgctgagcgattaggggctgatatcgaaaaagttcgacagggcatcggttccgattcacgtattggataccatttcatttattctggttgtggttatggggggtcttgtttcccaaaagacatccaagcattaattcgtactgcagaagataagggttataagccccagctattgcaggctgtcgagcaaatcaataatcagcagaagtataagttaactgaattcattaaaagtcattttaattcgcagttagctggaaaaacatttgctgtctggggattggcctttaagcccaacaccgatgatatgcgtgaggcaccgagccgtgtggtaatggaatcattgtgggaagccggggctacaattcaagcatacgatcccgaagcaatggatgagacgcaacgcatttatggtgcaagagatgatttgagattaatggggactaaagagtctgcattacagggagctgatgccttgattatttgtactgaatggcaaagttttcgtgctccagattttgatatgatcaagtcaaggttaaagcaccctgttatttttgatgggcgtaatttgtacgatccagaacgcctaaatagtcgtgggttcacttattatggaattgggcgtggtgtttcgattaatctatcatag

SEQ ID NO: 41672 - DNA, 591 bp, Yersinia pestis
atggctcaactttacttttattactctgcaatgaacgcggggaaatccacagcacttctacagtcctcatataactaccaagaacgaggtatgcgcaccttggtgtttacggctgagatagataaccgctttggtgtcggaacggtaagttcacgcattggcctctcttctcaggcccagctctataatagcgggacatcattgttatctattatcgccgctgagcaccaggacacacctattcattgtattctattggatgaatgtcaatttctgactaaagagcaggtccaggaactctgtcaggttgttgatgaattacatcttcctgttctttgctacggcctgcggactgattttctcggcgaattatttcccggtagtaaatatttactggcgtgggcggacaaattagtggagttgaaaaccatttgtcattgcggtcgtaaagcaaacatggttcttcgcctggatgagcaggggagagcggtacacaatggtgaacaggtcgttattggtggcaatgaaagctatgtttctgtctgccgccgccattataaagaagcaattaaagccgcctgctgttcgtag

SEQ ID NO: 41673 - DNA, 2460 bp, Yersinia pestis
atgcgagtgctgaaatttggcgggacatcagtggcaaatgccgagcgctttatgcgtgttgccgatatcatcgaaagtaatgcgcgtcagggacaagtggctacggtgttatccgctcccgcgaagataacgaaccatctcgttgccatgatcgataaaatggtcgcagggcaagatatctccccgaacatcagcgatgctgagcggatttttgctgagttattgcgtggattagctgatactcagccaggctttgattatgatcgcctaaaagccttggtcggccatgagtttgcgcaactcaaacacctgctacacggtatttcgttgttggggcagtgcccagacagcattaatgcctcaattatctgccgtggcgaaaaactctccatcgccattatggaggcgttatttcaggctaagggttatcacgttacggtgattaatccagtcgaaaaattgttggcgcagggccattatctcgaatccactgttgatatcacggagtctacccgccgtatcggtgccagcggtattccatctgatcacatcatcctgatggctggttttactgcgggtaatgataaaggtgaattggtggtgttggggcgtaatggctctgattattccgctgccgtgctggctgcttgcttacgggcagattgttgtgagatttggaccgatgtcgacggggtctatacttgtgacccgcgtaccgttccagatgccagattactgaaatcgatgtcataccaagaggcaatggagctttcctattttggtgctaaagttcttcaccctcgcactatcgctcctattgcccgcttccaaattccttgtctgataaaaaacacctctaacccgcaagcccccggtaccttgattggtggtgaaagcattgatgaggattctccggtcaaaggcattaccaacctgaataatatggcgatgattaatgtttcagggccaggaatgaaagggatggtcggtatggctgcccgcgtctttgcggtgatgtcgcgcagcggtatttcagtggtgctaatcactcagtcctcttctgaatacagcatcagtttttgtgtgccgcaaggtgagttattgcgcgcccgccgagcgctggaagatgagttttatctggagttgaaagacggtgtcttggatcctctggatgtgatggaacatctggcaattatctctgtggtcggtgacggtatgcgcaccctgcgcggtatttctgcccgtttcttctcggctctggcgcgcgccaacatcaatattattgctatcgctcaaggctcgtctgagcgctctatttctgtggttgtcaataatgatgcggtcactaccggggtgcgagtttgccaccagatgctgtttaacacggatcaagtcattgaggtgtttgtcattggcgtgggtggtgtggggggcgcattaatcgaacaaatctatcgccagcaaccgtggttgaaacagcgtcatattgatttacgtgtttgtggtatcgcgaattccaaagccatgttgaccaacgtgcatggcattgcattagataactggcgtcaggaactggctgaagttcaggagccgtttaacctgagccgcttgatccgtctggttaaagagtatcacttactgaacccggtcattgttgactgtacctcaagccaggcggttgctgatcaatatgctgatttcctgaccgatggcttccatgtggtgacgccaaacaagaaagccaacacttcatcaatgaattattaccgccaaatgcgtgccgctgcgacgaaatcgtgccgtaaattcttgtatgacacaaacgttggggcggggctaccggtgatcgagaacttacagaacctgctcaatgcgggtgatgaactgatgcgcttcaccggtattctgtccggttcactttccttcatcttcggtaagctagatgaggggatgtcattgtcagaggcaacacggcaagctaaggcgttggggtataccgaacccgatccacgtgatgatctctctgggatggatgttgcccgtaaattgttgattttggcccgtgaagcagggtacaaacttgagttggctgatatcgaggttgagtccgtcttaccagcaagctttgatgcttcaggtgatgtggatactttcctggcgcgcctgccatcattggatgctgaatttacccgcttggtagcgaatgctgcggagcagggcaaagtgctacgttatgtcggagtgattgaagacgggcgttgtaaagtgcggatggaggcagttgacggtaacgacccgttgtataaagttaagaatggcgagaatgcgttggctttctatacccgctattatcagccaattccgttggtgctacgcggttatggcgcaggcaatgatgtgactgccgctggggtgtttgccgatcttttacgcacattatcatggaagttgggagtttaa

SEQ ID NO: 41674 - DNA, 930 bp, Yersinia pestis
atggttaaaatctatgctccggcatcaattggcaatgtcagcgtcggcttcgatgtattaggtgcggcggtctcgccaatagatggcacattgctcggtgattgtgtcagcgtaacagccgcagagcgttttagcctgcataatgaaggccgttttgtcagcaagctgcctgatgatcccaaacagaatatcgtttatcagtgttgggaacgcttttgccaggaaatgggcaaagagatccccgtcgctatggtgctggaaaagaatatgccgatcggttcagggctgggttccagcgcctgttcagtggttgccggcctgatggcgatgaatgagttctgcggccaaccgttggataaagtcacattactcggcatgatgggggaactggaagggcgggtctcgggcagtattcatttcgataatgtcgcgccttgttatttagggggcatgcagctgatccttgagcaggaaggttatatcagtcaggatgttcctggttttagcgattggttatgggtgatggcctatccggggatcaaagtgtctaccgccgaagcgcgggcgattttaccggcgcagtatcgccgtcaggattgcatcactcatgggcgtaatttggcggggttcattcacgcttgtcacactcagcagccagatttagccgctaaaatgatgaaggatgttatcgcggaaccttaccgcactcaattgctgccaggctttgctgctgcacgacaagcggcacaggatatcggtgcgctggcctgtggtatttccggatccggccccacgttgtttgccgtctgtaacgaccaggcaaccgcacaacgcatggcgggctggctacaaaatcattacctgcaaaacgacgaaggttttgttcatatttgccgtctggataccgcaggcgcacgactactgggataa

SEQ ID NO: 41675 - DNA, 1290 bp, Yersinia pestis
atgaaactgtataaccttaaagatcataacgagcaggtcagcttcgcacaggcgatcaaacaaggcttgggcaaacagcaggggctatttttcccgttggagttgcccgagttcgaactgactgagatcgataaactgctggatctggattttgtgacccgtagtagccgcattctgtcggcttttattggtagtgaaattgcaccagatgtcttaaccaaacgtgtgcaggcagcttttgaattcccagcccctgttgcacaagttgaaaatgatatcgccgttctggagttgttccacggcccgaccttggcgtttaaagactttggcgcacgttttatggcacagatgctggccgaagttgctggcgatcaacccgtcactattttaacggcaacatcgggtgatactggtgcggcggtggctcatgcattctacgggctgaaaaatgttcgagtggttatcctttatccacgaggcaagattagtccgctgcaagaaaagctgttttgtactctgggcggtaatattcacacggtggcgattgatggcgattttgatgcttgtcaggcactggttaagcaagcttttgatgatgaagaactgaaaaccgcgctgagtttgaattccgctaactcaattaatatcagccggttactggcacaaatttgttactactttgaagctgtagcccagttaccacaagaggcgcgcaaccaactggttatctctgtaccaagcggtaactttggtgatttgactgccggtttgttggcaaaatctttagggctaccggtgaaacgctttattgctgccactaatgctaacgacaccgtgccacgctttttggttaacggccagtggcagccaaagccaactgtagccacgttatcgaatgccatggatgtcagtcagccaaataattggccacgtgtggaagagctatatcgtcgcaaaatctggcagttgaaggatttagggcatggtgcggttagcgataaaaccacaaaagatacgatgcgtgaattagctggtttggggtatatctctgagcctcacgcggcgattgcttaccgtgtattgcgtgatcagttgcaagatggtgaatttggcttgtttatcggaaccgcacatcccgcgaaattcaaagagagcgtagaggcaattctgggtcaggaattacctttaccaaaaccactggccgtgagagcgcaattaccgttgctatcccatgatttgcccgcagactttgcacaaatgcgggcatttttgatggcattgccgaagtaa

SEQ ID NO: 41676 - DNA, 954 bp, Yersinia pestis
atgaccgataaacttacttccctacgtcaaatcaccactgtagtcgccgatactggggatattgcggcgatgaaattgtatcagccgcaagatgcaacgactaacccatcgattattctgaatgctgcccaaatccctgaataccgtaaattgatcgatgaagctattgcctgggcgcgcgaacaaagcagcgatcatgctcagcagatcgttgatgcgacggataaactggcagtgaatattggtttggaaattctgaaactgatccctggtcgtatttctaccgaagttgatgctcgcttgtcctatgataccgtcgccagcgtggcaaaagccaaacgtctgatcaaactgtataacgaagccggtatcagcaatgatcgtattctgatcaaattggcttcaacctggcagggcatccgcgctgcggagcaactggaaaaagaaggtatcaactgtaacctgacactgttgttctccttcgctcaggcacgtgcttgtgctgaagcgggtgtgttccttatttctccttttgttggtcgtattcttgattggtacaaagccaatggcgatcaaaaagagttcgcaccaagcgaagatccaggtgttgtttccgtcaccgagatttaccagtactacaaaaaacacggttataagaccgtggtgatgggtgcaagcttccgtaatttgggtgaaatcattgagttagccggttgtgaccgtttgactatcgccccttcactgctgaaagagttagcagagagcgaaggcccggtagaacgtaaactggcttacaccggtgaaattcaggcgaagcctgctccattgactgaagcggaattctactggcagcataatcaggatccaatggcggttgataaactggcagacggcatccgcaagtttgctatcgaccaaggcaaacttgagaaaatgatctccgacttgttgtaa

SEQ ID NO: 41677 - DNA, 588 bp, Yersinia pestis
atgaatatattacgtataggtttagtctcagtttcagatcgggcatccagtgggatttatcaggataaaggtattcccgccttggaagagtggctgacgagtgcgttgaccacaccttttgaagtcgagactcgtcttattcccgatgaacaaagcctaattgaacaaacactctgtgaattagtcgatgagatgggctgccatttggtattgacgacaggtggaactggcccggcaaggcgtgatgtcactcccgatgcgacattggctattgcagatcggcagatgccaggttttggcgagcaaatgcgtcaaattagcctgcattatgtgccaaccgcaattttatcccgtcaggtaggtgttattcgtaaacaagcacttatcatcaatttgccggggcaacctaaatcaattaaagaaaccttagaaggcgttaaagacgctcagtctaacgtggtggtggctggtatcttcgccagtgtgccttactgcattcaactcttagatgggccttatatagaaactaatactgatgtggtagtggcttttcgcccaaaaagtgccattatcgatataaaagactaa

SEQ ID NO: 41678 - DNA, 2487 bp, Yersinia pestis
gtgagtgagagaaaaaatgatgttgcgatagcggcgttaccggtgagtgaagtgctcgacgagttgctatctgcattgcaatcctcatcgcaagtcctgcttcatgccccgaccggtgccggtaaatctacctggctgccgctacaaatcttgcaacaaagtcagtttcttaatagcgggtcaccgggccgcatcattatgctggagccacggcgactggcggcaaaaaatgtggcttaccgtttggcgcaacaattgggtgaattgcccggccagacagtaggttaccggatgcgcgcagaaagcaagatcgggccggatacgcgtctggaagtggtgaccgaaggtattttgactcggatgctacaacaggatgccgagcttcagggcgtgtcattggtgatccttgatgaattccacgaacgcagtctgcaagcagatttggcgctagcgttattgctggatgtgcaacaggggctgcgcgatgatctgaaactattaatcatgtcagccacgctggataaccagcgcctttctgctttgttaccctccgctccggccattgtctcggctgggcgcagtttcccggttgaacgcagttatcagccgctctccagccatgaacggttggaagagggggttgccagccgcgttaaacgcttgctaaatgaacagcccggttccttgttgctgtttttaccgggtgtcagtgaaatccatcgagtgatggaacggctgcatggcgaggtcgccagcgataccgatttgtgcccgctgtacggtgctttgccactcagtgaacagcaaaaagcgattcaaccggccgctatcgggcgacgtaaagtggtgctggcaaccaatattgccgaaaccagtttgaccattgagggcatccggttggtggttgatagcgggctggaacgggttgcgcgttttgatatcaaaaacggtctgactcgcttggtcactcagcgtatcagtcaggcgtcaatggtccagcgcgcaggccgtgccgggcggctagaaccgggtatctgttggcatctgtttgccaaagagcaggccgaacgggcggcggaatacagtgaaccggaaatactgaacagcgatttatgcggtctgtggttggaattactgagttggggatgtcaggatgcggcgcaactctgttggctcgatcaccccccggcagcggcactggctgtggcccgtgatttattagggcgattggatgccattgatgaccaagggcagttgacggccacggggcgcaccatggcaacgctgggctgcgaacctcgattggcggccatgttgtgctttggggcggggcatagccccgatgcactggctacggctgcgttgttggcggctattttggaagagccacctcgctctggccaaatagatttacatgactggctcagccggccgcagcctcactggcaacggcgcgccagacaactgacacaaaggcttaacgcgcgcggaggcagtgtagaccatgcgctggccgcacaattgctggcgctggcttatccggataggatcgcacagcagcgggggcaggatgggcgctacctgctggctaacggcatgggggctgccatggcgcaggatgaggcgctatcgcgatccccctggctagtggcggttgggctactgcaaaaccacagcgggccggatgcacgtattttgctggccttgcccgttgacatcgaacagttggtgacgtgtctgccgcggcaagtggaagagcgcacggtggtggagtgggatgatgaaaaaggtacgctgcgagcctggcggcgctggcaaattgggcgtttgatcctgcgggcgcagccattggctaaaccggatgacgcggcattgcagcaggccttgctaaactgggttcgggagcaaggattacagatacttaactgggatgaacctgccgagcagctacgtacccgcttacaatgtgctgcccgttggttgccagaggcgccatggcctgcggtcgatgacgacagtttgcaggataaactggcgctctggttgcagccgtcattatccggtgttcgtgatctacgtgggcttcggcaggtgaatattgctgaagccttaacccgcttgttagattggaaacaacgccaacggctggataccgaactgccaactcattacactgtgcccactggcagtcgcctgccaatacgttattatgtcgaccggccgccggtgttggcggtacgtttgcaggaggtttttggtgaacagcaaagccctatgctggcgagcgggcgggttgcggtggtgcttgaactgctttctcccgcccatcggccattacagattaccggcgatttagcggcattctggcagggggcgtatcgtgaggtgcaaaaagagatgaaagggcgttaccccaaacatgtctggcctgatgacccggcacatacccggccaacccgcagaaccaaaaaatatcaagataagtga

SEQ ID NO: 41679 - DNA, 456 bp, Yersinia pestis
atgcaagaagggcaaaaacgtaaaacctcgtccttgagcattctcgccatcgctggggtagagccttaccaagagaagccaggcgaagagtatatgaacgccgcccagctgtcgcatttcaagctgattcttgaagcatggcgcaatcagctcagggatgaagtagatcgtactgtatcgcatatgcaagacgaagctgctaacttccctgatccggtggaccgtgccgcgcaggaagaagaattcagccttgaacttcgtaaccgcgaccgcgagcgtaaactgattaaaaagatcgagaagacgctgaaaaaagttgaagatgacgattttggtttctgcgagtcttgtggcgtagaaattggtatccgtcgtcttgaggcacggccaactgcagatttgtgcattgactgtaaaaccctggccgaaatccgcgaaaagcagatggcaggctaa

SEQ ID NO: 41680 - DNA, 966 bp, Yersinia pestis
gtggttcaacaagcggtcattcaacgatcagctaaccaacgagcaacgaatcaaccaacagaatatattggccgttttgcaccttcgccatcaggggatttgcattttggttcactgattgccgcactcgggagttatctgcaagcccgtgctcaaggcgggaagtggttagttcgtattgaagatattgatcctccccgtgaagttcctggcgcggcctcacgtattttagcggccttagagcattatggtctccattgggatggcccggttatctatcaatcacagcgccatgaagcgtatcgggccacgctcaactggctggaacagcagggattaagctattactgcacctgcacccgtagccgcatccaccagctcggcgggttctacgacggctactgccgtgatcgtcatttacccgctagcggcgcggctatccgtttgcggcagactcagccggtttacgctttttatgataaattactcggcgaactgcatgctcaccctgcgttggcacaagaagattttattatccgtcgccgtgacggtctgttcgcttataatctggcggtggtggtggatgatgcttttcagggcgtgaccgaaattgtacgaggtgctgatttgattgagccgacagtgcgccagatagcgctctatcagcagttgcaacaccctgtccccggctatatacacttgccgttggcgctgaataatcaggggaataagctctccaagcagaatcatgctcctcccttgcctaatggcgatccacgtcctattttaatcgacgcattaaagtttttacgccaaccgctaccggaatactggcaagatcttgatttgtatttattattacgttatgccgttaagcattggacgttggtgtcaatcccactccagggggcaataaccccacagaaaacacaacggcattctcaaagtaagtatggtgagctatga

SEQ ID NO: 41681 - DNA, 1323 bp, Yersinia pestis
atggcgattattccgcgggatcagcacaatatctcccgcagagatatcagtgacaatgcactgaaggttctctatcgcctgaataaatcaggttacgaagcttatctggtgggcggcggtgtccgcgacctgctgctgggcagaaaacccaaagatttcgatatcaccaccagcgccacccctgaacaggtgcgaaaactgttccgtaactgtcgtttggttggccgccgcttccgtttggctcatgtgatgtttggccctgaaattattgaagtagcgactttccgtggccaccacgagcagcaacaagcagaagacagcgataagaactcctcccagcaggcgcaaaatggcatgttgctgcgtgacaacatctttggctccatcgaagatgatgctcaacgccgtgatttcaccattaacagcctctactacggtatttctgattttgcgctgcgtgactacaccggcggcttacgtgatctgaaagaaggtattattcgtctaattggcgacccagaaacccgttaccgtgaagatccggtacggatgctgcgtgcggttcgttttgccgcaaaactggatatgtcaatcagcccggaaacggcagagcctataccgcgtctggcctcactgttgcgcgaaatcccgcccgcccgcctgtttgaggagtcactcaagctgctgcaatccggctacggctataaaacctatttaaaactgtgcgaataccagcttttccagccgctattcccactgattgcccgtaattttactgaacagcatgattcgccaatggagcgtattctggttcaggtactgaaaaataccgaccaccgtctgcataatgatcagcgggttaatcctgccttcttatttgcggcgatgctgtggtatccgctgattgaacatgcgcagaagttaacgcaggaaagcggcttggcctattacgatgcatttgcattggccatgaatgatgtactggacgaagagtgtcgctcactggcgatccctaaacgtatcacctcactggtacgggatatctggttgttacaactgcgtctgtcacgtcgtcaggggaaacgtgcccataagctgatggaacaccctaaattccgggcggcttacgatctgttactcctacgggcagaagtggaaaaaaatcacgagctgcaacgtttggcgcagtggtggggcgaattccaggaagccactcccacgcaacagaaatccatgctgaatacattaggtgctgatcctgcgccacggcgttcacgtccacgccgcccacgcaagccagtaccccgtaaagaaggggtataa

SEQ ID NO: 41682 - DNA, 480 bp, Yersinia pestis
atgatccgggtctatatcgcgctgggtagcaatttggccatgccactacaacaggttagcgcggcacgggaagccttggcgcatctgccgcgtagccggttagtagcgtgttcgccactttaccgcaccaagccattaggcccacaggatcaacccgattttctcaatgccgtggtcgcactggatacatcgttgccaccagagcagttgctggatcacacacaagcgattgaacgtaaccaaggccgggtgagaaaagagcagcgctgggggccacggacgctggatctggatattatgttgtatggcgatcaggtgataaaaactgatcgcctgacgattccgcattatggtctgaaagcgcgtgaatttatgctctatccactggcagatatcgccccagatcttattttccccgatggcgaatccctatcagaatgccttaagcgggtcgataagaacggcttggttctctggtaa

SEQ ID NO: 41683 - DNA, 801 bp, Yersinia pestis
gtgatgaaaaccaccaccatgagccaattacgccaatggaaacaagagaaacgtaaattcgcaacgctgacggcctatgatgccagttttgcccagttatttgccgaacagggtattcaggtgctattggtgggggattcgctcggtatgacgttacaagggttcgattccacgctgccagtgaccgttgccgatatggcctaccatacccgtgcagtgcgccgtggtgcgcctcattgcctgttattggccgatatgccattcatgagttatgccacgccagaactggcctttacccacgcggcagagctaatgcgggccggagccaatatggtcaaactggaaggtgggagctggctgtgcgataccattcgcatgttggcagagcgcgcggtgccggtttgtgggcatctggggctcacgccacaatcggtgaatattttcggcggctataaagtacagggtcgtgaagaagtggcggccaatcaactgttgcaagatgctattgccctggaacaggcaggggctcaactgttggtactggaatgcgtgccggtagaactggcacagcgggtgaccgaagagttaaccataccggttattggtattggtgcggggaatgtcactgacggtcagattttggttatgcatgatgcactcggtattaccgggggtcatacgccaaaattcagtaaaaactttttagcacacagtgcgggcgatattcgtgccgccattaagctctatattgaagaagttgagggggggatttatcctgctgaagagcatacattccagtaa

SEQ ID NO: 41684 - DNA, 2676 bp, Yersinia pestis
atggctgtaacgaatgtcgctgaacttaacgagctagtagcacgcgtcaagaaagcccagcgcgagtatgccaacttttcgcaagagcaagttgataaaatcttccgtgctgcagcattagccgctgcggatgcccgtattccactagccaaactggctgtaacagagtctggcatgggtattgttgaagacaaagtgatcaaaaaccactttgcttctgaatatatttacaatgcttataaagatgaaaaaacctgtggtattttgtgtgaagataagaccttcgggacgatcactatcgcagaacctattggtctaatctgcggtatcgtaccaaccactaaccctacgtctaccgctatttttaaagcactgattagcttgaagacacgtaacggtattatcttctccccacatccacgcgctaaagacgcaaccaataaagctgcggatatcgtgcttcaagccgctatcgcagcaggtgcgccagcggatattattggttggattgatgctccaacagttgaattatctaatcaactgatgcatcacccagacattaatcttattctggcaaccggtgggccaggtatggttaaagcggcctatagctctggtaaaccagccatcggcgtaggtgcgggtaatacgccagtcgtcgttgacgaaactgcagatattaaacgtgttgtcgcatctattctgatgtctaaaacctttgataacggtgttatctgcgcgtcagagcagtccatcatcgttgttgactcggtttacgatgcggttcgcgagcgttttgcttctcatggtggctacctgttacaaggtaaagaattgaaagccgttcaggatattatcctgaaaaatggcggtctaaacgcagccatcgtgggccagccagcaactaagatcgctgagatggctggcattaaagtgccaagtaataccaagatacttatcggtgaagtcaaagttgtcgatgaatcagagccatttgctcatgaaaaactgtcgcctacactggcaatgtatcgtgctaaaaactttgaagaagcggttgaaaaagcagagaaactggtggagatgggcggtatcggtcatacctcttgtctgtacaccgaccaagataaccagactgcacgcgttaaatatttcggcgataaaatgaagaccgcccgaattctaatcaacacccctgcctctcaaggtggtatcggtgacttgtataacttcaagctggcaccgtctctgacgctgggttgtggttcttggggtggtaactccatctctgaaaacgtcggtccgaaacacttgatcaacaagaaaactgtggctaagcgagcagaaaacatgttgtggcataaactaccgaaatctatttacttccgtcgcggctctctgcctatagcgttggaagaagtggcaactgacggtgcaaaacgtgccttcatcgtgactgaccgctacttgttcaacaacggttatgcagaccaagtcaccagcgtactgaaatctcacggtattgaaactgaagttttcttcgaagtagaagctgaccctaccctgagtatcgtgcgtaaaggtgcagagcagatgaactccttcaagccagacgttattattgctctgggtggtggttcaccgatggatgctgcaaaaatcatgtgggtaatgtacgaacatcctgaaacgcatttcgaagaactggcattgcgttttatggatatccgtaaacgcatttataagttcccgaaaatgggtgtaaaagcgaaattggtcgctattacaaccacatcaggtaccggttcagaagtcaccccgtttgctgtggttactgatgacgcaacaggccagaaatatccattggcagactatgcattgacaccagatatggccattgttgatgccaaccttgttatgaatatgcctaagtctctgtgtgccttcggtggtctggatgcagtaacgcacgcactggaagcctatgtgtctgtactggctaatgaatactctgacggccaggcgctgcaagcactgaagctgttgaaagaattcttgccagccagctacaacgaaggggctaaaaacccagttgctcgcgaacgtgtacataatgcagcaacaattgccggtatcgcctttgctaacgccttcttgggtgtctgtcactctatggcccacaaactgggttctgagttccatatcccacacggcttggcaaatgctatgttgatttctaacgttattcgctacaacgcgaatgacaacccaacaaaacagactgccttcagccaatatgaccgcccacaagcgcgtcgtcgttatgcagaaattgcagatcatttggggctgagtgcaccgggcgaccgtactgcacaaaaaatccagaaactgctggcttggttagatgaaatcaaagctgaactgggtatcccggcatcgattcgcgaagcgggtgttcaggaagctgacttcttagctaaagtagacaaattgtctgaagatgcatttgatgaccagtgcacaggtgctaacccacgctacccactgatctcagagctgaaacagatccttatggatacttattacggtcgcgaatatgttgaagagtttgaccgcgaagaagaagtcgcggcagctactgcgcctaaagctgagaaaaagaccaaaaagtaa

SEQ ID NO: 41685 - DNA, 1176 bp, Yersinia pestis
atgcatatcacggctaaaccaaccagctaccagtgtaatttaaagtgtgattactgcttttatctcagtaaagaaaacatttttcagcacaaaggttggatgactgaagaaacccttgaaacatttatcgagcgatatatcagtgcatcggggcatgatgtgtatttcacttggcaagggggtgagcctaccatggctgggctggatttctttgagaaagcgatacagtatcagaaccgctataaagggactaaaaaaatacacaacgctttacaaactaacggtattttattagatgatgcatggtgtctctttctaagagaaaatcattttttagtcggtgtgtctattgatggccctaaagagttacacgatcgctaccgtgtgactcgctcaggcaaaggatcgtttgataaagtgatggcaggtattgagcaactcaaaaaacatcaggtagagtttaatacattaaccgtgataaatcgtatcaatgtaaaatacccccttgaagtttatcgaacgttaaaatctatcggtgctaaacatatccaatttattgaactgttggaaacaaccgagcctaatattgatttttcaaatcaaaaaagcacgtttgaacttattgagttcactgtccctgcggttgattatggccatttcatggcggaggtcttcaaagaatgggttcgccatgatgtaggaactctctttattcgccagtttgagtcttttgtcagccgatttattggcaatgggcacacgagctgtgttttccaaaaatcgtgcaaaaataattttgtgatggagtccaatggtgacatttatgaatgtgatcactttgtctaccctgagtataaaataggcaatatttaccacgataaattggattcgttggcgagcgataaattatccgcgcaaaaagaggtgctatctgagtcatgccgtaagtgtatgtataaagccatttgctatggcggttgcccaaaacataggattgatcaggacagcgatgggatgaaatcctatttttgcgcagggtataaaatactcttctcggttatggtgccttatatgaatgcgctggctgaattagaaaaaaatggtattccattggataagatcatgggtatcgtcgatgacattgaatgtggaataaaatcacaacagcagcattaa

SEQ ID NO: 41686 - DNA, 1002 bp, Yersinia pestis
atgacgactatcaataatcactctactgttcagtcctctgtattgttggaggttaaagatctgacggtgaccttcggtacatcagatggtgatgtgactgcggttaacgcacttaattttgccctgcgagcgggtgagacacttggcattgtaggcgaatctggctcaggaaaatcgcagactgccttcgctttgatggggctgttggccagtaatggtcggataggcggctctgcgaaatttaatggccgtgaaattcttaatctgccagaaaaacaattgaatcgtttgcgggccgaagagatcgctatgattttccaagacccaatgacgtcgctgaacccttatatgcgagtgggtgagcagttaatggaagtactgcaattacataagaaaatgagtaaaagcgaagcatttgaagagtctatccgtatgcttgatgcagtaaaaatgcccgaagcacgtaaacgtatgcgcatgtatccacatgaattttctgggggtatgcgtcagcgggtcatgattgcgatggcactactgtgccgccctaagttattgattgctgacgaaccgacaacggcattagatgttactgttcaggctcaaatcatgacgttgctaaatgaacttaaaagagagttcaacaccgcaattatcatgatcacccatgacttgggggtcgttgcagggatttgtgacaaagtcttagtaatgtatgcgggccgaacaatggaatacggccaagcacgcgatattttttatcatccaagccacccctattcgataggtttattgaatgccgttcctcgccttgatgctgaaggtgaatctctgataaccataccgggtaatccacccaatttacttcgcttgcccaaagggtgtccattccagccccgttgccaatatgccatggatcgttgttcaacggcacctgtgttggaacattttggtgaaggccgcttacgcgcctgttataagccggtaggggaattagtatga

SEQ ID NO: 41687 - DNA, 1911 bp, Yersinia pestis
atgggtaaaattattggtatcgacttgggtactaccaactcttgtgtagcaattatggatggtactaaagcacgtgtgctggaaaacagcgaaggtgatcgcacaacgccttctatcatcgcttatacccaagatggtgaaactctggttggtcaaccggctaagcgtcaggctgtcactaaccctcaaaatacactgtttgccatcaagcgtttgattggccgtcgtttccaagacgaagaagcacagcgtgataaagacatcatgccgtacaaaattattgctgcagataatggtgacgcttggctggaagttaaaggccaaaaaatggcaccgccgcagatctctgctgaagtgctgaagaaaatgaagaaaacggctgaagattatctgggtgaaccagtaactgaagcggttattaccgtaccggcttactttaacgatgcacaacgtcaggcaactaaagatgcgggccgtatcgccggtctggaagtaaaacgtatcatcaacgaaccaaccgcagccgcactggcttacggtctggataaagaagtgggtaaccgtactatcgcggtctatgacctcggtggtggtactttcgatatctcaattatcgaaatcgacgaagttgatggcgaaaagaccttcgaagtattggcaaccaacggtgatacccacttgggtggtgaagacttcgatagccgtttgatcaactatctggttgaagaattcaagaaagaccagggtatggatctgcgtaccgatccactggcaatgcagcgtttgaaagaagccgctgaaaaagcaaaaatcgagctgtcttctgcgcagcagaccgatgttaacctgccgtacatcacggctgatggcagcggtccaaaacacatgaacattaaagtgacccgcgctaaattggagtcactggtagaagatttggtaaaccgctctattgaaccactgaaagtggctctgcaagatgctggtttgtctgtttccgacattcaggacgttatcctggtgggtggtcagactcgtatgccaatggttcagaagaaagtggctgacttcttcggtaaagaaccacgtaaagatgtgaacccagatgaggcggtagccattggtgccgctgtgcagggtggggttctgtctggtgaagtgaaagacgttctgttgctggacgttactccactgtcactgggtatcgaaaccatgggtggtgtgatgactccgcttatcactaaaaacaccactatcccgaccaagcacagtcaggtgttctctactgctgaagacaaccagtctgcggtaactatccacgtgctgcagggtgagcgtaaacgtgctcaggataataaatctctgggtcagttcaatctggatggtattcagcctgcacctcgcggcatggcgcaaatcgaagtcaccttcgatatcgacgccgacggtattttgcatgtgtctgctaaagacaagaataccggccgtgagcagaagatcaccattaaggcctcttctggtttgaacgaggaagagattcaaaaaatggtacgtgatgctgaagcaaacgcagaagctgaccgtaagtttgaagaactggttcagacccgtaaccaggctgaccatctgatccacgggactcgtaagcagttggaagaagccggtgataaattaccagcagaagacaaaaccgctatcgaagaagcaatgaaaggcttggaagctgcactgaaaggtgaagataaagctgaaatcgaagcgaaaactcaggctctggtacaggtttccgggaaattgctggaaatggctcaacagcaacaagctgccgcaggcggtgatgctggcgataccagtgccaagaaagaagacgacgttgtagacgccgaattcgaagaagtaaaagacaaaaaataa

SEQ ID NO: 41688 - DNA, 939 bp, Yersinia pestis
atggagctaattcgcggtatacataatatccgggcacgccaccatggttgcgtgctgactatcggtaactttgatggtgtccaccgtggacatcaggctttattagagcaactaaagcgcgaggggcagcgtttaggcctacccgttatggtgatgatatttgaaccgcaaccactggaattgtttgcagcagataaagcacccgcccgattgacacgcttgcgtgataaagccaaatatctggctcaggctggggttgattatttattgtgcgttaagtttgacccacgttttgccgccaatacagcgcaagcttttgttgctcagttgctggtagagaaattgggtgttaaatttttaacggtaggtgatgacttccgctttggcgcagggcgccagggggattttcaactactgcagcaagctggtgctgagtttggttttgatgttatcagcaccgacagtttttgtgatggcggcttgcgaatcagcagcaccgcgattcgtcaggcactgcatgatgatgatttggtgttggccgaaacgttattgggtcacccgtacagtatttcgggccgagtggttcacggtgatgaactggggcggacgataggtttccctacggcgaatttgccgttaaaacgtttagttgctccggtgaaaggggtgtatgcagtagatgtgtatggtttgggttcaacgccattgtatggtgtcgcgaatatcggcacccggcctaccgttgctggcgtccgtcagcagcttgaggttcatctgcttgatgtaactatggatctttatgggtgccatattgatgtggtgctacgcgcaaaactgcgcaacgaacagcgttttgcttcgcttgaggccttaaagcagcaaatcgccaacgatgtggtgacggcccgaacatttttcgggctaaagacaccggtttaa

SEQ ID NO: 41689 - DNA, 2817 bp, Yersinia pestis
atgagtgactacaagaataccctgaacttgcctgaaacagggttcccgatgcgcggcgatctggctaagcgtgaacctgacatgctgaaacgttggtatgagcaggatttatacgggattattcgtgcggccaagaaaggtaaaaagacctttattttgcacgatggccccccttatgcgaacggcaacattcatattggtcactctgttaacaaaattctcaaagatattattgttaaatcaaaaggaatggctggatatgattcaccgtatatccccggttgggattgtcatggtttgcctatcgagctaaaagttgaacaattaattggtaagccgggtgagaaagtcagcgctgcagagttccggactgcttgccgtaaatatgccgctgagcaggttgaaggccagaagaaagattttattcgtctgggcgtgttgggtgattgggaccatccttacctaacgatggatttcaaaactgaagccaatattatccgcgcattaagcaaaatcattgataacggtcatctgcataaaggtgccaaacctgtgcattggtgtaccgattgcggttcgtcgctggctgaagcagaagttgaatattacgataagacgtcacaatctattgatgtgcgttttaacgcggttgatacggcaactgttgcggccaaatttggtgtatctgctgttaacggcccaatctcactggttatctggactaccacgccatggactctgcctgctaaccgggctatttcactgaatgccgaatatctttaccagttggttcaggttgagggcgagtgcctgattctggcagccgatctggttgagagcgtcatgaagcgcgcgggcattactcagtgggccgtgttgggaagttgcacaggctccgatctggaactgttgcgctttacccatccctttatgggctttgatgttccagccattttaggtgaccacgttacattggatgccggtaccggtgcggttcacaccgcgccaggtcacggcccggatgactttgttatcggccaaaaatatggcttagaagtggcgaaccctgtcggtccaaacggttgctatctggcgggtacgtatccaacgctggacggcctgtttgtgtttaaagccaacgatgtggttgtcgagttgctgcgtgagaaaggcgcactgctgcacgttgaaaaactgctccacagctacccatgctgctggcgtcacaaaactcctattatcttccgtgcaacgccgcagtggtttatcagcatggatcagaaggggttgcgtaagcagtcacttcaagagatcaaaggcgtgcaatggatcccggattggggtcaggcgcgtatcgaaaccatggtagcaaaccgcccagactggtgtatctctcgtcagcgtacttggggtgtgccgatgtctctgttcgttcacaaagagaccgaacaacttcatccgcgcagtattgaactgatggaagaagtggccaaacgtgttgagcaagatggcattcaagcgtggtgggatctggatccggcagagattttaggtgccgatgccgcagattatgtcaaagtgccagatacgctggacgtatggtttgactctggttccacccattcttcggtcgttgacgtccgccctgaatttgggggtcatagcccggatatgtatctggaaggttctgaccagcaccgcggctggtttatgtcttcattgatgattgctacggcgatgaaaggtaaagcgccttaccgtcaggttctgacccacggttttactgtggatggtcagggtcgcaaaatgtccaaatccattggtaacaccatcagcccacaagatgtcatgaacaagctggggggtgacattctgcgcctatgggtggcatcaaccgactataccggtgagattgctgtttctgatgaaattctgaaacgctctgcggactcctatcgtcgtatccgtaataccgcacgcttcctattagctaacctaaacggctttgatcccgcacagcatcaagtgaaaccggaagagatggttgtagtcgatcgctgggcggttggccgtgcgcaagcggctcaggcagaaattatggaagcgtatgagaattacgatttccatttggtagtgcaacggctgatgcagttttgctcggttgagatgggatccttctatctggatatcattaaagaccgtcagtacaccgcgaaaggtgacggcattgcacgccgtagctgccagacagcactgttccatattgccgaggcgttggtgcgctggatggccccaatcatgtccttcactgcggatgaaatctggaatcatctgccgggcgagcgtcaacaatatgtcttcactgaagaatggtatgacggtctgtttggtttggcgggcaacgaaagtatgaatgatactttctgggctgaattgttgaaagtgcgcggcgaagtgaacaaagtgttggagcaggcccgtagcgataaacgtattggtggctcattagaggccgcagtgacgttatacgcagagcctgaactggctgctcgtttgaacagtttgcaagatgaattgcgctttgttctactgacttctgccgctaaagtggccgcttatgctgatgcgggcaatgatgctcagcaaagtgaattaattgccgggttgaaaattacctttaataaggctgacggcgagaagtgcccacgttgctggcattacacgcaagatgtcggtttggtagcagagcacgctgaactgtgtgggcgctgtgtcactaacgttgctggtgatggtgaggagcgtaagttcgcctga

SEQ ID NO: 41690 - DNA, 822 bp, Yersinia pestis
atgactgattcaacaattcgtattgctattgtcggcgcgggtggacggatggggcggcaattaattcaagccgttacgcagatggaaggcgttgtcttaggggcggctatcgagcgtaaagggtccacgttggtaggcagtgatgcgggtgagctggcgggtgttggcttgttaaatgtcattgttggcgatgatttatcccaacttactgataattttgacgtactgatcgactttacccgcccagaaggtacgttggaacatttagctatttgccgtcagcatcggaaagcgatggtgattggtaccacgggttttgatgaggcaggtaaagcggccattagtgaggctgcggcagacattggtattgtgttcgcagcgaacttcagtgttggggtgaatgtggtactgaaattgctggaaaaggcggcgaaagtcatgggcgattataccgatattgaaattatcgaagcccatcaccgccacaaagtggatgcaccatcaggaacggcgctggcaatgggtgaggcgattgctgatgctatggggcgctccttgaaagattgtgcagtttatagccgtgaaggctataccggtgagcgtaaaccggggaccatcggtttcgcgaccgtgcgtgctggcgatattgtgggtgaacacacggcaatgtttgctgatatcggcgaacgggttgagatcactcacaaagcgacgagccggatgacttttgcccatggtgcggttaagtctgccatttggcttggtaagcatgataatggcttgtttgatatgcgtgatgtactgaatcttaacgaactttaa

SEQ ID NO: 41691 - DNA, 2100 bp, Yersinia pestis
atgacgaatccaatcgttgccagtcaaccacagatggcgcagcaggggatcaggcgtttgctgatcctcagtggtcaggccgattggtcacggcagcaggcaataatgctacgccagcatctggcaggcgattggctatggttgagcgagcagcctcccgaaggcgtcaacagtatcagtccaacagcggcaagaactctgttggggcaggaaaacttacacggcgtatttgatgcaaccgatgggttaaatatagaagcgctagccatcgtcgcggggaccttgcgggcggggagttggctgctattgctggtgcctgagtgggatgactggccgcagcggccagataaagacagtttgcgctggagtgagcaacccgctccgattgtcacagcgaactttatccgccacttacagcgccagtttttggctgatcccgatgtggtgctgtggcagcaagatcggccactcatattaccagcggttggttctcgcccatgttggcagcagccagacggttcaccaaccgcacagcaacagcatattcttcagcgtctgatgcaggcagatagcggtatttgggtactgacagccgctcgtgggcgcggtaaatcgacacttgccgggatgttagtcacccactggcagggggcgtgttgggtgaccgggccgggtaaagcggccactcaagtgcttaatcaacaagcaggggagcgggccagattttgggcaccagacgcactgttggattattgccaacggcatgatgtcagtgatattgactggttgttgattgatgaagcggcggcgatcccgacaccgctgttatcggcattattggcgtatttcccccgggcattattgaccaccacggtacagggatatgagggcacggggcgtggttttttactgaaattctgcgcgacactgggcgattggcatcatttgacgctgacggatcctatccgctgggccacggatgatcccttggaacgagtgatggataatgccatgttgttccatgatgaattactcggcaatcatcccctaccaaagcggccacctgtggcgcagatcgaaatccccctttatgaacaacgcgattggcgagataacccggagttactgcggcgtttttatggcttactctctacggctcattaccgcacgacgccgctggatttacgccgtctgatggatgctccgggtatgcatttctctgccgccagagtggccgatgccgtgattggcgcattatggctggtggatgaagggggattgagcgaggcactggcccttgatgtctgggcgggtcggcggcggcccagagggaatctggtggcacaatcactggccgctcatagcgggcagtggcaggcaccaacgctgttatcgcggcgtatcagccgggttgctgtcacggcagcatggcggcagcaaggaattgcccgccggatgattgccgcagaacaggcccatgcccgccagcagcagtgtgattttctttcggtcagttttggctataccgccgagttggctcatttttggcaccgctgtggttttcgtttggtacgtattggtagccataaagaggccagtagcggttgttataccgcaatggcgttgttacctcttagtcccgcgggggaggcactctgtcaggcggcgcagcagcagttaaaacgtgattggtattggttacagcaatggattggcataccaaccccggtatttttacggctacctgaaccgccggaggtcacgttaactgacgacgattggcgggaactggcaggatttgcttttgcttttcgcccattagaggccagtttaccggcgctacaacggttgttattacacaccgagttacccctttcggcgttacgacactatttgcagttacgcactcctcagtctgagattatcaatacccttggtttgatagggcgtaaggcattggtggcactgtggcgtcaggaagccgccgaggggatggcaatgattgatgtggataaaatgatcatgtctgccaaaccatcggcgcggtgtagcactgtccggttacccggtagaaaaaaccttacgatatgccaatgctaa

SEQ ID NO: 41692 - DNA, 909 bp, Yersinia pestis
atgaaccgcctcccaaccctgtatggcattattgcgattttactgtggagcatgagtgtcgccttaacacgtgggctggccgaagcactggggccattcggtgccggatcggctatctacagtgtcagtgggattctggtatggctagtggcaggtaagcctagagtacgtgggcagcatcccgcttatctgtatggctgcggtttactgtttgtggtgtatatggtggccttcgctctggcaatcggtatggctaatgatcgccagcaaacactggagataggcttaatcaattacctatggccgagcctaacgctgctattggcggtaccgttgctgaaactccgcgcccgttggtggttatggccgggggcggctctcgctctatttggtgttatttgggtggtcagtggtggtgaagggctggacgttaaaacgctcgccgtaaatatcagcagcaacccgctggcgtacagcctggcgctgattgcagcattcacctgggcgggctactccaacttagtacggttatatagccaagggccaggggcgctgccactgtttttaatcgcctgcgccctgtgcctgtggttgatgttctttatgtggactccgggcaaattgcactttaccccacgagccatatttgaattgttactcatgggcgcgaataccgcactggcctaccaatgctgggatagggcctaccaatgctgggatagcgcaatgaaaaaaggcaacgccacactggtcgcggccctatcctatttcacgccattgttatcaatattgatcgccagcgtgtggctcaataccttgccttctgcggctttctggcctggcgttgccatggttgtagcaggttcgttgctatgctggtcagccagccgaaatccccttcgtacttga

SEQ ID NO: 41693 - DNA, 450 bp, Yersinia pestis
atgactcaggaacaacaactatctggcggtgaactttcattacctaacggtgagttagtgcttcgcactctggcaatgccagcagacaccaacgccaacggggatatatttggcggttggttgatgtctcaaatggatattggtggcgctatccaagctaaagaaattgcacagggtcgcgttgtgacggttcgtgttgatggcatgacgtttcttaagcctgtggctgttggtgacgttgtttgctgctatgcacgctgtattaaaaccgggcacagctctatcaccattaacattgaagtatgggtaaaaaaggtttcttctgagccaatagggcagcgttatcgtgctactgaagcggtattcacctatgtcgcggttgatgatgcgggtaaaccccgtggattaccgagcggtaaaggtaatttcgaagtaggtgcgactcaataa

SEQ ID NO: 41694 - DNA, 1176 bp, Yersinia pestis
ttgattaagtcagcgctattggttctcgaagacggaacccaattccacggtcgggccatcggggcagaaggtacggcagtaggggaagtggtcttcaatacgtcgatgaccggttatcaagaaatcctcactgatccttcctactcccgccagatcgttactcttacttatcctcatatcggcaatgtcggcactaatgcctccgatgaagaatcctctgcagtacacgcccaaggtcttgttattcgcgacctgccattgattgccagcaactaccgtaatgaagaaggcttatccgagtatctcaagcggcacaatattgtggcgattgccgatatcgatactcgtaagctgactcgcttgctgcgcgaaaaaggagcacagaacggctgcattattgttggggagttgtctgacgcggccctggcattggaaaaagcgaaagcatttccaggcttgaaagggatggatctggcgaaagaagtgaccaccaaagagatgtatcagtggctgcaaggcagttggacgctggaaggtgatttacctgcggcgaaacaaccagaagatttgccattccatgtggtggcttacgattatggtgtgaagcgtaatatcctgcgtatgctggttgatcgcggttgccgtctgaccgttgttccagcgcagacacccgctgaagacgttctgaaactgaatccagatggcatcttcttatccaatggtcctggggatccagaaccatgcgattacgcgatcacggccatcaaacgcttcctggaaacggatattccggtattcggcatctgtctgggccaccaattgctggcgctggccagtggcgctaaaacagtaaaaatgaagttcggtcaccatgggggtaaccatccggtgaaagatctggatgctagctgtgtgatgattaccgcgcaaaaccatggcttcgccgttgatgaaacctcattgccatccaacctgcgtactacacatgtctctttatttgatggttctctgcaagggctccaccgtacagataaagcagcgttcagcttccaggggcatccagaagccagccccggcccgcatgatgccgcgccattgtttgatcattttatcgaactgattgaggcttaccgagcttcatccgtgagtcttaactgtagtaacagccataaataa

SEQ ID NO: 41695 - DNA, 543 bp, Yersinia pestis
atgaagcaacttttagattttctcccattagtcgtgttctttattttttataagatgtacgacatttttgtcgcttccggggcactcattgttgccaccttggtagctctggcctttacctggctgaaatatcgcaaagtcgaaaaaatgacattggttactgcagcgatggtactggtgttcggtacattaacactcgcattccacagtgacttgtttattaaatggaaagtgactgttttatatgtgctgttcgctttggctttattagtcagtcaatgggtgatgaagaagccgttgattcaacggatgttgggtaaagagttaaccttacctgacaaggtttggtcaacattgaacctgtcgtgggccattttctttctggtctgtgggctactgaatatttatgtcgcgttttggttgcctcaggatatttgggtcaactttaaagttttcggcttaaccgctctgacactgatatttacgttgatcagtggcgtttatatttatcgccatatgccggaagagcagaagaagtcttaa

SEQ ID NO: 41696 - DNA, 3234 bp, Yersinia pestis
atgccaaaacgtacagatataaaaagcatcctgattctgggcgcaggcccgattgttatcggccaggcttgtgagtttgactactccggtgcccaagcgtgtaaagcactgcgcgaagagggttaccgtgtcattttggtgaactccaatctggcgactatcatgactgacccggaaatggccgatgcaacttatatcgagccaattcattgggaagtggtgcgtaagattatcgaaaaagagcgtccagatgctgttttgcctacgatgggtggccaaactgcactgaactgtgcattggaactggagcgtcagggtgttctggcagaatttggcgtcaccatgattggtgcgaccgccgatgccatcgataaagccgaagaccgccgtcgctttgatatcgcgatgaagaagattggtctggatacggcccgctcaggtattgcgcataacatggaagaagcactggctgttgccgctgatgtgggcttcccgtgcattatccgcccatcctttacgatggggggcactggtggcggtatcgcttataaccgtgaagagttcgaagagatctgcgagcgcggtctggatttgtctccaaccaaagagttgttgattgacgaatcgctgattggctggaaagagtacgagatggaagttgtccgtgataaaaacgacaactgcatcatcgtttgctccattgaaaacttcgatgcgatggggattcacaccggcgactctatcactgtcgcaccggctcagaccctgaccgataaagaataccaaatcatgcgtaatgcctcgatggcggtactgcgtgaaatcggggtagaaaccgggggctctaacgtacagttctccgtcaacccaaaaaatggtcgtttgattgtcattgagatgaacccgcgtgtttctcgctcttcagcactggcctctaaagcaaccggtttcccgattgccaagattgccgccaaactggcggtcggttacacactggatgagttgatgaatgacatcaccggtggccgtactcctgcgtcctttgagccttctatcgactatgttgttaccaagatcccacgctttaactttgaaaaatttgcgggtgccaacgaccgtttgaccacgcaaatgaagtctgtgggtgaagtcatggccattggccgcacgcagcaagaatcactgcaaaaagcactgcgcgggctggaagtgggcgcgaccggttttgacccgaaagtgagcctggatgatcccgaagcactgactaaaattcgtcgtgaactgaaagaagcgggtgcagaacgtatctggtatatcgctgatgctttccgtgcgggcatgtcggttgatggtgtgttcaatctgaccaatgttgatcgctggttcctggtgcagattgaagagctggttcgtctggaagagagcgtggcagaactcggtatcaacggcttgactgctgaatttatgcgtcacttgaaacgtaaaggtttcgccgatgctcgtttggctaaattggtcggtgcagcagaaagtgaagtccgtaaactgcgttacaaatatggtttacacccggtttataagcgtgttgatacctgcgcggcagagttctcgacggatacggcttacatgtactccacctacgaggaagagtgcgaatctaacccaaccagcgatcgtccgaaagtgatggtgctgggtggcggcccgaaccgtatcggacaaggtattgagttcgactattgctgcgtacacgcttcattggcactgcgtgaagacggttacgaaaccatcatggtgaactgtaaccctgagacggtttcaaccgattatgacacctctgatcgtctctacttcgagtcagtcacgctggaagatgtgttggaaatcgtccgtattgagaaaccacagggcgttatcgtgcagtacggtggtcagacaccgctgaaattagcccgcgagttggaagcggctggcgtccccattattgggaccagtccggatgccattgaccgtgccgaagaccgtgagcgtttccagcaggcggtaaatcgtctgggcctgaaacagccagcgaatgccaccgtagcgactatcgagcaggcggtggaaaaagccactggtctgggctatccactggtcgtacgcccttcttatgtgttgggtggccgcgcgatggaaatcgtttatgacgagattgacctgcgccgttacttccagaatgccgtcagtgtatcgaatgatgcgccggtattgcttgaccgcttccttgatgatgccgtcgaagtggatgtcgatgccatttgtgatggtgaacgcgtgttgatcggcggcattatggaacatatagagcaagccggggttcactctggtgactcagcctgttcattgcctgcttacaccctgagcaaagaaattcaggatgtgatgcgccaacaagtggaaaaactggcctttgaactctgtgtccgcggcctgatgaatgtgcagtttgcggtgaaaaacaacgaagtttacctgattgaggttaacccacgggcggcccgtactgtacctttcgtgtccaaagcgaccggtatgccactggcaaaaattgccgctcgtgtgatggttggccaatcgctggctgagcagggcatgttggaagaaattattccgccttactactcagtcaaagaagtggtactgccgtttaataaattccccggtgttgacccaattttagggccagaaatgcgctctaccggtgaagtcatgggggttggccgtaccttcgctgaggcgttctctaaagcgatgttgggcagtcaatctggcatgaaaaagagtggccgtgcgctattatccgtccgtgagggggataagcaccgggtggtagacttggcggcgaagctgctaaaacaaggctttgaactggatgcaacccacggaacggcggtcgtgctgggcgaggcggggataaacccacgtttggttaacaaggtgcatgaaggccgtccgcatattcaggaccgtattaagaatggcgagtacacctatatcgtgaataccacagctgggcgtcaggcgattgaagattctaagctgatccgtcgcagtgctttgcaatataaagtgcattacgatacgaccttgaacggtggttttgctacggcgatggcgttaaatgcggatccaaccgatcaagtgatttcggtgcaagagatgcatgccaagattaagaatatgaaagcgtaa

SEQ ID NO: 41697 - DNA, 483 bp, Yersinia pestis
atgattatcagcctgatcgctgcattggcagcagatcgcgttattggcatggaaaacgctatgccatggcatttaccggctgatttagcgtggttcaaacgtaacacgttaaataaaccggtaattatgggtcgtaagaccttcgaatctatcggtcgcccccttccgggaagactgaatattgtcatcagtagccagcctggtactgatgaacgtgtgacgtgggcggcctcgattgaagaagcattggcgtttgctggcaatgcggaagaagtgatggtcatgggcggtggccgtgtctataagcaattcttagaccgcgcaaatcgcatgtatctcacgcatattgatgcggaggtcggtggcgatactcacttccctgattatgagccagatgaatgggaaagcgtattcagtgagtttcatgatgccgatgaagctaactcacacagttattgcttcgaaattctagagcgccgctaa

SEQ ID NO: 41698 - DNA, 819 bp, Yersinia pestis
atgaataatagagtccaccaagggcattttgcccgcaaacgctttggacaaaactttttaaacgatcagtttgtcatcgacagtattgtctccgcaatccacccagttcctggcgaagcggtcgttgaaattggccccggtttaggtgccttaaccgaacccgtcgcggctcgtatggatcacatgaccgttattgagctggatcgcgatctggctgcacggctggctagccatcctcaactgaaagataagctaaccattcatcagcaagatgcgatgaaagtaaacttttccgaactgtcagagcaagcggggcaaccattacgggtatttggtaacctgccatacaatatttctacgccgctgatgttccatcttttcagctatactgatgctatccgcgacatgcatttcatgttgcaaaaagaggttgttaaccgcttggttgctggccccaacagtaaaacttatggccgtctgaccgtcatggcgcaatactattgcaatgtgatcccggttttggaagtaccgccgactgcgtttaccccagccccaaaagttgattccgcagttgtgcgcctcattccacatgtgcaaatgcctcacccggtcggtgacgttcgtatgctgagccgtattactacgcaagcctttaaccaacgtagaaaaacggtgcgcaatagcttaggtgatttattcacttcagagcaattaatcgaattaggtattgacccgatactcagggcagaaaatatttcggtagcgcaatactgtaagctagctaactggctttcagctcaatcgacaccgcagaaataa

SEQ ID NO: 41699 - DNA, 2598 bp, Yersinia pestis
gtgctagaagaataccgtaagcacgtagccgagcgtgctgcagagggtatcgtccccaagccattagatgcgtcacaaatggcagcgctggttgaatcattaaaaaatccgcctgcgggcgaagaagaattcctattagacctgctgactaaccgtgttccacctggtgttgatgaagccgcttacgttaaagccggttttctggctgctatcgccaaaggcgaagcccactccccactgatcaccgcagagaaagcgattgagctgcttggcaccatgcaaggcggttataatatccacccgctaattgatgcattggataatgagcaactggcacctatcgcggcgaaagcgttatcccacacgttgctgatgttcgataacttctacgacgtagaagataaagccaaagctggcaatccgtatgcaaaacaaatcatacaatcttgggctgatgcggaatggtatctatcccgtccggcgttggcagaaaaactcaccgtaaccgtatttaaagtgacgggtgaaaccaacaccgatgatttatctcctgcccctgatgcgtggtcgcgcccggatattccattacatgcgttggcaatgctgaagaacgcccgtgaagggattcatccagatcagccggggagcgttggcccgataaaacagatcgaagaactgaataaaaaaggttttccactggcttatgtcggcgatgttgtgggtaccggttcctcccgtaaatcggcgactaactccgtattatggtttatgggtgacgacattccttacgtgccgaataagcgcggtggtggtgtggttctgggcagtaaaattgccccaatcttctttaacaccatggaagatgccggtgcgctgccaatcgaagtggatgttgccaaactgaatatgggcgacgtgatcgatatcttcccgtatcagggcgaagttcgtcgccacgataccggtgaagtattagccacctttgaattgaaaactgatgtgctgttggatgaagtccgtgccggtggacgtattccgctgatcgttggtcgtggcttgaccaccaaagcccgcgagtcactgggcctgcctgtcagcgatgtgttccgtgtgccaaagccggtagccaaaagtaacaaaggtttctcactggcgcagaaaatggttggccgtgcttgtggcgtcgcaggtgtgcgccctggtgaatactgcgaacctaaaatgacgtcggtcggctcacaggatactaccgggccgatgactcgcgatgagctgaaagacttggcttgtctgggcttctctgccgatttagtgatgcagtcattctgtcatactgcagcgtatcctaagccagtagatgtgacgacccaccacacattacccgatttcatcatgaaccgtggcggcgtgtcgctacgtccgggcgatggcatcattcactcttggcttaaccgcatgctgttaccggacactgtcggtaccggcggtgactcccatacccgtttccctattgggatctccttcccggcgggttctggtttagtggcctttgcggcagcgaccggcgtcatgccattggatatgcctgaatctgtattggtacgctttaaaggtgaaatgcaaccggggatcaccttgcgtgatctggttcatgctatcccttactatgcgatccaagaaggcttgctgacggttgagaagaaaggtaagaaaaacatcttctcaggccggattctggaaattgaaggtctaccagagctgaaagtcgaacaagctttcgagttggcagatgcctctgctgaacgttctgcagctggttgtaccatcaagctggataaagcgccgattaccgaatacctgcaatccaacgttgttttgctgaagtggatgattgcagaaggctacggtgatcgtcgcacactagagcgccgtatcaatgggatggaaagctggctggcgaacccgagtctgctggaaggcgatgccgatgctgaatacgcagcggtgattgaaatcgatctggctgagatcacacagcctattttgtgtgcaccaaacgatccggatgatgctcgcttgttgtctgatgtggctaacagcaaaatcgacgaagtctttatcggttcctgtatgaccaacattggccacttccgtgccgccggtaagttactggatcagcataaaggccaactgcccacccgcctgtgggtggcaccaccgaccaagatggatgcagcacagctgacagaagagggctattacagcgtctttggtaagagcggtgctcgtattgaaatccccggctgttcactgtgcatgggtaaccaggcgcgggttgctgacggtgcgacggtggtatccacctcaacccgtaacttcccgaaccgtttagggaccggggcgaatgtgtatctggcatcggctgagttggcggcgatagcgtctctgcttgggcgcttaccaacgcctgatgagtatcagacttacatggctcaggttgataagaccgccgaggatacttatcgttatctgaactttgatcagttaagccaatatacggataaagctgacggtgtgatcttccaaaccgcggtgtaa

SEQ ID NO: 41700 - DNA, 1428 bp, Yersinia pestis
atgatgagtactgaaattaaaactcaggtcgtggtacttggggcaggtccagcagggtactctgctgcttttcgttgtgcggatttagggttagaaaccattctggttgaacgttactccactctggggggggtttgcctgaatgtgggttgtatcccttccaaggcactgttacacgttgccaaagtgatcgaagaagccaaagcgctggctgaacatggtatcgtttttggcgagcctaaaactgatattgataaagtccgtgtctggaaagataaagttatcaatcagttgaccggtggtttggcaggtatggctaaaggccgtaaagtcaaagtagtgactggttttggtaaatttaccggtgcgaacaccttagtggttgatggtgagaatggtccaacaaccattaacttcgataacgctattatcgcggcgggttctcgcccaattcaactgccattcattcctcatgaagactcacgtatttgggattcaactgacgcactggcattgagaacggttcctgagcgcttgttggtgatgggcggtggtatcattggtctggaaatggggaccgtttaccacgcactgggttctaagattgacgtggtcgaaatgcttgatcaggtgatccccgcagcagataaagacgtggtgaaagtctttaccaagcggatcagcaagcagttcaatctgatgctggaaaccaaagtgacagcggtagaagccaaagaagacggtatctatgtcacgatggaaggcaaaaaagcgccagcagagccacaacgctatgatgcggtgttggttgcgattggccgcgtgcctaacggtaagttgctggatgcgggtcaggcgggtgttgaagttgatgatcgtggctttatccacgttgataagcaactgcgcaccaatgtgccacacatttttgctatcggtgacatcgtgggtcagccaatgctggcgcataaaggtgtccacgaaggccatgttgccgctgaagttatcgcaggcatgaagcactatttcgatccgaaagttattccatcgattgcgtacactgaaccagaagtcgcatgggttggtttgaccgaaaaagaagcaaaagagaaaggcatcagctacgaaacctccaccttcccgtgggcggcatcgggccgtgctatcgcttctgattgcgcagatggtatgactaaactgattttcgacaaagaaactcaccgtatcattggtggtgcgattgtcggtactaacggtggcgaactgttaggtgaaatcggtctggccattgagatgggttgtgatgcagaagatatcgcattgaccattcatgctcacccaacattgcatgaatcagtgggcctggcggcggaaatctacgaaggtagcattactgacctgcctaacccgaaagcgaaaaagaaataa

SEQ ID NO: 41701 - DNA, 1530 bp, Yersinia pestis
atgtctatagaaattaatgtaccagacatcggtgcagatgaagtggaagtcaccgaaattatggtgaaagtgggcgataccgttgaagcggaacagtcgctaatcaccgttgaaggcgataaagcttccatggaagttccttcacctcaggcgggcgtggttaaagagatcaaaattgcggttggcgataaagtggctaccggttctctgatcatggtcttcgacgctacgggtgccgctgcggcaccggttaaagcagaagaaaaaccggcggcgcctgctcaggtagcggctccggcagcctctgcggcgaaaaatgttgaagtgccagatatcggtgatgacgaagttgaagtgactgaagtgatggtgaaagtgggcgataaagttgacgccgaacaatcactgattacggttgaaggcgacaaagcgtcgatggaagtgcccgcaccgtttgctggtatcgtgaaagaaatcaaaatcagtaccggcgacaaagtgaaaaccggctctctgattatggtcttcgaagttgaaggtgcagcgccagcgccagccgccgcacctgccgccaaagcagaaagcaaaggcgagtttgccgagaatgacgcttacgtgcatgccacgccggttatccgtcgtctggcgcgtgagttcggtgtgaacctggcgaaggtgaaagggacaggccgtaagggccgtatcctgcgcgaagacattcaagcttacgtgaaagatgccgtgaaacgtgccgaagctgcaccagcagcggctggcggcggcctgccgggcatattgccttggccaaaagttgatttcagtaaatttggtgaaatcgaagaagtcgaattgggccgtatccagaaaatttctggtgcgaacctgagccgtaactgggtcatgatcccacatgtgacgcaattcgatgaagcggatatcactgaagttgaagccttccgtaagcaacagaacatcgaagctgagaagaaaaaacaagacctgaaaatcaccccgctggtgttcctgatgaaggccgccgctaaagcactggaagaattcccacgctttaacagctccatttccgaagatggtcagaaactgacgctgaagaaatacatcaatatcggtgtggcggttgatacgcctaacggcttggtagttccagtattccgtgacgtcaacaaaaagggtattgtcgagttgtctcgtgagctatctgtcatctccaagaaagcacgtgatggcaagctgacagcatctgacatgcaaggcggctgtttcactatctccagtctgggcggtatcggcggtacggcatttacgccaatcgtcaatgcgccagaagtggctatcttgggtgtatcaaaatcatccatgaaacctgtctggaatggtaaagagtttgctccacgcctgatgttaccgctgtctctgtccttcgatcaccgtgtgattgatggtgccgcgggtgcacgcttcgccgcgtatatcgctaccattatggcggatattcgccgtctggtgatgtaa

SEQ ID NO: 41702 - DNA, 636 bp, Yersinia pestis
atgaaaaaaatcactttggcactgctcgccgtggcctcgttagtacctacagcagcaagtgcacatgaagctggcgattatattttccgagcagggacggcaaccgtcagacctaatgccgggtctgatgatgtgttaggtaacggttccttcaaagtcgataacaatacccagttggggctgaccttcagttacctgatcaccgacaatatcggtgttgaattgctggcagcaacgccattcaaccataaagtggggctggcaggggtagggacgattgcggatgttaaacaactgccgccaacattaatggcgcaatactatttccgtgataaacaagacaaattgcgaccatacctgggtattggtctgaactacaccaaattctttgacgaaaaattcaacgcgacaggctcagatatcggtctgacgaatttaagtgttaaagattcatggggtgttgcagggcaagctggcatggattatatggtcagtgaaaactggatgctgaacatgtcagtctggtggatgaacattgaatccgacgtgaaatttaatttggcaggcgaagagcacagcatcaatacccgtttggccccatgggtatttatgtttggcgcaggttatcgtttttaa

SEQ ID NO: 41703 - DNA, 1191 bp, Yersinia pestis
atgacgacacttaatccctattttggcgaatttggcggtatgtatgtgccccaaattttagtgccagccctgaagcaactggaagacgcattcgtcagtgctcaactggatcctgaatttcaggccgcatttcaagatttgttaaaaaactatgccggtcgccctaccgccctgaccttgtgtcaaaatctgaccaaagggacaaagaccaagctatatctgaaacgtgaagatctgctgcacggcggtgcacacaaaaccaaccaggttttaggtcaggctttattagctaaacgcatgggtaaaactgaaattattgccgaaaccggtgccggccagcacggggttgcctccgcactggcttgtgcattgctgggtttaaaatgccgcatttatatgggggcgaaagatattgaacgtcagtcgcctaacgttttccgtatgcgcctgatgggagccgaggttattccagtgcatagtggttcatcgacgctgaaagatgcctgtaatgaagcgctacgtgactggtcaggtacttatgaaaccgctcactatatgctgggtaccgccgctggccctcacccttacccgacaattgtgcgcgaattccaacgcatgatcggtgaagaaaccaaggctcagatactggaaaaagaaggccgcctgcccgatgcagtattggcctgtgttggtggcggttctaatgctatcggtatgtttgctgattttattgatgagcctgatgtgggtctgattggcgtagagcctgccggcttggggatcgaaaccgggcaacatggtgcccccctaaaacacggtaaggtcggtatctacttcggtatgaaatcaccgatgatgcagaccagcgatgggcaaattgaagaatcttactctatttctgccggtctggacttcccctctgtggggccgcaacatgcttatttgaacagtattgggcgggctgattatgtctccattaccgatgatgaggctttagacgcatttaagacattgtcatgtaaagaagggattattccagcgctagagtcctctcatgctctggcacatgcgttgaaaatgattaaagcggatccggataaagaacaaatactggtggtgaatctctccggccggggtgacaaagatattttcaccgttcacgatattctgaaagcacggggagagatttaa

SEQ ID NO: 41704 - DNA, 1428 bp, Yersinia pestis
atgcaggaaactgggggttacaaaaccgagggttataacgttggcagtgacaaagttgacagtgataaaaccaaaaccgtgctccaccaaatcgtacacgataaagaaatttgggttgccgcgcggaaactgcaacagcctctaacccgcttccaaaacgaaatcacccagagtcagcgcgatttttatcacgcgctacaaggcgataaaacggtctttattttggaatgcaaaaaagcctcaccttctaaaggggttatccgtgacaactttaacccggcggagattgccggtgtttataagcactatgcgtcggctatctcagtattaacggatgagaaatatttccagggcagttttgatttcttgccacaagtcagtgccgccgtcactcagccggtattgtgtaaagattttattattgatgcttatcagattcagctagcgcggttttaccacgctgacgccattttactgatgctgtcggtcttggacgatgaggcttaccgccaattggccgccgtcgcacacagcctgaacatgggggtgttgaccgaagccagtaacgccgaagaattggagcgtgctattaccttgggtgccaaagttgttggcatcaataaccgcgacctgcgtgacctgtctatcgatctgaatcgcacccgtgaattggcaccacgcctaccagaaggtgtcacaataatcagtgaatctggcattagtcattatcgtcaggtccgtgaattgagccaatttgccaacggtttcctgattggcagtgccctgatgtccgaacccgatctcaacgcggccgtccgccgggtgttactgggcgaaaataaagtttgcggcctgacacgcgcacaagatgccgccacggcttaccacgcaggtgcggtgtacggcgggttgatttttgtcgacagttcaccccggtatgtggatatcgccagcgcccgtacggttatcagtggtgcgccgctaaagtatgtcggtgtttttcgtcatgctgaaatagaaactgtacggcaaacggctgaacaactctcactggcagcagtgcaattgcatgggcatgaagatcaacagtatatcaatcaactgcgcaaagtattacctgcggattgccagatttggaaggcactgagtgtcggtgacacgatgccggaacgcaacttacagcaagttgaacgctacgtattggatcacggtacgggtggcacagggcaacgtttcgactggtcattattggcagatcaagcactagataatgtcttgctggcaggcggcttggggccagataactgtgatgtggcagcccaactaggctgtgccgggctggatgtcaattccggcgtagaaagcgcccctggcatcaaagacccccaacggatcgccgctgtattccaggcattacgcgtgtactga

SEQ ID NO: 41705 - DNA, 765 bp, Yersinia pestis
atggcctacaacaaaatacgtcaacccaaactatcagatgtaatcgagcagcagctcgaatacttgatcttggaagggacgctgcgtccgggtgaaaagttactgcctgaacgtgagttggcgaagcaatttgatgtttcccgaccttctttgagagaagctattcagcgattagaggctaaaggcttgctgttgcgccgtcagggagggggtaccttcgttcagaccaatctgtggcaaagctttagcgatccgttagctgaactgctggcagaccatccagaatcacaattcgacctgcttgaaacccgtcatgcccttgaaggtattgccgcctattacgctgcattacgtggcactgatgaagatctgcaacgtatccgtgagtgccatactgtcatccagcaagcgcaggataacggtgatttggatgctgaagccgatgcggtgatgcagtatcaagtggcggtcacagaggctgcacataatgtggtcttgctgcatttactccgttgcatggggccaatgctggaacaaaacgtcagacaaaactttgaattgctctacttgcgccgcgaaatgttggccactgtgagcagtcaccgagccaggattttcgaggcgattgtggcacgtgaaccagaaaaagcacgagaagcatcgcaccgtcacttggcgtttattgaggagattctgttggatcttagccgggagcacagtcgccgtgagcgatctttgcgtcggctccaacagcgcaaggagtag

SEQ ID NO: 41706 - DNA, 1002 bp, Yersinia pestis
atgatgcaacatttattcgaaaaactgttccgggctgagtcaatgagccaagaagaaagccagcaactgtttgcggcgattgtacgtggtgaactcgagccaagccaactggccgcagtgctaatcagcatgaaagtacgcggggagaccccagcggagattgccggggcagctcaagctttactggcagatgcgcaacactttccacgcccagactacctgtttgccgatattgtcgggaccggcggtgatggcaccaacagtattaatatctccaccgccagtgcctttgtcgcggctagctgtggcgtaaaagtggctaaacatggtaaccgcagtgtttctagccgttccggttcatccgatctgctggcggcatttggtatccgtttggacatgagtgccgagcaatcacggttggcgttggacgatctcggggtctgcttcctgtttgcgccgcaatatcacacgggttttcgtcatgcgatgccagtacgccagcagttaaagacccgcaccctgtttaatgtgttggggccgttgatcaaccccgcccgcccgccgctggcgctcattggcgtctatagccctgagttagtgttaccgatcgctcaaacgctgaaagtactgggttatcaacgtgcggcagtggtacatggcggtggaatggatgaagtggctattcatgccccgacgcaggtggctgaactgaataatggcagtattgaaagctatcaattgacgccagaagattttggtttgaatcgctacccgcttgccgctctacaaggcggtatgccggaagaaaaccgtgacattttagcacggttgttacaaggtaaaggtgaaacagcacatgcggccgccgttgctgcaaacgtcgccttgctgctgaagttatacggccaagaaaacctgcgccataatgcgcaacaggcattggaaatgattcacagcggtcaggcttttgatcgtgttactgctctggcagcgagaggataa

SEQ ID NO: 41707 - DNA, 900 bp, Yersinia pestis
atgaaagaactcactgacgccacgacgttatctactgcttttacgctttatgatctacatagccatacaacggcttccgatggcacgttgacgccatcagagctggtgatcagagcggcacagatgcgtgttggggttctggctatcactgatcacgataccactgctggtttggcagaagcggcggcggcgattgaacagcatcaattagcgctacgattgatccccggtgttgagatttccaccctatgggaaaatcatgagatccacattgtgggcctgggtattgatgttcagcatgtgagtctccgtacgttacttgaggcacagtctgagcaccgttatcagcgggcccaagagatcagcacccgtctggagaaagcacgtattgtgggcgcatgggaaggggctaaccggttggcaaacggtgggcaggtgacccgtgggcattttgcgcgttatctggttgagttagggctggccagcaatgttggtcaggtgtttaaaaagtatttagctaaaggcaagaccggttatgttcctgctcagtggtgtacaatagaacaagctattgatgcgattaagcaatcaggtggacaagcggtattggcccatcctggccgttatgatttaacggcaaaatggttaaagcgtttattggcccattttgctgaacatggcggggacgcgatggaagttgcccagtgccaacaagcccctcacgagcgggcgctactgggtcaatacgcacgcgattatcatttactggcatcccaggggtctgatttccatcaaccttgttcttggattgaattgggtcgcaaattgtggctgcccgctggggtggaaccggtatggcgagattggcctacagagccagccatgccgctcgtacgttga

SEQ ID NO: 41708 - DNA, 957 bp, Yersinia pestis
gtgggtgaaaaattacagaaaatcctggcgcgcgctggccatggttctcgtcgtgaaattgaagccattatccagcaaggccgcgtcagtgttgacggtaaagtgtcaaagctaggtgatcgtgtagaagtgacccagtccactaaaattcgtctggatggtcatcttctttcaattaaagaatctgaagaaaatgtgtgccgcgttctggcgtattacaagccagaaggtgagctttgtacgcgtaatgatccggaaggtcgtccaacggtatttgaccgtttacctaaactgcgtggttcacgttgggttgcggttggtcgtttggatgtgaacacctctggtttattactgttcactaccgatggcgaattggctaaccgcctgatgcacccaagccgtgaagttgagcgtgaatatgcggtgcgggtatttggtcaaatcgatgatgataaaatcaaacagttgagccgtggtgtacaactggaagatggccctgcggcatttcgtactatcagctaccagggtggtgaagggataaaccagtggtataacgttacgttgaccgaagggcgtaatcgcgaagttcgccgtctatgggaagccgtaggcgtgcaggttagccgcctgattcgtgtgcgttatggcgacattaatttgccgaaaggcctgccacggggtggctggactgaactggatcttaaagccactaactacctgcgtgaattggtcgaactggatgttgaaaccgtcagtaaattacccgttgagaaagatcgtcgccgggttaaagccaaccaaatccgtcgtgcagttaagcgccataccgaagtctcgggccgccaggttgctggccgtcagggttcagcccgtaaaggctctacgcgtcaaaacgtgggtaatgcggcacccgcagccacggcaagtcgccgtagtggcccgaaaaaacgcggttaa

SEQ ID NO: 41709 - DNA, 762 bp, Yersinia pestis
atgcattatcaacctaaacatgacctgctcaatcagcgcattattctcgtgactggcgcaggtgatggtattggtcgtgaagcggccctgacttacgctcggtttggtgctcgcctgatattagtgggccgcaccgaaagtaaattgctcgcggtaaaaaagcagatagctgatgcgggcggtttgccagcgttagtgctgtcactggatctattgcatgccaccgccgcggattgtcagcaacttgctgacaccgtaagtgcacaggtccctaggctggatggcgtcttacataacgccggtttattgggtgaagttgcccccatgtccgagcaaagcatcgccgtctggcaagacgtcatgcaagtgaatgtcaatgcaacatttatgctaactcaagcattactgccattattactgaaatcccctagcgcctctctggtgttcaccagttccagcgttggccgtcagggacgtgcaggctggggagcttattcggtctcaaaatttgccacggaaggcatgatgcaagtactggccgaggagtataaacagagcaacctgcgggttaactgcatcaatcctggaggaacccgaacacaaatgcgggcgaccgcattccccgatgaagatgcgagcaagttgaaaacgccagcagatattatgccgttgtacctctatttgatgggcgatgacagccgtagaaaaacggggatcagcttcgatgcacagcccggccgtaaacctggtccagctgaataa

SEQ ID NO: 41710 - DNA, 2616 bp, Yersinia pestis
atgggtaaagctctcgtaatagttgagtccccggcaaaagccaaaactattaataaatacttagggaatgattacgtggttaagtccagcgtcggtcacattcgtgatttgccgaccagtggctcagccagtaaaaagagcgctaactcagctgaagaaaaagccaaaaaagacgataaacccaaaaagaaagtgaagaaagacgaaaaggttgccttagtcaaccgtatgggggtcgatccttatcatggctggaaagcgcagtatgaaattttgtctggcaaagagaaagtggttgccgagctgaaagcattagcagaaaacgcggatcatatctatctcgcaaccgaccttgatcgcgaaggtgaggctattgcctggcatttgcgggaagtgatcggtggggacgataaacgttttagccgcgttgtctttaacgaaatcaccaagaatgcgattcagcaggcgtttaatcagcctggtgaactgaacatcagccgtgtaaatgcacaacaagcccggcgttttatggatcgggttgttggctatatggtctctccactgttgtggaagaaaattgcccgtggcctgtcagctggccgtgtacagtcagttgctgtgcgccttgtggttgaacgtgaaaaagagattaaagcattcgttcctgaagaatattgggagctacatgcagatttagtggctaaaggtgacattccgattcaaatggaagtcactcatgcccatggcaagccatttaaaccggtaaatcgtgagcaaacacatgcagcgctgacgttactggaaaatgcccgttataaggtgttggatcgtgaagataaaccgaccagcagtaagcccagcgcacccttcattacctccaccttacagcaggcggcaagtacccgtctgagttttggtgtgaaaaaaaccatgatgatggcacagcgcctgtatgaagcgggtcatatcacctacatgcgtaccgactcgactaatttgagtcaggatgcattgacgatggtacgtggttatatcggcgataattttggtgataagtatctgcctgcaacgcctaaccaatacagcagcaaagagaattcgcaggaagcgcatgaggccatccgcccttcagatgtcaatgtgttagctgagcagttgaaagatatggaagcggatgcccagaggttgtaccaattgatttggcgtcagtttgtggcgtgccagatgcctccggccaagtatgactcgaccacactgacagtgcaggcgggggatttccaactgcgcgccaaaggccgcacattgcgctttgatggttggaccaaggttatgcctgcgctgcgtaaaggtgatgaagatcgcaccttgccggtgattgaagtgggcagtgatttagacttacaaaaactgattccgagccagcattttaccaagccaccggctcgttatagtgaagcatcattagtgaaagagctggaaaaacggggtattggccgtccatcgacttatgcctctattatttcgaccattcaagatcgtggctatgtgcgggtagaaaaccgtcgcttctacgcagagaaaatgggtgaaattgtgacagaccgcttggaagaaaacttccgcgagctgatgaattacgatttcacggcacgaatggaaagcggtttggatcaagtcgccaatgatcaggccgaatggaaagcggtgctggatggcttctttgctgaattcagcgagcagcttgaaaaggcagaaaaagatcctgaagaaggaggaatgcgcccgaatcagatggtgatgaccagcattgattgcccaacctgtggccgtcagatggggatccgtactgcgagtactggggtgttccttggctgttccggttatgcattgccgcctaaagagcgctgtaaaaccaccattaacttggtgccggacgctgagattttgaatattctggagggtgatgatgcggagactaacgcattacgtgcccgccgccgttgccagaaatgtggtactgcgatggatagctaccttatcgataatcaacgcaagttacatgtttgcgggaataacccagcgtgtgatggctatgaaatcgaagcaggtgagttccggataaaaggctatgaaggcccaattgttgagtgcgagaaatgtggttctgaaatgcacctgaaaatggggcgcttcggtaagtacatgggctgcaccaatgacgagtgtaagaatacccgcaagattctgcgtagcggtgaagttgcaccaccgaaagaagatccggtaccattgttagagttgccttgcgagaaatcagatgcttatttcgtcctacgagatggcgcagctggcgtgttcttggcagccaatacattccctaaatcgcgtgaaacccgtgcaccgctggtagaagaattggttcgctttaaagaccgtttgcctgagaagttgcgttatctggctgatgcccctgtggttgataaagagggtaataaaaccctggtccgtttcagccgtaaaacgaagcaacagtatgtttcatcagagaaagatggcaaagcaacaggctggtctgctttctatattgatggtaaatgggttgaggcaaagaaataa

SEQ ID NO: 41711 - DNA, 753 bp, Yersinia pestis
atgagtgaccttacctcaacaatactttttgaacatccgctcaatgaaaagatgcgcacttggctaagaatggagtttttattacaacagctagaaagccaccgctcattagataatattgccaatgcattaacctttttccgtaccgcatcggatttaattgatgtacttgaacgcggtgaagtccgtactgatctgttaaaagaactcgagcgccaacagcaaaaactacagcaatgggctgatatacccggtgttgacgtgtcattagtagactctctgcgcaatcagttaaaaagccgtgccgccgtattaatgtcagccccgcgtatcgggcagtcactaaaagaagatcgcttgatcagtgtggtccgccagcgcctgagtatccctggaggatgttgtagttttgatttaccgacgttacatgtctggttacatcaaccgtcagaacaacgagaccaacatatcaataaattgctagcaagtctggcccctcttcaccagtcactgacgatcattttggacttaattcgccagtcatgccctttacgtagccagataagtttaaatggtttctttcaggataatgctgggggagctgacctgctcagattacgtctaccgctcgatccacaactgtatccacaaatttccggccataaaacacggtatgccattcgctttttagcgcttgatagtgaaaatggcaccgttccggcccgtttatcgtttgaattagcctgctgctga

SEQ ID NO: 41712 - DNA, 2349 bp, Yersinia pestis
atgcaattaattgagatagagaatgaggttttatcgggccaggatgcttttcctctctccttcaagacgcaggaaaaagtgtcagggaatccatcctaccaactggtatttcaggtagcagaagcggatctcgatctggtcagtttgctgggggaaatcatcaaagtcaggattgagttacctgactcagccggctaccggaccttttttacctatgtgatcgccggtgctgatgaagggcaacggcaagacaaatttgtttacagcctggaactgagtacctggacgtggtttttgatgcaaaaccgcaactgccggatatttcaggacctgaatattatcgatattatcgaacaggtattctccaaatataactttgcggattaccgttttgatatcgtcggtaactatcgattacgcgagtactgcgtacagtttgcagaaaccgatttcgactttgttaatcgtctgatggaagacgaaggcgtttggtattacttcgaacataacgaagataagcacacgctggtcatgacagatcagcaacaattccctgtattggaagggcattatgcagaactgagtttcctgcctgacagtgaagagatgcgcgccatccgtgaggggatacagcgtattcaacgctcacaacgcatccactccagcgaaattgtcttacgtgacttcgatttccttaatccacgcaatacattacaaacccatatcgaagaaagccgccaacacctgcaaggcgtgccactggaatggtatgactacgcggcgggttacaccgatccccagcatggtgagagcatcgcccgtttacgccttgaagctatacagagtaatgggcagctcttgtctggtgaaagtaatgccacaggattagtgccagggcgctcttttgctctggtacagcaccctgataacaaccgtaatcggggattcaaactgatcagttgtgactacagttttgtccaggatgggccggacagtgcgagccagggacgtaatgtcgcctgtaagtttaaggcattgaatgatgacgtcgtttatcgtccacaatgtgtcacgccaccgccaaaggtccctggtgtgcaaagtgccacagtggtcggtgcgcgtgaatcagaagtgcataccgataagttcgcccgtattcgcgttcactttcactgggatcgttataaaaccaccgaagatgatagctcctgctggatccgcgttgtacaggcgtgggccggtaaaggctggggcgtcctggcgatgcctcgggtcgggcaagaagtgctggtcaattacgttgacggcgaccttgatcgcccgatggtgaccgggatcgtctacaacggtgagaacccaccgccttaccgtttacctgaccacattaactactccggttttgtctcacgctcactgcgctttggtcagccacaacacgccagccagcttaccttcgatgataatcggggcaatgagcggatcatgctacatgctgagcgcgacttacaaagaacggttgaacgtaacagtgcgacggccgtcggtcaggataaatacgacacggtggaacggacggccacggagtggatcaacaaccatatctcctacaaagacttcagtttctcggtgacgggcatgagtgtctccgcgacgggcatcagtgtctcgacaacgggaacgagcttatctgtcaccggcatgagcaccagcgtcacgggtgtcagtgtgggtttcaccttgatagggacctcctttacgggggtgagcacatcgtttaccggtgtcggtacctccttcaccggggccagcaactcgctaaccggtgtcagcaactcgatgaccgggtgtagttcctcctttaccggtactagcaatagcatgacaggcagtagccatagcatgaccggcatgagcaccagcatcaccgggcatagcatgagtcagacgggttccagtagcagcatcaccggtgacagtacctcctttaccggcagcagcgtcagcagtacgggcagcagcgtcagtacgaccggtgtcagtaccagcactacggggagtagcacctcgactaccggttgtagcgtcagtactacgggtagcagcacctcgactaccggtaattcagtcagcatgaccggtaacagcaccagtaccacgggatgcagtatttccacgacgggcagcagtattgggacggtaggaagcagtatcagcaccacgggcagtagcgtcagtaccaccggtagcagtatcagcaccacgggattatccgtcagttataccggcgctcaatattccgatgtgggtgtcgatctgaaaaccgttggcatgcaaagcaaaaactga

SEQ ID NO: 41713 - DNA, 1104 bp, Yersinia pestis
atgacaccgtccgacacccctattatgcctcccgacagtccacgtcggattattggccggcactttacacagcgtcagttgcagcagttaacgctgtctgaggtttattttattcaatgcaccttcacggatatttcgtttgccgagattgcggtacgcaatattcattttgaaagttgtcattttactcacctgcggctggacggtggcagagtggaaaactgcagtttccgtttctgtaagttcaatgacgtttcagcgcaaggcgtttccatactcaatacctcatgtatagaggtgcaatggcagggatgctatctcacggggtgcttaattgagcgctggttgctcaccagttgtcagctcgatgatgcccaattgcaggatatccagcttaattattggaccgtgcaagacaccccgatgactcatctgacgatgagtgacagcaaaatgcaagattccagttggcatggctgcactatccagcagtcagtgtggaaaaacagcgaactcatacgtcaggtgatgggcagttgtgtactgaaagagtgccaatatcaagcgattcaaagcgatacggtggtatggagtcagtgccagcttgagcaggttgattttcggcaccagccgctggaaaacagtaatttccacaaaagcacactaacacagtgcgggttcagtgacgctaatttggctgccgcgctgttcagtgaagcgacactcgagggctgtgacttcaacatggcgcaattagcggcggcgcagtttgttgatgccacattgcgcgattgcaattttgacaccgccgatttgcaaaacgcctctttgctacgggccaatctgacgcgatgtcacttaacgcaggtcaatttaaccaaagctgatttgcgcagttgcatgttgagcgagtcgtcgttacaggccagtaaacttagcaaaacccgtatccacggcgcgcaaatacccacgctggacacaccgctacaaatgccggatcccttgctgagccagattgataactggtatggccatcatcaacccggtccaaaaaataaccctaaattcccttcgataccttcaggagccagccgctatgtctag

SEQ ID NO: 41714 - DNA, 762 bp, Yersinia pestis
atgtataacatggcaaaacgagtcactatcggaacggttattttattattgccaacgttagcgatatggctttccgattggcagtggcaaccagggggaaataacacgtggttaaaaggttttttttgggtgacagaaacggtaactgcaccttggggcatactgaccagtgtgttgctttgtagttggttcttgtggtgcttgcgggttcgctttaagcctgccgttgggctgtttgtggtattaggcgcggtgattgttctcgggcaaggtgtaaaatcgttgattaaagagcaggtacaggaacctcggccatttgttgcctggcttgaagccgagcatcatattaataatcgccttttctattctttaccgcgtgccgaacgcagtgagttagtcaggcagcagttacaagaccaattgattattcctgtgtggttgagccgtcactggcagtttgagaccgggttctctttcccgtcaggacatactgtatttgccgccacttgggcattattagccgttgggctgctatggccacggcgacattataaaacggtcgttttactgatgttatgggcacaaggtgtgatggcgagccgcttatttttaggtatgcactggccgcaggacctgattgccgcgacgctcatcagtggcgtcttggccgctgtggcgtgtggactcctccagcatgggttcggccttctggatatcccgcaatcagaacaaaaagagagcgaaaaacgggggcatgagtaa

SEQ ID NO: 41715 - DNA, 1260 bp, Yersinia pestis
atggctctgagtgatgtgaaggttcgtacagccaagcctgaagcaaaagcctataaacttaccgacggcgaaggcatggtgttactggttcaccctaacggctcgaaatactggcggctacgctatcgctttgacggtaaagaaaagatgttggcgttggggaagtaccctgaaatatcactggctgatgccagggcacggcgtgacgaagctcgtaagcagttagctaatggtgtggacccaagtgagagcaagaaagccgttaaggtagagcaggagcaagaagcgataacttttgaagtggtagccagagagtggcatgccagtaatcgtcaatggtcagaagctcacagtgctcgagtactcaaaagcttagaggacaatctctttcaagccattggcaaacggaatatcgcagacctcggaacccgtgatcttttacctccaattaaagccgtagagatggctggacgtcttcaggtggcttcccgcctgcaacaacgaaccacagcaataatgcgctatgcagttcaaagcggtttaattgattacaaccccgcgcaggagatggcgggcgctgttgctaccggtaaaagaaagcaccgcgctgcactcgagttaaaccgtgtttcagagttacttcatcgcatcgactactacagtggcaggccactcactcgactagcggtagaattgactttattggtctttatccgttccagtgaattacgcttcgcccgttggtcagaagtcgattttgaaactgcaatgtggacgattccgggagaacgtgaaccactggaaggtgttaagcattcacatcgaggttcaaaaatgcgcactccccatcttatccccttatcccgtcaagctctcgccattctggaaaagatcaaaagcatgagtggaaaccgtgagctgatctttatcggtgatcacgacccacgtaaaccgatgagtgaaaacacggtaaacaaagccctacgcgtgatgggatatgacacgaaagttgaagtctgtggccacggtttcagaaccatggcttgtagttcattgattgagtctggattgtggtcgagggatgcagtagaacggcagatgagtcatcaggagcgcaactctgtgcgtgcggcttatatccataaagccgagcacttagatgagcgcagattgatgattcagtggtgggctgattacttggatgcgaatcgggagaagggggttagtccgtttgattttgcgaagttgaatacgagctga

SEQ ID NO: 41716 - DNA, 696 bp, Yersinia pestis
atgctcaacgaactgaagcagcaagttcttgccgctaatcttgctctaccgcgccataatctggtgacattcacttggggtaatgttagtgctatcgatcgccaaaagggtttactggtgattaagccttcaggtgtggaatatgcgtccatgacactggatgatatggtggtcgtggagttggagagcggcaacgtcgttgagggcagcaaaaaaccatcatcagacacggatactcaccgcgtgctgtatcttaatttcccccaaattgggggcatagtgcatacccactcccgtcatgcaactatttgggcgcaggcggggctagacttgcctgcttgggggacaacccatgctgattacttctatggatccatcccctgtacccgtttgatgacacatgaagaaattgcgggtcgttatgaatgggaaaccggtaatgtcatcgttgatactttccatgaaaggggcatcaccccagatgctgtacctgcggtgttggtgaactctcatgggccatttgcctggggtagcagtgcggagaatgcagtacacaatgcggtagtcttggaagagttagcgtatatgggcattttctcgcgtcaattgaacccgcagttgggcgatatgcaaccgcaactgctggataagcattacttacgtaaacatggcaaggatgcgtactacggccaataa

SEQ ID NO: 41717 - DNA, 1512 bp, Yersinia pestis
atggagttcagtgtaaagagcggcagcccggaaaaacagcgtagtgcctgtattgtagtcggcgtttttgaacctcgtcgtctatctcctattgccgaacaactcgacaaaattagtgatggctacatcagcgcgttattgcgccgtggtgaacttgaaggcaaagtcgggcagacactgttactgcaccatgtgccgaacattctttccgaacgcatcttgttaattggctgtggtaaagagcgtgagcttgatgagcgccaatacaagcaagtgatccaaaagaccatcaatacccttaatgacacgggttcaatggaggcggtctgcttcctgactgaactgcatgtcaaaggccgaaatacttattggaaggtgcgtcaggcggtagaaacagccaaagaaacgctttacaccttcgatcaacttaagagtaataaaaccgagcctcgtcgcccactgcgtaaaatggtcttcaacgtgccaacccgccgtgaattgaccagtggcgagcgtgctatccagcacggtttagctatcgcttccggtatcaaagcggcaaaagacttgggcaatatgccacccaatatctgtaacgccgcctatctggcgtctcaggctcgccaattggcggatgctttcagtaccaacaccgtcacccgcgtgattggcgaacagcagatgaaagagctgggcatgcacgcttatttggctgtcggccatggttcgcaaaacgaatcattgatgtcggtgatagaatataaaggcaacccaaataaagatgctaagccaattgtgctagtgggtaaggggctgactttcgattccggtggtatttccatcaagcctgccgaaggcatggatgaaatgaagtacgatatgtgcggtgcagcaaccgtttatggcgtgatgcgggtcgttgccgagttgcaattgccactgaacgtggtgggtgtactagccggttgtgaaaacatgccgggtggccgtgcttatcgtcctggtgatattctgaccaccatgtctggtcaaaccgtagaagtgctgaataccgatgccgaaggccgtttggtgttgtgtgatgcgctgacatacgttgagcgtttcgagccagagttagtcattgatatcgcaacactgaccggcgcgtgcgttgtggcgttaggcaatcacctcaccggtttgatgtcgaaccacaacccgttggctcatgagcttatcggcgcatccgaacaggcgggcgaccgcgcatggcgcttgccactgggtgaggagtactacgagcaactggactctaatttcgctgatatggccaatattggtggccgcgcgggtggggctattaccgcaggctgtttcttatcgcgcttcacccgtaaatacagttgggcgcatctggatatcgcgggtactgcgtggcgttcaggtaagaacaaaggcgcaactggccgtccggtcgcgttgttgtctcagttcctactgaatcgcgcgggcttaaacggcgacgattaa

SEQ ID NO: 41718 - DNA, 666 bp, Yersinia pestis
atggaactttatctcgacacggcagatgttgcggcggtaaaacgattagcgcgggtgctgcctttgcagggtgtaaccactaacccaagtattttggcaaaagcgggcaaatccctatgggaggttttgcctgcgctacgtgacgcactgggagggacggggaagttatttgcccaagtgctggccagtgatagcgaacgtatggtctctgaggcggtacagctgtcagagcagatccctggattagtgattaaaatccctgtcacggccgaagggttggcggcgatcaaaaaattgaagacgatgtcaattccaaccttgggtaccgcggtatacggcgcagggcaagggctattatccgtgttggcgggagcggaatatgtcgcaccgtatgtcaatcgactggatgcgcaagggagtgatgggattgctatggtacgtgagttgcagcagttactcacgttacatgccccaaacgctaaagtgttggcggccagttttcgtacacctcgccaagtactggattgtttgctggccggttgccaatcggtcactatcccggtcgatgtggcagagcagtttatcagtacgcctgcggtaaaagcggcgatagaacaatttgagcaagattggcagggggcatttgggacgacgatgttgagttag

SEQ ID NO: 41719 - DNA, 306 bp, Yersinia pestis
gtggttaactctggtattccgtaccgctcccggccaataaccggggggaagattactcgctgcgtgccacttactcaggtcgaagcagccccaaccacgctgtgggcatgggtacggctgattacacatcggctggcgcaaagcttcaggctgatggttggggtgcaggattacagtaattatgtcaatcatatgcgccataagcatcctgacacccccccaatgactgagcgggagttccatcgttattgcctggatgcccgcttccccagcgaagggggaaaactggggaaatgcccgtgctag

SEQ ID NO: 41720 - DNA, 993 bp, Yersinia pestis
gtgtttaaacacattatttcctgcttattactgatatcagccacctccgcgcttgccgcagaaaaacctacgctgacggtctatacctacgactcctttgctgctgactggggcccaggcccggcgattaagcaggcctttgaagctgaatgcgattgccagctaaaatttgtggcactggaagatggcgtttcactgctgaaccgcctgcggatggaaggtaaaaacagccaggccgatgtgattttagggttggataacaatctggtacaggcggcagaacaaaccggcttgtttaccccaagccaggttgatacccgtaacctgaccctaccagagccgtggcagaataagacatttgtcccttacgattatggctattttgcttttgtgtataacaaagaaaaactgaaaaacccgccaaaaagcctgcacgaattaatcagcagtaaagaaccgtggaaagtgatttatcaagacccacgtaccagcactccaggtctgggtctgatgctgtggatgcaaaaagtttatggcgatcaagccccgcaagcatggcaacaactggcgcagaaaacggtcacagtcaccaaaggctggagcgaggcgtatggcttgttcctcaagggggaagcggatttagtgctgagctacaccacctctccggcttatcatttaattgcagaaaagaataacaactatgcagccgccgatttcagtgaaggccactatttacaagtagaagtcgccggccaactggccgccagcaaacaacctgaactggcgcagcgctttatgcaatttatcgtgacccctgcgttccaaaaccacattccaaccggcaactggatgtatccagtgatcaaaatggatctacccgccgggttcgagacactggccgtgccacaaacagcgttgcaatttgatgctaaagacgtggcggataaccgcagtaaatggattcaggcatggcaatccgccgtcagccgttaa

SEQ ID NO: 41721 - DNA, 1662 bp, Yersinia pestis
atgtctacctcgcgcctgcaacaacaatttattcgtctctggcaacgctataacggacagtcaacggaaaccacattgcaggcgctggctgaagtgctgaattgttcacgccgccatgtacgttctctgctgggcaagatgcagcacgcgggctggctcgattggcaggctgaagctggccgaggaaaacgctcacaattgatcttcttgcgttccgggctggcgctgcaacaacaacgggctgaagagttgctggagcaggatcatattgatcagttagtccaactggtcggtgataaaaaagcggtacgccaaatgttgctgtcccagttgggacgtagcttccggcaaggaaaacatattctgcgggtgctctattaccgcccattggagaacttattacccggcaccgccctacgccgctctgaaacccatatggtgcggcaaatttttaacgggctgacacggataaatgaggaaaatggggaactcgaaccggacttatctcatcactggcaagcgatcacccccttgcattggcgcttttatttgcgaccagccattcatttccaccatggccgggaactggaaatgagtgatgtgattagcagcctgacccgcctgatcccccaacccctgttttctcatattgcggaggtgcgttcaccgacaccttatgtgattgatgtttatctccattcgccagatcactggttgccatggctactgggcagcgttcacgccatgattttgccgcaagagtgggaaactcagcccgattttcaccgacagcctattggtaccggcccttattccgtgatccgcaatcatcacagccagctgaaaattcaggcattcgataactattttggtttccgggcactgattgatgaggtcaatatctgggtactcccagaactctccgaagaattggtgtattccggggtgcaattgcaagccgacgatacgggtaaaaatgagctggagagccgtttagaggaaggttgctacttcttactgttcgaccaacgatcccctcaggcctgcaccccggagatccgccgttggttatgtgaattgatcacaccgatagcgttactcagccacgccgctcccttctatcaacgttactggtcaccggcctatggcatgttgccacgctggcaccataaccgactcaccactcaagagccaaaacccgaagggctgaacgagctgacactgacgttttacagcgaacattcagagtttgatgccatcagccagacactgacccagttattggctgctcagggcgtgacgttaaagatacaagtcttggactacacccgctggtatcagggggatgcacaaagcgatatctggctcggcagcgctaacttttacttgccactcgaattctcgctatttgccaccctctatgaaatgccgctactacaacattgtctgagcgaagaactgcatcaagatattgaatcctggcgcaataataccttactcatggccgattggagccaacgactggtaagccagcatcaattccatccgctatttcatcattggttagaattatacggtcaacacagtatgcggggagtgcgtatgaatacactcggctggtttgattttaaatccgcatggtttaccccaccagaggcctag

SEQ ID NO: 41722 - DNA, 450 bp, Yersinia pestis
atgaaaaacgctaccttctacctgctcgaacacgacacgcctgccggtgagctgcgagcgcacgaagcgttggcctgcgagatcgcggctgaacgttggcgtgcgggcaagcgggtgttgatcgcctgtgaaagccaggaacaagctcagcggctggatgaagcgctctggcagcgcgctcctgaacaatttgtgccacataatctggccggtgaagggccaaaatatggcgctcccgtcgaactggcgtggccggaaagacgcgggaattcaccgcgcgacctgcttatcagcctgctgccagaattcgcaggttttgccaccgctttccatgaagtggtagacttcgtgccttatgaagaaaatttgaaacagttggcgcgcgaccgatataaatcttatcgcagcgtcggcttccacttgaccacggcaacgccgccaactaattga

SEQ ID NO: 41723 - DNA, 2898 bp, Yersinia pestis
atggaaaatacaccttctcatatcaacaaaactgagccgtccctcgataaaacatacagcccgcaggaaattgagcagccgctgtatgaacattgggagaaacagggttatttcaaaccaaacggcgataccagcaaagaaagctactgcatcatgatcccgccgccgaacgtgaccggcagcctgcatatgggtcatgcattccagcagacaatcatggataccttgattcgctatcagcgtatgcaggggaaaaataccctctggcaggcaggtactgatcatgcaggtatcgcgacccagatggttgtggaacgcaagattgccgccgaagaaggcaagacccgccacgattacggccgtgatgcgtttatcgataaaatctgggagtggaaaggcgaatccggcggcaccattactcgccaaatgcgtcgtttgggtaactccgtggactgggaacgtgaacgtttcactatggatgaaggcttgtccaacgcagttaaagaagtgttcgtgcgccttcataaagaagatctgatttaccgtggcaagcgcctggtgaactgggatccgaaactgcgtactgccatttctgatctggaagtagaaaaccgcgaatccaaaggttccatgtggcacctgcgttatccgctggccgatggtgccaagactgcggaaggcaaagattatctggtggtggcaaccacccgtccagaaaccgttctgggtgatactggtgtcgcggttaacccggaagatccacgttataaagatctgatcggcaaagaagtgatcctgccgctggttggccgccgtattccgatcctcggtgacgaacacgccgatatggagaagggcaccggttgtgtgaaaatcaccccagcccacgactttaatgactatgaagtcggtaagcgccatgccctgccaatgatcaacattctgaccttcgacggggatatccgctcagaagccgaggtatttgatacccacggtgaagcaactgatgcattcagtaacgctattcctgcgcagttccaagggctagaacgttttgctgcccgtaaagcggtggtcgcggaattcgagaaactcggtctgttggaagaggttaaacctcatgacctgacagtaccttatggcgaccgtggcggcgtggttatcgaacccatgctgaccgatcaatggtacgtgcacaccgccccgctggccaaagtcgcgattgaagccgtagagaacggcgagatccagttcgtccctaaacagtacgaaaacatgtattactcatggatgcgcgatatccaggactggtgtatctcacgtcaattgtggtggggccaccgtattccggcctggtatgacgagcagggtaatgtgtatgttggccgcgacgaagccgaagtgcgtcgcgacaataatctgggcgcagaggttgctttgcgtcaggacgaagatgtgttggacacctggttctcatccggcctgtggacattctctacactgggctggcctgaacaaaccgacgcactgaaaaccttccatccgaccagcgtggtcgtcagtggttttgatattattttcttctggattgcccgcatgatcatgctgaccatgcactttatgaaagatgaaaatggtaaaccacaggtgccgttcaaaacggtctacatgaccggtctgatccgtgatgacgaagggcagaaaatgtccaagtccaaaggtaacgtgatcgatccactggatatggttgacggtatctctttggaagcgttgctggaaaaacgtaccggcaatatgatgcagccacagttggcggagaaaattcgcaagcgcactgaaaagcagttcccgaacggtatcgagccgcacggcactgatgcactgcgcttcacgttggcggcactggcctcaactggccgtgatatcaactgggatatgaaacgcctggaagggtatcgcaacttctgtaataagctgtggaatgccagccgtttcgtgctgatgaataccgaagggcaggattgtgggcagaacggtggcgaaatggtgttatcactggctgaccgctggattttggcggaattcaaccagaccatcaaagcctaccgtgaagcgatggacacctaccgcttcgatctggcggccggtattctgtatgaattcacctggaaccagttctgtgactggtatctggaactgaccaagccggtgatgaacagtggctctgaagctgaactgcgaggcactcgccacacgctgattcaggtgctggaagccttgctacgcttggcgcaccccatcattccttacatcactgaaactatctggcagcgggtgaaaaacctgaaaggcattactgcagacacgattatgttgcagcctttcccagaatatgatgccagccaagtcgatgaacaagcactcagtgatttagagtggattaagcaaaccattatcgcggtgcgtaatatccgggcggaaatgaacattgcaccgggtaaaccacttgaggtcatgctgcggggtgccaacgcacaagcacagcgtcgggtgctggaaaaccagagttttatccagtcattggcgcgcttgtcctctctcaccttgctagctgaaggtgataaaggcccagtatcggtcactaaattggttgaaggtgctgaagtgctgatcccaatggcaggcctgatcgataaagccaccgagttggatcgtctggcgaaggaagtggcgaaactggatgctgaaattgagcgcatcgaaggcaaactgggtaacgaaggttttgtggcgcgggcgccagaagcggtagttgccaaagagcgtgaaagactggccgcttgtgctgaagccaaacagaagttaattgagcagcaggcaactatcgctgcactataa

SEQ ID NO: 41724 - DNA, 504 bp, Yersinia pestis
atgaccacaaccacacctatccggctcctggtgcgccccatcaccgcaggagataacctcgccattgccaatgttatccgtgaggtttcggcagaattcggcctgactgcggacaaaggctataccgtgtccgatcctaatcttgatcacttgtatgaattgtacagccagccacgtagcgcttattgggtgattgaggtggatggtcacatcgcgggtggtggtggtgtcgcgccactgttgggcggtgaagccgatctatgcgaattacagaaaatgtattttctgccaatactgcgtggtaagggtttagcgaaacagttggcactacaggcgttggcatttgcccgccagcagggatttggtcgctgttatttggaaaccactgccagcctgaccagtgctgttggtctgtacgaaagattaggttttgaacatattggcggtgcgatggggaataccggccatgtagattgcgaagtgacgatgctgaaaacactttaa

SEQ ID NO: 41725 - DNA, 1008 bp, Yersinia pestis
atgaatcagttctataaacgtcactttctgaggttgttagattttacccccgctgaaattattgccttgcttgatttagctactgaattgaaaaaagacaagaaatctggctgtgaacagcaaaaattggtcggtaagaatatcgcgctcatcttcgaaaaagactcgactcgcactcgatgctctttcgaagttgccgcatatgaccaaggtgctcgcgtcacttatctcgggccagggggaagccagattgggcataaagaatcaatcaaggataccgcccgtgtattaggccgtatgtatgacggcattcaatatcgtggctatgggcaacgcgtggtggaaacactcgcagaatttgccggcgtaccggtctggaatggcctgaccgatgagtttcatccaacccaactcctggctgatttgctgactatgcgggaacacctgcccaataaatcgctgaataaaatgacgttggcgtacctcggtgatacacgtaataacatggggaacagcctgttagaagcggccgcactggtaggaatggatttacgcctagtcgcaccgaaagcctgttggccagaggaagccttcgttatcagttgccaggcactggcacagaaaacggggggcaaaatcaccctgacagaagatattgccgagggagtgaacggcgctgattttctttataccgatgtctgggtctcgatgggggaacccaaagaggtctggcaggaacgcatcaacttactcaaaccttatcaggtcaatatgcgtgtactgacgctgaccggtaaccctcaggtaaaatttctgcactgcctccccgccttccacgatgaccaaaccaccatcggtaagcagatggccgaacaatatgatttacccggcggcatggaagtgactgaagaggtgtttgaatcagctcatagcattgtatttgatcaggcagaaaaccgcctgcataccatcaaagccgtgatggtcgccacgatgagcaaaatataa

SEQ ID NO: 41726 - DNA, 1431 bp, Yersinia pestis
atgggcacaacatcatctcagagcaaaacgttataccaaaaattgtacgatgcgcacattgtgcatgaagcccccaatgagaccccattgctgtatatcgaccgccatttagtgcatgaggtcacctcaccgcaagcctttgatggtttgcgtgccatgggccgcccggtgcgtcaaccgggtaagactttcgctaccatggatcacaacgtttctacccaaacaaaagacattaacgccagtggtgagatggcccgtattcagatgcaagagttaattaaaaactgcgctgaattcggtgtctcattgtatgacctgaaccaccctttccaagggatcgtgcatgtcattggccctgagcaaggcatgacgttaccgggcatgaccatcgtttgtggtgactcacataccgccactcacggcgcattcggctccttggcctttggtatcggcacctcagaagttgagcatgtgttggcgacccaaaccctgaagcaggggcgagccaaaaccatgagaatcgaagtgaatggcactgtcggcgcgggtattacggctaaagacatcgtgctggcgattatcggtaaaaccgggagcgcaggcggtactggccatgtggtggagttctgtggcagcgcgattgaagcgttgagcatggaaggccggatgacattatgcaacatggcgatcgaaatgggggccaaagccggtttggttgcccctgatgacaccacctttgcctatctgaaaggccgtcagttcgccccaactggcgagcaatgggaacaaggtgttgcctactggcgtaccctgaaatctgatgctgatgcccaattcgataccatcgtgacactggatgccgctgatatcgcgccacaggtgacgtggggaaccaatccgggtcaggtcattgcggttaatcaaatcattcctgcccctgagtctttcagcgatccggtcgaacgtgcatcagcagagaaagccttagcttatatggacttgcgccccggcattaaattgactgaagtggcgattgataaagtctttatcggctcttgcactaactcacgtattgaagatttacgtgcggcagcggctattgcccaagggcgtaaagtcgccaagggtgtgcaagctatcgtggtgccaggctccggcccggtgaaagcgcaggcagaagcggaaggtttggataagatctttatcgccgcaggttttgagtggcgtctgcccggttgctcgatgtgtttggccatgaataatgaccgcctggagcccggcgaacgttgtgcctccaccagcaaccgtaattttgaaggccgccaaggccgtggggggcgcacacatttggtcagcccagccatggccgccgctgccgccgtcagtggtcattttgctgatgttcgcgaattatccgccaccacccactaa

SEQ ID NO: 41727 - DNA, 1728 bp, Yersinia pestis
atggagatgttgtcaggagccgagatggtggtccgatcgttaattgatcagggcgttaagcatgtattcggttatcccggcggggccgtacttgatatttacgatgccctgcacacggtcggaggcatcgatcacgtgctggtgcgccatgaacaaggtgcggttcacatggccgatggttatgcgcgggcaacgggcgaggtcggtgttgtactggtcacgtctggtcctggtgcaaccaatgcgattaccggtattgcgaccgcctatatggattcagtgccaatggtggtgctttcaggccaagtgccaagctcattgattggttttgatgccttccaagaatgtgacatggtggggatctcccgcccagtggtcaaacatagcttcttggttaagcgcacagaagacatcccgatggtgttgaaaaaagccttttatctggcatccactggccgtcccggtccggtggttatcgacttgccaaaagacattgtcggcccagcagtaaaaatgccttacgcctatccagagcaagtcagtttgcgctcctataatcctacggtgcaaggccaccgtgggcagattaagcgtgcactgcaaacgattatggcggctaaacggcccattatgtatgtcggtggtggtgcgattaacgccgcttgccatgaagaattactgatattggcagagaagctgaacttaccggtaaccagctctctgatggggctaggcagtttccctggtacgcatcgccaaagtgtcggcatgttggggatgcatggtacctttgaagccaatatggccatgcacaatactgatctgatttttgccgtcggtgtccgttttgacgatcgtaccaccaataatttagcaaaatattgccctgatgccacagtgctacacattgatatcgatccgacatcgatctcgaaaacggtcaccgccgatatcccgattgtgggtgatgccaaacaagtactgacacaaatgttagatttgttgtcgcaggtcggctgtacacaagattttgatagcttgcgcgattggtggcaatccattgaacaatggcgcacccgtaattgcttgggctacaacaaagacagtgggaaaatcaagccacaagcggtgattgaagccttacatcgtctgactaaaggcgatgcgtacgttacctctgatgtgggccaacatcagatgtttgcggctctttactatccctttgataagccacgtcgttggattaactccggtggcttgggcacgatgggctttggcttgccagcggcgcttggggttaaattggctttgcctaatgaaaccgtcgtttgtgtgaccggtgatggcagtatccagatgaatattcaggagttatcaaccgcactgcaatataacttgccagtgttggtattaaacctgaataaccgctatctggggatggtgaaacaatggcaggacatgatttattcaggccgccattctcagtcgtatatggattcgctgcctgattttgtcaagttggctgaagcctatggccatattggtgtggctattaatacgccggatgagctggaaagtaagctggcagacgcactgacacaattatccgaaaccaatcgtttggtctttgtggatgtgactgtcgatgaaacagaacatgtttacccgatgcagattcgtggtggtggcatggacgaaatgtggctaagcaaaacggagaggacttaa

SEQ ID NO: 41728 - DNA, 495 bp, Yersinia pestis
atgcgccgccggattttatcagtactgctggaaaatgagtcaggtgcactctcacgggtggtggggctgttttctcagcgtggctataatatcgaaagcctgacggtcgcgccaaccgatgacccaacgctttcccgcatgaccatccagaccgtgggtgatgccaaggttctggagcagattgaaaagcagctgcacaagttggtggacgtcttacgtgtcagtgagttggtttctggctcacatgttgagcgcgaaatcatgttggtgaagttgcaagccagtggttatggccgtgaagaggtgaagcgttgtgcagaaatcttccgtgggcaaattgtggatgtgaccgcaacgctctataccgttcagctagcgggtactagcgagaagctggatgcgtttttgaatgcggtgcgtgaagtcgctgaaatagtggaagttgctcgctctgggattgtcggcgtatcgcgtggtgacaaaatcatgcgttaa

SEQ ID NO: 41729 - DNA, 435 bp, Yersinia pestis
gtgattaatggccccggcacccgctgtacgttgttcgtttcgggctgcgtgcaccaatgtgtcggctgttataacaaaagcacctggcgactcaattccggcaagccgtttacccgcgagatggaagataagatcatcgccgacctgaacgactcgcgtatccggcggcaagggctatccctttccggcggcgatccgttgcatccacaaaatttgtccgccattcttcaactggtacaacgggtgcaccacgaatgcgatggaaaagatatctggctatggaccggctataccttggctgaactcactgccgaacaacagcaagtggttgatttgatcaacgtcctgatcgacggcaaattcgtacaagacctgaaagatccttcacttatctggcgcggcagcagcaatcaggttattcactgtttacgttaa

SEQ ID NO: 41730 - DNA, 2100 bp, Yersinia pestis
atgttcatgcgatctacgttgataccctctacgttcatactgtccacactactgctgccggctgtcgtgttggcagaagatacgataatcgttgagagaaatagatcgcaaactgatagctatcaagcgaccaccagcgtgacagccaatcgatcgccagccaacattatcgataccccgcaaaacgtgactgtcgtgacacatccggtgttggaagattatgatgtgaccaatcttggcgaggcgctttattttgtcagcgggattacccaatccaacacgctgggtggcacgcaagatgcgctgattaagcgcggtttcggcaataaccgtgacggctcaattctgcacgatggcatacgctcaattcaggcacgtaacttcacgcccaccagcgaacgcgtcgaggtgctgaaaggcccctcctccatgctatacggtatgaatgaaccgggtgggctgatcaatgtgatcagcaaaaagccacaactcgatccccatgtgcatttggaagccaacgccagtagtttcaagggtggcggtggccaacttgatgtaaccggccccttgggggaatccggctttgccgggaggctgattatcgatcatcaggagaccgattactggcgtaactttggccgtaaccgccagactgtggtcgcgccatcgcttgactggtacggtgaaaacaccaccgtacacctcgcttgggaacgaatggagtatttggtaccgttcgaccgtggcacggtgattgacccacgcactggcaaacccgtcgacacgccgcgtgatcgccgtttcgacgagagctataacgccacccgcggcgatcaagacaccgtcacgtttagcatcaaccacgatctgaacgagttctggtccacacagctaaattatgctttcagccgcaatagctatagtgataatcaggcacgcgccactgcatttaacgctgaaaccggcgtattgacccgccagtcggatgctaccgctaacgccaagagccattcgcaggcggtgcagtgggtagtcaatggtgatctcgattggggtttcactcatcaccaactgatgtttggtatcgattatgaagcccgccgcgttttccgtggcgacatgatacgcggcagcaaaaacaacgggtttaatgtctatgacccaatttatggcactctgcccccatccacagccgtcagtgctgctgatagcgatcagcgggaaaatatcgatagccgcgcgctgttcattcaagactcgatgcgcctaaacgagcactggctattactcggtggcctgcgctacgacagcttcgatgtgatggcaggtaaaggccgcccattcaaaaagaataccgacagttccgatagccgcttggtgccgcgcgccggggtggtttacaacctgaacgactggtcaagcctatacgtcagctacaccgagtcctttaaaccgaatgtctctatcgccaccgccattgatgcgttaccccccgaatacggtaaatcgtgggaggcgggctacaaaattgatatcaacaaccgtgtaaccggtacgctcgcggtctacgatatccataaacgtaacattatggtcagcgagctggtagacggcgaaacagtcacacgtaccgccggtaaggcgcgttcacgcggcctggaactggatatggctggcaaagtgaccgactcactgagtctcattggcagctatgcctataccgatgcacgcctgactgaagacccggataacaatggtaacgacctacccaacgtggcacgccacactgcggcactgtttctgagccgggacttcggcagtacgtcattgatttcaggcgatgaagtgaaagcaggtattggcgcacgctatgtcgggaaacgtgctggcgacgccgccaacagtttctggctagataactacaccgtagcggacgcgtttatcgcctggaagatgccgctctccggctatcaactcaaatggcagcttaatgtgaaaaacctgttcgataagacgtactatccgtcgagcgctaacaacctgcgtatcgctatcggcgaaccacgtcaggttgtgttgcagggcagtatcgatttctaa

SEQ ID NO: 41731 - DNA, 459 bp, Yersinia pestis
atgtttcgtggtgcaacaatggttaacctcgacagtaaagggcggcttgccgtacctacccgttatcgggagtcactgaatgaggaatcgcaaggccagatggtctgtaccatagaccttcaccaaccatgcctgttgctttacccactgcctgaatgggaaatcattgaacaaaagttatcgcgtctgtcgagcatgaaccctgctgaacgtcgagttcagcgtttgctgttagggcatgccagtgaatgtcagatggacggcgctgggcgcttactgattgcagggacattgcgtcagcacgccgggctaaacaaagaagtgatgctggttgggcagttcaataaatttgagctgtgggatgaacagacctggtatcaacaagtcaaggatgacatcgacgcagaacagtcaactcaggaacctttgtctgagcggctacagggcttatcgctataa

SEQ ID NO: 41732 - DNA, 963 bp, Yersinia pestis
atggtagacaacaacaaaacggtagataacaactacaaacataccagtgtattgctggatgaggccgtaaagggcctgaatatccgtgataacggtatctacattgacggcacttttggccgcggcggccattcgcgtttgattttgtcccaacttgggccagaagggcgcttaattgcaattgatcgggatccagaagctatcgaagcggcgaaacagatcaccgacccccgtttctctatcgtacatggtcctttttctgatttagcacattatgtgcgggatctggatctcgttggccgtattgacggcatattgctggatttgggcgtttcatcaccacaacttgatgatgctgaacgcggcttctcttttatgcgtgatgggccgctggatatgcggatggacccttctcgtggcctgtctgctgctgaatggctgatgaaagccagcgctgatgacattgcctgggtgctgaaaaccttcggcgaagagcgctttgccaagcgtttggccaaggcgattgttgagcgtaacctcactcagcccatgacacggaccaaagagctggctgacctgatcgctaatgccagtccgtttagggataagcataagcatccagccactcgcagcttccaggctatccgtatttacattaacagtgaattggaagagatcgaacgtgcactcgatggcgcgcacgaggttttggcgcctgaaggccgtttgtcagtgatcagcttccactcccttgaagatcgtattgtgaaaaactttattcgtcatcatagccgtgggccacaggtccccgcaggcttgccattgacggaggcacaactgcgcagcatgggagggcgcacactgaaatcggttggcaaaatgatgccaggggatgcagaaattgctgaaaacccacgcgctcgcagctcggtactccgttttgctgagaggatcggtgagtga

SEQ ID NO: 41733 - DNA, 1764 bp, Yersinia pestis
atgaagacagcgcgccccgggaagttaaagcgtcaggaagaacaagccagctttattagctggcgttttgcgttgctgtgcggttgtattttactggcattggttgggctgattatgcgtaccgcatacctgcaagtgatcaaccccgataagctggtgcgcgagggggatatgcgctcgctgcgagtacaagaggtgccgacggcgcgtggcatgataagcgatcgctctggccgccctttggcggtcagtgtacccgtcaatgcggtttgggccgatccaaaagaactgattgaacagggggggatctctctggatacccgctggaaagccctgtcggatgcattagaaatccctttagatcaacttgccacgcgcattaatgccaatccaaaaggccgctttgtctatctggcccgtcaggtgaaccccgcgattggcgactacatccgcaagctgaaattacccggtatccatctacgtcaggaatcccgtcgctactatccggcaggtcaggtgatggctcacattattggtgtgaccaatatcgatgggcaagggattgaaggtgttgagaaaagttttgatcgctggctcaccggccaaccgggcgagcgaacggtgcgcaaagaccattatggccgtgttattgaagatatctcctctgttgacagccaggcggcgcataacctggtgctgagtgtggacgagcgtttgcaggcgttggtgtaccgcgagctcaataatgcggtggcgtttaacaaagcagaatcgggcacggcggtattagtcgatgtgaacaccggtgaagtcttggcgatggcgaacagcccgtcttacaacccgaataacctaaccggtacgccgaaagacgcgatgcgtaaccgggcaataaccgatatttttgaacccggctcgacagtcaagccaatggtagtgatgacggccttacagcatggtgttgtgaaagagaacagtgtgctgaataccttgccgtactttgttaacggtcaccagattaaagacgtggcccgttacgctgagctatccgtcactgggatcttacagaagtcgagtaacgtcggtgtttctaaactggcgttagcgatgccatcctcagcgttagtagatacttactcacggtttgggtttgggaaagcgaccaatttggggttggtcggagaaagcagtggcttatatcctaaaaaacaacggtggtctgacatagagagggccaccttctctttcggctacgggctaatggtaacaccgttacaactagcgcgagtctatgcaaccatcggcagcatgggggtctatcgcccgctgtcgataacccgagttgacccacctgtcgccggtgaacgcatcttccctgaacccctggtacgcaccgtggttcatatgatggaaagcgtggcactgcctggcggtggtggtaccaaagcggcgatcaaaggctaccgtatcgcgattaaaaccggtacggccaaaaaagtcggtcccgatggcaagtatatggatcgatacctcgcttacaccgctggcgttgcgcccgcgagtaaccctcgatttgctctggttgtggtgatcaatgacccgcaggcagggaaatattacggtggtgcggtttctgcaccggtattcggtgccatcatgggcggcgttttacgcaccatgaacattgagccagatgcgttacccaccggtgataaaagcgaattagtgattaatacaaaagagggttcaggtggcagatcgtaa

SEQ ID NO: 41734 - DNA, 1473 bp, Yersinia pestis
ttgcgcgacttattcgctccttgggggctagacgtcccggagcgggcgctacgggaaatgacattagacagccgtattgcagctgccggcgatttatttgttgcggttgttggccaccagacggatgggcgtcgctacatcccgcaagctatcgcccagggtgtggctgcaattgtggccgaagccgatggtgtcgcaccggatgtcagcgttgccgagatacatggcgtccctgttatttatttgcgtaatttgaatcagcacttatccacgctggctgggcagttttaccatcagcctggcgccgcattgcgtttggtcggtgtaaccggaacgaatggcaaaaccaccactacgcaattgttagcacaatggagccaggcgctgggcgaaaccagtgcagtcatgggcaccgtaggtaatggtttattagggcaggtgatacccacggagaacaccaccggttctgccgtagatattcaacatttgctgcgtaatctggttgatcaaggtgcgacttttgccgccatggaagtttcttcccacggtttgattcaagaccgtgttgctgcgttatcctttgcagccgtagtgttcactaacttaagccgcgatcatctggattatcacggcaatatgacgagctatgaggcggccaaatggctgctgttctccactcatcagtccgaacacaaaattatcaatgctgatgatgacgttggccgccgttggttaagccaattgccgcaggctgtcgccgtcagcatggcaggcaatgtccccaaaggctggaatggcccgtggttatctgccaacaaggtgatttatcacgataatggtgccagcatcgcgtttgattcaagctggggcgaaggcgagctagaaagccgtctgatgggcgctttcaacgtcagtaacttgttggtggcattagcgacgttactggttcaggggtatcccatggcgcagttgttagctgcagcgcctcatctgcaaccggtttgtgggcgtatggaagtgtttaatgcgccgggtaaaccaaccgttgtggtggattatgcccacacgccagatgcattagaaaaagccttggccgccgcccgtttacattgcaccggcaagctgtggtgtgtgtttggctgtggcggtgaccgtgataaaggtaagcgcccacttatgggcggtatcgcagaacaactggctgactgtgtcgtggtgaccgatgataacccacgcagtgaagagccacaggcgattgttgctgacattctcagtggcttgctggacgcggggcgtgtgcaggcgatacatggccgtgccgaagccgtaaccagtgccattatgcaagccaaagaagacgacgttgtcctgattgccggtaaaggccatgaagattatcaattagttggcaatcgtcgcttggattattcagaccgtgtcaccgtcgcgcgtttgttaggggggcaggcatga

SEQ ID NO: 41735 - DNA, 1377 bp, Yersinia pestis
atgattaaggtctctctgcgttttctggctagcttacttaatgctgaatatatcgttgctgaatcagtcagcgatgatattgagataactgaagtgaccattgatacccgtaaggtcactgctggttgtctgtttgttgcgctgaaaggcgagcgttttgatgggcatgattttgccgaagatgctattgccgcaggtgctggcgctttgctggtaagtaaacgcttactggtgggggggccgcagttagttgtcaaagacacgcgcttggcgttagggcaatttgcggcttgggttcgccagcaagttccggctcggatagtggcattaaccggttcatcgggtaaaacctcggtaaaagaaatggcggcagcgattttgcgccaatgcggcaatgtgctgtataccgccggtaactttaataacgatatcggtgtcccgctaacattgctgcgcctaacggccgaacatgattttgctgttattgaacttggtgccaaccatgttggtgaaattgcctacaccaccgatttaagccgtccagaaagcgctttggtgaataatttagccgccgctcatctggaggggtttggttcgctggccggtgtggcgcaagccaaaggtgagatcttcgctggcttgcctgccaatggcacggcgattatcaatgccgacagtaacgactggccgcactggcaagaaacgctacataacaaacgggtttggcgtttctcgccccacgccgcagaacatattgatttctatgccagtgatgtgcggatcacgcctcaactcacctccttcactttgcattcaccgtttggcaccgtggctatcgaattgcctctaccggggcagcataacatcgccaatgcgttagcggcggcagcattagccatgtcggttggggcggatttagccgcagtacgccaagggttggcgcagttacaagcagtacctggccggttattccccgtcccattagcggaaggccaattgctgttggatgacagctataacgccaacgtgggttccatgattgccgccgcacaggtcttggccgagatgccgggttaccgggtgatggtggtcggtgatatggccgagttgggcgaaaccgcggcagattgccatcgtcaggttggtgaagccgcgaaactcgcaggcgtcgataaagtattaagcgttggcacattgagccagatactgagcagtgcgagcgggaatggcgaacactttcaggatcaaaatacattgagcacccgtgtaaacgcgttgctgaacgaatatccggttatcactgttttaattaaaggttcacgtagcgccgctatggaaaatgtcgtgcgtgcgttacaggagaaggcatcatgttag

SEQ ID NO: 41736 - DNA, 1083 bp, Yersinia pestis
atgttagtttggttggctgaatacttagtgaaattttactcaggctttaacgtcttttcctatttgacgttccgcgccatcgtgagtctattaaccgcactgtttatttcattgtggatggggccgcacttgattgcctggttgcaaaagctgcaaatcggtcaggttgtgcgtaacgatgggccagagtcgcatttcagtaagcgcggtacgccaaccatgggcggcctgatgatcctcttctccatcaccatttcggttctgatgtgggcttatccctctaacccatatgtctggtgtgtgctgttcattcttataggttatggcatcgtcggttttattgatgattaccgcaaagttgtgcgtaaaaacaccaagggtttgatcgcgcgctggaagtatttctggcagtcaattattgccttggctgcggcattcacgatgtacagcattggcaaagatacctcggccactgaattagtcgtgcccttctttaaagacatcatgccgcaattgggcttgctgtatgtcctgctggcatatttcgtgattgtgggtaccagtaacgcggttaacctgacggatgggctggatgggttggcaattatgccgacggtgttcgttgcggcaggttttgccttagtcgcttgggcaaccggtaatgtgaactttgccgcttatctgcatattccttacctgcgccatgcgggtgaattggtcattgtctgtaccgcgattgtcggtgcgggtttaggtttcttatggtttaacacctacccggcgcaagtgttcatgggcgatgttggctcactggcactgggtggcgcattaggcactatcgccgtattactgcgtcaggaattcttattagtcattatgggtggggtcttcgtggttgaaaccctgtccgttatcttgcaggttgggtcctttaagttacgtgggcagcgtattttccgcatggctccgattcaccatcactacgaactgaaaggctggccagaaccacgggtgatcgtgcgtttctggattatttcgctgatgctggtgctgattggcctggcgacgctgaaggtgcggtaa

SEQ ID NO: 41737 - DNA, 1137 bp, Yersinia pestis
atgatcctcaataacgtcagcctgattcttgaagacagcgtagtcagtggatcgctggaaatcgtagacggtgtcatccgcagttacagtgatcgcccgacgcagttacccgccgcaatagatggcgagaatggctggctactgccggggctgattgaactgcataccgataatctggacaaatttttcaccccgcgtcccaatgtcgattggcccgcccattcagcgatgagcagccacgatgcgctgatggtggcctgcggtatcaccacggtattggatgcggttgccgttggtgatgtgcgcgatgggggtcaccgactggataatctgcaaaagatgattaatgccgtggtagatagccagcgtgcgggcctgaaccgggccgagcaccgtattcatttacgctgtgaactaccctatgaaaatactctgccactgttcgaagccctgatggcgcaacctgcgttatcgttggtgtcattgatggatcattcaccgggtcaacgtcagttcgcttcgcgtgagaaataccgtgaatattatcagggtaaatatcatcttagcgatccgcagatggcggcgtttgaagaagagcaggtcgcgctctccacacgttgggcagggcctaaccgctcggcgattgctgctcaatgtcgcgagcgaggcattgcgctagccagccacgatgatgcgacagccgctcatgtggcggaatcacaagcgctgggcagtgtgattgccgagttcccgaccacagaggtggccgccaccgcctctcatcaactcggtttacaggtattgatgggcgcaccgaatattgtccgtggtggctctcactccggtaatgttgccgctcatcacctggcttctctgggggtgctggatattttatcttctgattattaccccgccagcctgatggatgcagcgttccgtatcgcacacgacgagagcaaccgcttcaccttgccacaagcggtcaatttggtgacccgtaatccggccagagctttggggctaaatgaccgaggtgtgattgccgaaggtaaacgggctgacttgattctggcccgcgcacatggcgagaacgtttatgtgcaaaacgtctggcgtcagggagttagggtgttctga

SEQ ID NO: 41738 - DNA, 276 bp, Yersinia pestis
atggctaaggttgatgtgaaatgtccattttgcgagcagttccaccctgttaaaaagcacgggccaggacgcacagggcatcagcgctaccgctgtcaggcctgccgacggagctttcaactagagtacgagtatcgtgcctgccaccccggtatgaaagagcaaattgtcgatcttgctatgaacaatgccggtattcgtgatactgcacgggcgttgcatatcagtatcaatgcggtcatgcgcactttaaaaaactctcgccgcagcgtgtaa

SEQ ID NO: 41739 - DNA, 276 bp, Yersinia pestis
atggctaaggttgatgtgaaatgtccattttgtgagcagtttcaccctgttaaaaagcacgggccagaacgcacagggcatcagcgctaccgctgtcaggcctgccgacggagctttcaactagagtacgagtatcgtgcctgctaccccggtatgaaagagcaaattgtcgatcttgctatgaacaatgccggtattcgtgatactgcacgggcgttgcatatcagtatcaatgcggtcatgcgcactttaaaaaactctcgccgcagcgtgtaa

SEQ ID NO: 41740 - DNA, 1317 bp, Yersinia pestis
atggttgattatcagggtaaaaaagtggtcatcatcgggctggggctaaccggcctttcctgcgttgatttctttatagcgcgtggtgtcacgccgcgcgtgatggatacccgcatcaatccaccgggcttagatcaattacccgaaagtgtcgaacagcatgtgggtgatttgaaccaagaatggctactggacgctgatttaattgttgttagccccggtatggctctggcacatcctgcattaagtgaagccgccgaggccggtgtcgagatcattggcgatatcgaactgttctgccgtgaaaatcaggcaccggttgtggctatcactggctccaacggcaaaagtaccgtgacgacgctggtcggtgagatggcaaaagcggcaggttggtcagtggggggcggcggcaatatcggcgttccggcactgacattgctgaagcaagataaccaattaactgtcttggaattatcaagtttccaactggaaaccacccacagcttgcgggcctctgctgcgacgattctgaacgtgacggaagatcatactgaccgttatccactcggtttgcagcaataccgtgcggcgaaactgcgggtgtatgaaaatgccaaggtttgtgtcgtgaatgccgatgatgcactcaccatgccggtccgtggtgctgatagccgttgcatcagttttggggtcgatgtcggtgactaccacctgaataagcagcagggtgaaatttggttacgggttcgtggtgagaaagtgctgaacacccgtgaaatgaaattaagtgggcgtcataactataccaatgcgctggccgccctggcattagctgatgccgtgggtatcccacgggcatccagtttgaaagccttgacgaccttttccggcttgccacaccgcttccaattggtgcttgagcgccatggtgtgcgctggatcaacgactccaaagcgaccaacgtgggcagcactgaagccgcgctggatggtttacaggttgatggcaccttgcatttattgttggggggcgacggtaaatctgctgatttctccgggttaacgcacttcctgcaaggggatcgcatcaaggtctactgttttggccgcgatggcggtcaattggctgcgttgcgccctgacgtctctcaacttaccgagacgatggcgcaggctatggcgttggtggcaaaagttgtgctacccggcgatagggtgctgctgtcacctgcgtgtgccagcctggatcaattccgcagctttgagcatcgtggtaatgagtttgctcgtctggcagaggagttaggctga

SEQ ID NO: 41741 - DNA, 1203 bp, Yersinia pestis
atgcgtatgccggggctggggctgtttaataccttaaaacattatgtcatggggtcgcgggagagcgacaccaccagcatggtgctttatgacagaaccttgctgtggctgacatttggtttggcgattattggttttgtgatggtgacgtcggcgtcaatgccaatcggtcagcgcttggctaatgaccctttcctgtttgctaaacgtgacgcgctctatctggcattagcgtttggtttgtcactggtgacgctacgtattccgatggatgtctggcagcgctatagcaatatcatgttattgatttccattgttttgctgctcgttgttttggtggttggtagctcggtaaacggggcatcacgttggattgcactagggccattgcgtatccagccggccgaattatccaagttgtctctgttttgttatttggccagctatctggtgcgcaaggttgaagaagtccgcagtaacttctggggtttttgtaaacccatgggcgtgatggtcattctggcggtgctgttgctggcccagcccgatttaggaacggtggtggtgctgtttatcaccacgctggcgatgctgttcctggcaggtgccaaaatgtggcagtttatggcgattatcggttctggtgccttcgcggtttgtttgctgattatcgccgagccttatcgtatgcgccgcgtaacatccttctggaatccgtgggccgatccctttggcagcggctatcagttaacccagtcactgatggcatttggccgtggtgagttttgggggcaaggtttaggtaattcagtacaaaaactggagtatttaccggaggcgcacaccgattttattttctcgattttaggtgaagaactcggctatttcggtgtggttttggccctgttgatggtattcttcgtcgcttttcgcgcgatgtccattggccgccgtgcattggagattggtcaacgattctctggctttttggcttgttcaattggtatctggttcagtttccaggcgctggttaacgttggtgccgctgccggaatgttgccgacgaaaggcctgacgttgcccctgataagttacggtggttcaagcctgataattatgtcaacggcgatagtgctgttgttacgtattgattttgaaacgcggctggcaaaagcccaggcgtttgtaaggagtgcccgatga

SEQ ID NO: 41742 - DNA, 1071 bp, Yersinia pestis
atgagtgggaagaccaagcgtttgatggtgatggcgggtggaaccggggggcatgtcttccccggtttggccgtggcacatcatttgatggcgcaaggctggcaggtgcgttggttaggcactgcggacagaatggaagcgtcactggttccccaacatggcattgaaattgattttattaaaatttccggcttgcgtggcaaaggcctaatggcccaattgacagcaccgatacgtatttatcgtgcggtgcgtcaggcgcagaaaatcatgcgagattaccaacccaatgtggtgttgggcatgggcgggtatgtttctggccctggtggtttagccgcctggctgtgtggcgtaccggtggtattgcatgagcagaatgggattgcgggtctgactaaccgttggttggccaggatcgccaaaaaagttttacaggcatttccaggggcattccccaacgcggatgtcgtgggtaacccggttcggaccgatgtactggccttgccattacccgcagtgcgtttgagcggccgtgaagggccgattcgggtcttggtcatcggtggtagccaaggcgctcgaatactgaatcagaccctgcctttggttgctgcaagtctgggcgaacaaataacgctgtggcatcaggtcggtaaaggcgcactgccagaggtatcgcaggcttaccaacaagcggggcaggccgggcacctagtggttgaatttatcgacgatatggcagcggcttatgcctgggctgatgtcgtggtgtgccgttcaggtgcactgacggtcagtgaagtggcggcggcggggctacccgcgatttttgtgccattccagcataaagatcggcagcaatattggaatgcattgccgctagagaaagcgggggcagcaaaaattattgagcagccacaatttacggcaaccagcgttagcagcctgctggcgagttgggatcgtgcaacattactgtcgatggctgaacgggccagatcggttgccatccctgacgcgactgagcgtgttgcggctgaagtggttgcggccagtaagtcagcgtaa

SEQ ID NO: 41743 - DNA, 1476 bp, Yersinia pestis
gtgaatacacaacaactggcgaaactgcgtactatcgtgcccgagatgcgacgtgtccggcacattcactttgttggcatcggtggtgccggcatggggggtatcgccgaagtgttggccaacgaaggttatcagattagtggttcagatttagcacccaactcggtaactcagcatttgactgccctgggtgcacagatttatttccatcatcgcccggaaaacgtgctggatgcgagcgtggtcgtggtttctactgcaatctctgcggataacccagagattgtcgcggcccgtgaggcgagaataccggtgatccgccgcgcagaaatgttggcggaattgatgcgctatcgccatgggattgccgttgctggcacccacggcaaaaccaccacaacggcgatgttatccagtatttatgccgaagcagggttagatccaacgttcgtcaatggtgggttagtcaaggccgcgggtacacatgctcgtttgggttccagccgttacctgattgcagaagccgatgaaagcgacgcgtcattcctgcatttgcaaccgatggtggcgattgttaccaatatcgaagccgatcatatggatacctaccaaggcgacttcgaaaatttaaaacagacattcattaactttttgcacaatttgcccttttatggccgtgcggtgatgtgtatcgatgatcccgtagtgcgtgaattattgccacgtgttggccgtcacatcacaacctatggtttcagtgatgatgctgatgtgcagatcgccagctatcggcaagaaggcccacaagggcacttcacgttgcgccgtcaggataaaccgttgatagaggtgaccttgaatgcaccaggtcgccacaatgcactgaatgcggcggcagcagtcgctgtcgcaacagaagaaggcattgaagacgaagatatcctgcgtgcattagtgggtttccaagggacggggcgccgttttgatttcctcggcaacttcccactggccccggttaacggtaaagaaggcagtgcgatgctggttgatgattatggtcatcaccctaccgaagtggatgccaccattaaagccgcacgtgctggttggccggataaacgcattgtcatgctctttcagccacaccgctatacccgaacccgcgatctgtatgacgatttcgcgaatgtgctgtcacaggtcgatgttttattgatgctggatgtgtatgccgcaggtgagccaccgatcccaggggcagatagccgcgcgttgtgccgaacgattcgtaatcgcggtaagttggaccctattttagtgccagacagcgaatcagcacctgaaatgttggcgcaaatactgaacggggaagacctgatcttggttcagggcgcaggtaacattggtaaaattgcccgtaaattggctgagcataaattgcagccacagttaaaagacgaggaacatcatggctga

SEQ ID NO: 41744 - DNA, 921 bp, Yersinia pestis
atggctgagaaagtcgcggtattgctgggtgggacctctgcggagcgtgaagtgtcattactgtcaggtcaggcggtattggcaggcttgaaagaagccggtatcgatgcttatggggtggataccaaagattttccggtaactcagcttaaagaacagggctttgataaagtgtttatcgccctgcatggtcgtggtggcgaagacggtacgttacaaggcgtattggaatttctacaactgccatataccggcagtggtgtaatggcatccgccctgacaatggacaaattgcgcaccaaattagtctggcaagccttggggttgcctatttcgccttatgttgcgttgaatcgccaacagtttgaaacactttccccagaggaattggtggcgtgtgtcgctaagcttggcctgccacttattgtcaagccaagccatgaaggctctagcgttgggatgagtaaagttgatcacgccagcgaattgcagaaggcattggttgaagctttccaacatgacagcgatgtactgattgagaaatggctgagcgggccagagtttactgtcgcgatccttggggatgaagttttgccttctattcgtattcagcctccgggcgtgttttacgattatgacgctaagtatttgtcagataaaacacaatacttctgcccaagcggtttaagtgatgagtcggagcaacaattggcagcgctggcattgcaggcttaccacgcgctggattgcagcggttgggggcgggtcgatgtgatgcaagaccgcgatggtcatttttacctgcttgaagtgaacacttcaccgggtatgaccagccatagtttggttccaatggccgcccgccagtatgggttgagtttctcccaattggtggcgcgcattctgatgttggctgactga

SEQ ID NO: 41745 - DNA, 828 bp, Yersinia pestis
atgtcgcaagctgccttgaatgcgcgagagcgtgcggcggagaaaaatgcagcccggcgcagtaacgggagccaattggcaggggtgatttttctgctgatggtcctgggaaccatactctggggaggctgggtcgttatcggttggatgaaagatgccaaccggctaccactgtcgaaactggtggtcaccggtgagcgccattacaccaccaatgacgatattcggcaggcgattctggcattgggcgcaccaggtacgtttatgacgcaggatgtgaatatcatccagcagcagattgaacggttaccttggatccagcaggccagtgttcgcaagcaatggccggatgaacttaaaatccacctggtggagtacgtgcccttcgcccgttggaatgacttgcatatgattgatgagcaggggcgatcatttagcgtgccttctgagcgaatgggtaaacaggtattgccactactgtatggccctgaaggcagtgagcgggatgttctggaaggttatcgagcaataaataaggtgttagcggccaacaaatatcagctaaaaatggtggcgatgagtgccaggcattcttggcagttggctttagataatgatgttcggctggagctggggcggagtgaccgaatggggcgtctgcaacgtttcatcgagttatatccgatgttgcaacagcagccagataaacgggtcagttatattgatttgcgttatgacactggggcttcagtaggttgggcaccggtctttatcgacaatcagggtggagaaccaccgattaatggccagcagaacagtaatccgtaa

SEQ ID NO: 41746 - DNA, 1257 bp, Yersinia pestis
atgatcaagtcgacggacagaaaactggtagtaggtctcgagatcggaacggcaaaggtctccgcattggtaggggaagttctgcctgatggcatggtcaatattattggggtaggcagttgcccatcccgtggcatggataaagggggcgttaacgaccttgaatcggtagtgaaatgcgttcagcgtgctatcgatcaagcggagttaatggcggattgccaaatttcctctgtttatctggcattatcgggtaaacatatcagttgccagaatgagatagggatggttcctatttcagaagaagaagttactcaggaagatgttgagaacgtagtgcataccgcgaagtcagtacgtgtgcgtgatgaacatcgtatcctgcacgttataccgcaggaatatgccatcgattatcaggaaggcatcaagaatcctgttgggctttctggcgtgcggatgcaagccaaagtgcacctgattacctgccataacgatatggcaaaaaatattgttaaagcggtggaacgttgtggcctaaaagtggaccaacttatctttgctggtttagcagcaagttatgccgttttgaccgaagatgagcgtgaactgggggtctgtgttgtcgacatcggcggtggcaccatggatatggcggtttataccggtggggcattacggcacaccaaagtgatcccctacgccgggaacgtggtaaccagtgatattgcttatgctttcgggacaccgccaacagatgcggaagcgattaaagttcggcacggctgtgcgctcgggtcgatagtcagcaaggacgaaagtgttgaagtgccaagtgttggcggacgccctcctcgtagtttgcaaagacaaacactcgctgaggttattgaaccacgctacaccgaattgctgaatttagttaatgacgagattttacaactgcaggagcaattacgtcagcaaggcgtaaagcaccatctggcggcaggtattgtgctaaccggtggcgctgcacaaattgatggtttagcggaatgtgcacaacgggtgttccatgcccaggtccgaattggtcagccgcttaatatcaccgggctgacggattatgcgcaggagccttattactccacggctgttgggttattgcattacggtaaagaatctcatctcagtggtgagtcagaagtagaaaaacgtgcctcagtgggcaattggttcaaacgtatcaatagctggctgagaaaagagttttaa

SEQ ID NO: 41747 - DNA, 1152 bp, Yersinia pestis
atgtttgaacctatggaactaaccaatgacgcggtgattaaagtcatcggcgtcggtggtggcggtggtaatgccgtcgaacacatggtgcgcgagcgcatcgaaggtgttgaattcttcgccgttaatacagacgctcaggcgctacgtaagacggctgttggccaaaccatccagatcggtagcggtattaccaaaggtttgggtgctggcgcgaaccctgaagtgggccgcaattcagcagaagaagaccgtgaagctctgcgtgcagcgcttgacggtgcggatatggtctttatcgcggctggcatgggcggtggtaccggtacgggtgctgcacctgttgttgctgaagttgcgaaagaactgggtattctgacagttgctgtggttaccaagccttttaattttgaaggcaagaaacgcatggcatttgctgagcagggtattgctgaactgtccaagcatgtggactcactgatcaccatcccgaacgataagctattgaaagttctggggcgtggcatctctttactggatgcatttggtgcagcgaatgacgtgctgaaaggtgcggttcaggggattgcggaactgattacccgccctggtctgatgaacgtcgacttcgcggatgtgcgcacagtcatgtccgaaatgggttatgccatgatggggtctggtgtcgcttgcggtgaagatcgtgcggaagaagcagcagaaatggccatctccagtccgttgctggaggatattgacctgtctggtgcccgcggcgtgctggttaacatcacggcgggtttcgacttgcgtttggatgaattcgagaccgtgggtaacactatccgtgctttcgcgtctgacaatgcaaccgtggttatcggtacctcattagacccagaaatgaacgatgaactgcgcgtgacagtggttgctaccggtatcggcatggataaacgtccagaaatcacactggtgactaacaagaaaacccagcctgtgatggaccaccgttaccagcagcatggcatgtcacctttacctcaggaagtgaaacctgcggctaaagtggtcaatgacaccactgctcaaaccaataaagagcccgattatttggacatcccggcgtttttgcgcaagcaagccgattaa

SEQ ID NO: 41748 - DNA, 936 bp, Yersinia pestis
ttgcgagataaaatgatgatcaaacaaaggactttaaaacgtattgttcaggcgacgggtgtcggtttgcacaccggtaaaaaagtcacgctgacaatgcgacccgcgccggctaataccggggtcatctatcgtcgcactgacttgaatccaccggttgattttccggcagatgcaaaatccgtgcgtgataccatgctctgtacttgcctggtcaatgagcatgacgtgcgtatttctactgttgaacatctcaacgctgctttggcagggttagggattgataacattattattgaagttaacgcccccgaagtaccaatcatggatggcagcgccagtccattcgtgtacttattgctggatgccggtattgaagagttaaactcagcgaagaaattcctgcgtttgaaagagacagtacgggttgaagatggtgataaatgggctgaattgtctcccttcaatggattccgtttggactttaccattgattttaatcacccggcgattgactcaagtacacagcgttattgcttagatttctcggccgattctttcgtccgccaaatcagccgtgcgcgtacttttggtttcatgcgtgatatcgaatatctgcagtcccgcggtttgtgcctgggcggtagtttcgattgtgccatcgtggtagatgattaccgcgtattaaatgaagatggcctacgctttgaagatgagtttgttcgtcacaaaatgttggacgctattggcgacctgtttatgtgcggccataatattattggcgcatttacggcgtacaaatctggtcatgccttaaataacaagctgttgcaggctgttttagcgaagcaagaagcttgggaatttgtgacgttccaagatgaagctgaaatgcctttggcattcaaagcaccgtctacagtattagcttactaa

SEQ ID NO: 41749 - DNA, 1995 bp, Yersinia pestis
atgactactgagcttgaaacctcttttgctgatctggggctgtccgctccaattctttccgctctgactgatcttggttatgaaaaaccatctcctatccagttggaatgtattccacacctgttaaacggccgtgatgttctcggtatggcgcaaacaggcagtggcaaaacagccgcgtttggtctgccgctgttacacaatattaaagctgatctgaagtcgccacaggttctggtgttggcaccaacccgtgaattggctgttcaggttgctgaagcgctgtccagtttctctaaacacattaatggcgtcaacgtggtggccctgtacggcggtcagcgttatgacgttcaattacgcgctttgcgccaggggccacaagttgttgttggtaccccaggtcgtctgttagaccacctgaaacgcggtacccttaacctgtccaacctgagcggtttagtgttggatgaagcagatgaaatgctgcgcatgggctttatcgaagacgttgaaacgattatggcgcagatcccggctgaacatcagaccgcgttgttctctgcaaccatgccagaagcgattcgtcgtattacgcgtcgcttcatgaaagaaccacaggaagtccgcattcaatctagcgtgacgacccgccctgacattagccagagctactggagagtgggtggcggttaccgtaaaaatgaagcgctggtacgtttcctggaagctgaagatttcgatgctgctattattttcgtacgtaccaaaaatgcgaccttggaagtagcagaagcccttgagcgtagcggctacaacagcgcggcactgaatggtgatatgaatcaggcactgcgtgagcagacgctggagcgtttgaaagatggccgtctggatattctgattgcaactgacgtagctgcccgtggcttggacgttgagcgtatcagcttggtcgtaaactatgatatccctatggattcagagtcttatgttcaccgtatcggtcgtactggccgtgcaggtcgtgcaggtcgcgcgttgctgttcgttgagaaccgtgaacgtcgtctgttgcagaacatcgaacgcacgatgaagctgacgatcccagaagttgagttgccaaacgcagatttgctgagcgaacgtcgtttagctaaattcgccgctaaggttagccaacaactggaaagcagtgatttggatatgtaccgcgcattgctggctaagctgcaaccggaagaagagtttgatatcgagactctggctgctgcactgctgaaaatggcgcagggcgaacgtcctctgatcctgccaccagaagccccacgccgtccgcagcgtgaattcaattcacgtgatgaccgtggtaacgatcgtggtagccgtgatcgtggtgacagccgtcgcgataaccgctctgacagccgttctgctgatagccgtgatggtggtgagcgtcctgctcgtcgtgaacgtcgtgatgttggcgagatggagctgtaccgcattgaagtgggccgtgatgatggtgttgaagttcgccatattgttggcgctatcgctaacgaaggtgatatcagcagccgttatatcggtaatatcaagttgtttgcttcccactcaacgattgaactgccaaaaggcatgccgggcgaaatgttatctcacttcacccgtacccgtatcctgaacaagccgctgaacatgcagctgttgggtgatgcacagccacatgaacgccgtgagcgtccagcgggtggtaacggtggtgagcgtcgtggcggtggccgtccattcagtggcgaacgtcgtgaaggcgcaggcgctcctcctcgtcgttcatttagcggcgatcgtgctcctaccggtggtggtgagcgtcgtggtaaccgcgatggtcagcgttctgcggccccacgtcgtgatgatgctgccgcacctgctgctgcagccgccgcaccagcccgtcgtcgcttcggtgatgcataa

SEQ ID NO: 41750 - DNA, 264 bp, Yersinia pestis
atggcttgcattaacgttcattgtccccgttgtgattctgctttggtttatcgacatggtcagaaccctaagggccaaagccgtttccgctgccgtgagtgccgctctgtattccaactgacctacacttatcaggccagaaagcccgaagttaaagggcagatcgttgatatagcctttagcggcacaggtgtgtgggatacggcaagaacgctaaaaatcggtatcaataccgttatccgcactttaaaaaactcttgctga

SEQ ID NO: 41751 - DNA, 2118 bp, Yersinia pestis
ttgctgactccgattattcgtaaattccagtatggtcaacataccgtaactatcgaaactggtatgatggctcgccaggccactgcagccgtaatggtaagcatggacgacactgcagtattcgtgactgttgttggtcaaaagaaagccaaaccaggccagagtttcttccctctgacggttaactatcaggagcgtacttacgctgctggccgtatcccaggtagcttcttccgtcgtgaaggccgcccaagtgaaggcgaaacactgacttcacgtctgatcgaccgcccaattcgcccactgttcccagacagcttcctgaacgaagttcaagtgattgcaaccgtcgtttcggttaacccacaaattaacccagacatcgtggcactgattggtgcatctgcggcactgagcttgtcaggcattccatttaacggcccaatcggtgctgctcgcgttggttttatcaacgaccagtatgtgctgaacccaaccactgacgagctgaaagagagccgtttggatctggttgttgccggtactgcgggtgcagtgctgatggttgaatcagaagccgatattctgtccgaagagcaaatgttgggcgcggtcgtcttcggccacgaacaacagcaagttgtgattgaaaatattaacgctttggttgctgaagctggcaaacctaagtgggattggcaggcagagcctgtcaacgaagcactgcatgcgcgtgttgctgaactggccgaagcgcgtctgggcgatgcataccgtatcactgaaaaacaagaacgttatacgcaagttgatgctatcaaagctgacgtgaccgaagcgctattagcgcaggacgacacattagatgccgctgaaattcaggatatcctggccagcgttgagaaaaatgttgtgcgtagccgtgtgctgcgtggtgagccacgtatcgatggtcgcgaaaaagacatgatccgtggtttggatgtacgtactggcatcttgccacgtactcatggttctgccttgttcacccgcggtgaaactcaggcgttggttaccgctacgctgggtacggcacgtgacgcacaaaacattgatgagttgatgggtgagcgcacagattcattcctgttacactataatttccctccgtattgtgtaggcgaaacagggatggttggctcacctaagcgtcgtgagattggccatggccgccttgcgaaacgtggtgttctggctgtgatgccaagtgcgagcgagttcccttacactattcgtgtggtttctgaaatcaccgagtctaatggttcttcctcaatggcttctgtttgtggtgcttctctggctctgatggatgcgggcgtgccaattaaagccgctgttgctggtattgcaatgggcctggtaaaagagggtgataactttgtcgttctgtctgacattctgggtgacgaagatcacttgggcgacatggactttaaagtagccggtagccgtgacggtgtgaccgcactgcaaatggacattaaaattgaaggtattacccgcgaaattatgcaggtagctctgaatcaggctaagggtgcacgtttgcacattctgggcgtgatggaacaggctatcagcacaccacgtggcgatatctctgagtttgctccacgtatctacaccatgaagatcaaccctgagaaaatcaaggatgtgatcggtaaaggtggttcggtgatccgtgcgctgactgatgaaactggcaccacgattgaaatcgaagatgatggtaccattaagattgcagcaactgatggcgataaagcaaaacacgctatccgtcgtatcgaagagattactgctgaaatcgaagtgggccgtatttacgcaggtaaagtcacccgtatcgttgatttcggtgcatttgttgctatcggtggcggtaaagaaggtctggtacatatttctcaaatcgctgataagcgtgtagagaaagtgacagactacctgcagatgggtcaagatgtgccagttaaagtaatggaagttgatcgtcagggccgtatccgcctgagcatcaaagaagccactactcctgacgcagaagcaccagaagcagcagcagagtaa

SEQ ID NO: 41752 - DNA, 975 bp, Yersinia pestis
atggggcgtccacgtcgtcgcggccgtgacattaacggcgttttgctattggataagccgctaggcctctcttctaatgacgttttgcaaaaagtaaaacgtctctttagcgctaatcgcgctggtcacacgggtgctcttgatccattagcaaccggtatgttgcctatttgtctgggcgaagcaactaagttttctcaattcttactcgattcagataaacgttaccgagtggttgctcggctggggcaacgcacggatacctcagatgcggaaggtgcgttaatcagtgagcgtgaggtcaatcttactcaagctcagatcgatactgcactggagagtttccgcggtgaaagccagcagatcccctccatgtattctgcattgaaacatcaaggtaagcctctttacgaatatgcccgtcaggggattgaagtcgaacgtgaagctcgcagcattacggtttacgagttgctcttcatccgttgggaaggcaatgatctggaactggaaattcactgttcgaaaggaacgtacattcgtaccatcatcgatgacttgggtgaattattgggttgcggcgcacatgtcagttatctgcgtcgcttgcaggttgcgacttacccgagcgaacggatggtgaccctagagcagttaacggcgatggttgaggctgcgcaggcagagggacgctcgccaaatccagaactggattcgctgttattgccgatggacagtgccgttcttaattttcctgaagtcaatctgttaccttccgtggccgcttatgtaaaacaggggcaaccggtgcatgtgtcaggtgctcccagtgaaggaatggtccgaatcactgaaggtaaagagcgtaatttcattggtattggtactatcgcagaagatggccgcgttgcccctaaacgtttggttgtggaaagcgtggaagtagaaaatctgccagtagaaaataaaaagtag

SEQ ID NO: 41753 - DNA, 2655 bp, Yersinia pestis
atgacagatgtaaccgtaaaatcgctggcagcagagattcagaccccggttgatcgcctggtacagcagtttgctgatgcagggatcaagaagtctgacgtagactcagttacccagcaagaaaaagaaatactgctggcacacttaaaccgtgaacatggtagtgtgcctaacaaactcacgttgcaacgcaaaacgcgtagcaccttgaatattccgagcaccggcgggaaaagtaaatcggtgcaaatagaggtccgcaagaaacgcacttatgtaaatacgccggaagctgaacaagcgaaagcggaagaacaggcacaacgtgaagcggaagccacagcgcagaaaatcgctgaagaaaaagctaagcgtgaggctgaagaacaagccaaacgtgaggccgctgaaaaagctaagcggcaagcagcggaaaaagaaaaagtgacgaatcaacaaaccgacgaaaaaactaagccagctcagaccgataaagcacgtcgtgaagctgaagctgcagagctaaaacgctctgtagaagaagaaacacgccgtaaggtcgaagaagacgccaaacgcgttgctgaggaagcccgtaaaatggcagccgaaaatgaaggcaaatggcctgagccagtggctgagcagactgagtctgctgactatcatgtcaccacctcacaacatgcacgcgccgcggaagatgaaaacgacgccaaagttgaaggtgatcgccgcagccgtactcgtggtggtaaagcgactaaacagaagaaaggcaacaaactctctgagtctaaagctgatcgcgaagaagcacgtgctgttggccgcaaaggcaaacgtaaaccaagcacattacagcagagctttaacaagcctgttgttgcggtgaaccgcgatgtagtgattggcgagacagtaacggttgctgaattagccaacaaaatggcggttaaaggctctcaggtcatcaaagccatgatgaaactgggtgcaatggcaaccattaaccaggttatcgatcaggaaacagcacagctggttgctgaagagatgggccacaaagttatcctgcgtcgtgagaacgagctggaagaagcgctgatgagtgaccgtgatattggtgttgaagctgccgctgagcaccgcgctccggttgtgaccatcatgggccacgttgaccacggtaaaacgtctttactggattacatccgctccacgaaagtggcgtcaggtgaggccggtggtattactcagcatatcggtgcttatcacgttgaaactgaaaacggcatgatcaccttcctggacaccccaggacacgccgcgtttacatcaatgcgtgctcgtggtgctcaggcgacggatatcgtagtactggttgttgcagcggacgatggcgtgatgccacaaactatcgaagctattcagcatgctaaagcggcgaacgtgccggttgtggttgcggtgaataaaatcgataaaccagaagctgatccagatcgcgttaaaactgaattgtctcagtacggtatccagcctgaagagtggggcggtgagtctcagttcatcaacgtatcagcgaaagccggtatcggtattgatgaattgttgaacgctatccttctgcaagctgaagttctggagctgaaagccgtacgtactggtatggcaaacggtgtggttatcgaatccttcctggacaaaggccgtggcccagtggcaaccgtgctggtccaacaaggtaccttgaacaagggcgatatcgtactgtgtggctttgaatatggccgtgtccgtgcgatgcgtgatgagttaggccgcgatattacttctgcgggtccgtctattccggttgagattctgggcttgtccagtgtccctgctgccggtgacgaagtgactgttgttcgtgacgagaaaaaagcccgtgaagttgcactgtatcgtcagggcaaattccgtgaagttaagttggctcgtcagcagaaatctaagctggaaaacatgtttgctaacatgaccgaaggtgaagtttctgaactgaacattgtgatcaagtctgacgtacagggttcttgtgaagctatctgcgactcactggaaaaactgtctaccgatgaagtgaaagtccggattgttggctcaggtgttggtggtatcaccgaaactgatgcaacactggccgctgcatctggcgcaatcattcttggttttaacgttcgtgctgatgcttccgcgcgtcgtgtagtggaaactgaaggcttggatctgcgttactactcagtaatttatagcctgatcgacgaagtgaaacaggcgatgagtggtatgctggcacctgagtacaaacagcaaatcattggtctggctgaagttcgtgacgtctttaaatcaccgaaatttggtgccattgcaggttgtatggttaccgaaggtgtgattaagcgtaacaatccaatccgtgttctgcgtgacaacgtggttatctatgaaggcgagctggaatccctacgccgcttcaaagatgacgttagcgaagttcgcaacggcatggagtgtggtatcggcgttaagaactacaatgatgtgcgtaccggtgatgtgatcgaagtcttcgaaattatcgaaatcaaacgtaccattgcttaa

SEQ ID NO: 41754 - DNA, 1488 bp, Yersinia pestis
atgaacaaagagattctggctgttgtagaagcagtttccaatgagaaatcccttccgcgcgagaagatttttgaggcgttggaaaccgctctagcgacagcaaccaagaaaaaatacgaacaagagattgaagtccgcgtcagtattgaccgtaaaaccggtgattttgatactttccgccgttgggtcgctgttgacgaagtgactatgccaacccgtgaaatcacgttggatgcggctcaatttgaagatccttctctccaattgggtgattatgtcgaagaccagattgaatcggtgacttttgaccgcattaccacccaaacagccaagcaagtcatcgtacaaaaagtacgtgaagctgaacgggcgatggttgttgagcagttccgtcaatatctggggcaaattgtcactggtattgttaagaaagttagccgtgacagtattgcactggatctgggccacaatgcggaagctgttattggtcgtgaagatatgctcccgcgtgaaaatttccgcccaggtgaccgtatccgtggtgttctgtatgacgtgcgtccagaagctcgtggcgcacagttgtttgtcagccgttcacgttctgaaatgttggtcgaactgttccgcattgaagtaccagaaattggtgaagagctgatcgaaattaaagccgctgcccgtgatcctggctctcgtgctaaaattgcggtcaaaaccaatgacaagcgtatcgatccggttggtgcttgcgttggtatgcgtggtgcccgtgttcaggctgtgtccagcgagcttggcggcgagcgcattgatattgtattgtgggatgataatccagcccagtttgttattaacgctatggcgccagctgatgttgcgtctattgtggttgatgaagacaaacacacgatggatgttgccgttgaagccagtaatttggcccaggcaattggtcgtaatggccagaacgtacgtttagccgcgcagcttagtggctgggaactgaacgtaatgacggcggacgatcttcaggcgaagcatcaggccgaggctcatgccgctattgataccttcactaaatatcttgatatcgatgaagactttgccaccgtattggtagaagaaggtttctcttctctggaagagttggcttatgtgccaatgaaagaacttctggaaatcgatggtcttgacgaagatacggttgaagcgctgcgtgatcgcgccaaagctgcattgaccacgctggccctggcacaagaagaaagttttggcgaccagaaacccgctgatgacctgttgaatttagcgggtctggaacgtagcatggcattcaaattggctgcgcgcggtgtatgtacgctggaagatcttgccgagcagggtatcgacgatttggcagatattgaagggcttagcgatgagcaagccggtgagctgattatggccgcacgtaatatctgttggtttggcgataatgcgtaa

SEQ ID NO: 41755 - DNA, 1341 bp, Yersinia pestis
atgagtaaccgtaaatactttggtacagatggcattcgcggtaaagtgggtgaaagtccgattacgccggattttgtattgaagcttggctgggctgccggtaaggttctggcacgacatggttctcgtaaaattattattggtaaagacactcgcatatctggttatatgctggaatcagcacttgaggcgggcctggcagccgctgggctatctgcgctatttactgggccgatgcccacacccgctgttgcttatttgacacgtaccttccgcgctgaagcgggtattgtaatttctgcttctcataaccctttctatgataacggtattaagtttttctccattgatggcaccaaattgcctgatgatgtggaagaggctattgaagccgaaatggaaaaaccgctgacttgtgttgaatccgctgagttgggaaaagctaaccgtattgttgatgctgctggtcgttacattgagttctgcaaagggacattcccaagcgaacttagcctgaatgagctgaaaatagtggtcgattgtgccaatggtgctacgtatcacatcgcaccaagcgtattacgtgaattgggcgcgacagtgattaccatcggctgtgaacctgatggtatgaacatcaacgaagagtgtggtgctacagacgttcgtttgctgcaagaacgtgttcttgccgaaggggctcacgtaggcttggcattcgatggggatggcgatcggctgatgatggttgaccatttggggaataaagttgatggtgaccaaattctgtacattattgcgcgtgaaggcttacgccaaggtcaattgaaaggcggtgcggttggcacgctaatgagtaacatgggccttcaattagccctgaaagatctgggtatcccatttgttcgtgccaaagtgggcgatcgctatgtcttggaagcgatgcaagagaaaggctggcgtattggtgcagaaaactcgggtcatgtaattttattggataaaaccaccactggcgatgggattgtggcaggtttgcaagtgctcaccgccatggttcgtaaccatatgagtttgcatgacctgtgtagtggcatgaagttattaccacaaattttggtaaatgtgcgtttctccggcgagcataatccactgaaatctgatgaagttgaagaagtgacccggcaggtggaaaaagaattgggtggtcgtggccgggttctattacgtaaatcgggtactgaaccactcattcgcgtcatggttgaaggtgatgcggaagaatcactgatagctgaaatggcaaaccggattgctgatgcagtaaaggcagcaggttaa

SEQ ID NO: 41756 - DNA, 834 bp, Yersinia pestis
atgcatctaactgccagaggtctgacgttggatctctctcgtccacaagtcatgggtattctgaatgtcacaccagattcattttcagatggtgggtgtcacaataaccttgatcaagcattgcaacatgctcaacggatgttatcagcaggcgctacgctgattgatatcggtggtgaatcaacgcgccctggggctgctgaagtcagtgagcaagaagaacttgatcgagtcgtgcctgtggttgaggcgttagctcagcgttttgatgtgtggctctcggtagacacgtctaaagccgctgttatcactgaatctgctcatgcaggtgcccatctaattaatgatatccgctcgttgcaagagcctggcgctcttgaagcagcggcaaagactggcttaccggtgtgcctaatgcatatgcaggggcaaccgaaaaatatgcagcattcaccctactatgatgatttaatgaccgatataaatcggttcttccaacatcatattgaacgctgtgttgcggcaggtatcgcaaaaaataaattgttgctcgacccaggcttcggtttcggtaaaaatctggcgcataattaccaactattggcacatctgtcagagcttcaccattttgagttgccattattggtcggaatgtcgagaaaatcgatggtaggccaattattgaatgtaccaccacaacagcgtgtcatcgggagtgttgcttgtgcggtgattgctgccatgcaaggtgcgcagattatcagagtgcatgatgtcaaagaaactgtcgaggcgatgtgtatcgtcgaggcaacacgttcagcgaagggataa

SEQ ID NO: 41757 - DNA, 2367 bp, Yersinia pestis
atgcagcaggactcactcaaaaccagaataaaagataatgcattttggggtgatgcttaccagcacctgcatgtaaaaatggataccgactgggcctttattagccaaaatatggggccttccctgtataaagattttagtcttgaaggtgtctttgtcattgatgggcagggaaagacccgttattcagtgatcaatgggcaattagtcaataccgacctacagagttggctgcataaagatattacgccactaatcgatatcgcacgtcagcgggctgaaaaaccatatattgctgtcgatactctcgaaatagcgggtcagccagcattaattgccgccgccgcattaacccccggagaggatccgcgtgtccaatgggttgctggccccccttccgtgttggtatttatcaatatcctgacaccggctgaactgagcgcattgggggagaattatggtatccacaacctgcgtatgccgagaaatagccaggatgccacatccaaaccttcgctggtcatcgcctcatcagataacagtaccctgaccttacattgggatcaggagatgccaggaaccccattattaaatatcttgctaccgttactggcgttggttgccctaattattgggttaaccgcctggctggttatacgccgcgccatctcggaggcgcaagccaccgataggagccgggccgcgttggctgccagcgaagaacgtttccgccatgtggcagaatcggccagtgattggttatgggagaccgacgcagagttacaggtgacttatctctcaccacgcttcttaatcatcagcggatggagtgttgatcactggctggggcttaatcttgattcactgttaaattgtgacattacttcgctacggacttggttgcagcacacccatttaactgattcacgtaacgaactgcaatgcacttatttctcagctaaaggtagcaaacgggtctgccgaatccatgccaagccgatcattcagcagggtgaaatcgtcggttttcgtggtaccgcctcagatcttacgcgtgaaatcgaagctgagaaacgtattgagcacctttccctacatgatgcgctaaccggtttacctaaccggacgttgatgaccgagttcttggaaaataagctgcacaatctggccgccgtagagcatcccttggtgatccttaatgttaatttggataagttcaagcccgtcaatgacatctttggtcatgtcactggcgatcaagtgctttatcaggttgctgagcgcctgcgctcctgcttgcgtgacaaggatttagtctcccgccaaggcggagatgagtttgttttgattatttccaatctctcctcttcctacgagatcgaactgttatgcgccagggtgatcacccgtctccaaacaccgtacgtgatcaatgatcaagagatttatcttggggccagtattggtattacgttagcaccacaagactcaatgcaagcggaagaattgctgcgattcgccgatatcgcgatgtgtgaagccaaaaatagtcctcgtaaccggtggcgtttttacgccagtgaaatgaatgaccgcctgatgcaacgaattgaacttgaaaagtttttacgtttagccgttaaaaaaagcgaattctgtctttactatcaacctcgctaccgtactgacgacatgcaactgataggggcagaggcgttggtacgctggaatcacccggttctggggttgctgatgccagatcaatttattgcgttagcggaggagaccgggcttatcactgccatcagcgattggaccctcttacaagcctgccaagacgcgatgacctggccaacctcattgattgtctcggtaaatatctcggcgattgaattcaggggccaatgtcttatcgagcgagtccggcaagccctcttagtgacaggtttgcccagccatcggctcgagttggagatcaccgagaggatcatgattgaagatgctgatggcgcactgaagatcatgactgcgctaaaaaccttgggtatacgcctgtcgatagatgattttggtacaggatattcttcactgaattatctgcaccgttttccttttgacgggttgaaaattgataaaagttttattgataaactcaccgagtcacatgaagggcaatccattgtcgaaggtattattaacctgggccatgctatttcaatgaccgtgatcgccgaaggcgtggaaacggccgagcaactcacctatttgcagtcactccattgtgatgaggtgcaggggtattttcttgccaaacctatgccggtagaggcgttgtctttggttttttctgaggatttatcggtgtga

SEQ ID NO: 41758 - DNA, 3120 bp, Yersinia pestis
atgttgcatttctttattcgtcgccccaagtttgccattgttatcgcattggtgatcaccctggttggctgggtttcactgtatgttatcccggtcgagcaatacccggatatcacgccgccggtggtctccgtcagtgctgtttatcccggtgccagcgccagagacgtggcgcaagccgtcgcgtcaccactggaagcgcaggtcaatggcgtcagccatatgttgtacatggaatcaaccagcgccaataacggcagctaccaattgagcattacctttgccagtggcaccgatcccgatatggcggcggttgaggtacaaaaccgcatttcacaggtgagcgcgcaactgcctgccgaggtgaatgaaaatggcatctcggtacgcaaacgtgcgtcaaacctactattaggggtcagcgttttctccccgcaacagacccatgacgcactgtttgtcagtaactacaccagcatacaattgcgtgatgctattgcacgtatcagtggtgtcggtgatgtacaggtctttggtgcgcgcgattacagtatgcgtgtctggctggatccacagcgcatggaatcactgaatgtcagcgtgcaggatatcgttgccgcgttacaacagcagaacgtacaagcggcggcagggcagataggctcttcaccgtcgatgcccaatcaacaacagacactgaccatcagtgggcaggggcgcttgaccgatgcacggcagtttgccgatgtgattatccgcagcaaccctcagggcggtatgatccgcttgggcgatgtggcccgcgtggccttgggggcacagaattatcaggtcagtgcggcacaaaaccagactgaatcagccttcttagtggtgtatccggttcccggagccaatgcacttaatgtggccaatggcgtccgtgatgaaatggcccggctgtcggccgcctttccggcggatctcacctatgaaattaattacgactccaccctgccggtgacggcgacactgcatgagattgcggtgtcactgaccttgacactgattgtggtgctcgccgtggtgtacctttttttacaaagtctgcgcgcgacctttattgtggcgctcacggttccggtctcgttacttggcacctttgctgtgctgtatgtctttggttattcagccaatactctcagtttgttcgctattattctggccctgaccattgtggtggatgatgccattgtggtggtcgaaaacgttgagcggttattgtcgaacgaccctcatctttcaccggcagaggccacccggcaggcgatgagccagattgccgggccgatcatcgccaccacactggtgttgatggcggtatttgtgccaatcgctatcttgccggggattattggcgagttgtatcgccagtttgcggtaacgctttcggcggcggtcattctctccagtatcaatgcgttaacgctgagtccggcgctgtgtgccgttctgcttaagcggcgcacactcgcaacgactggcatgttcggcacgattaacaaggggcttgatcgcgcccgtgatggttatgttggcttaacggggcggatcaaccgccgtgcggtatttagtatcgccgcgctgctactggtggggttagcaacatggtggggttatagccgactgccaacctcgttcctaccagaggaagatcagggctatttctttgtcagcttacaattgccagatggtgcctcactgaaccgaacccaaacggtgatggaccagatgtatcaacaggtgagcacgaatgaggccgttgaggatgtaataaaaattacggggttcagcctgctcagtggcaacaatgcgcccaatgccggttttgctattgtgatgctaaaaccttggggccagcggccgcatattgatcgggtgctagccagtattcaggccaatctggcggctatcccctcggcaatgattatggcggtgaacccgccagcgattgccggtttgggcagtgcttcgggctttgatttgcgcattcaggcactgctaggccaatcgccgcaagagctggcgcaggtgagccaagggattatttttgccgccaatcaggacccgacattgagccgggtctttaccaccttcagtgcttcggtgcctgaaaccaatttgagtatcgatcgtgaccgcgcggccttgttacaagtgccggtcagccgaatcttccaaacgctgcaaacctcgctgggggggatgaatgccggtgatttcaccttgaataaccgtatgttccgggtgcaattacaaaacgatatgaatttccgccagcgcacggcgcagatcaataacctaaatgtacgcagcgataacggggcattagtcagtttggcgaacctggtcacgttgaccccgtcagtgggcgcgccctttatcagtaatttcaaccagttcccttcggttgcgatcagcggttcagcggctgatggggccagctcaggtcaggcgatggcggcaatggaagcgctattggcgcagaatttaccgcaaggctacagctacagttggagcgggatgtcatggcaagagcagcagaccggcgggcaagtggtgtttatttatcttgcggcgctggtcttcgcttatctgtttttagtcgcccagtatgaaagctggagtatcccgctggtggtggttctctcggtggtgtttgccgtggggggggcggtggcggggctatcggcgatggggtttgccaacgatgtgtatgcgcaaataggcttagtgctactgatcgggttggcggcaaagaatgcgattctgattgtcgaattctccaaggcgcggcgagaagagggggcgagtattgcggaggctgcacaggacggcgctaaacagcgtttccgcgccgtgatgatgaccgctatttcgtttatcctcggcgtgatgccgttggtttttgccagcggtgccggggcgatgagccgccagattattggtatcacggtatttggcggcatgttgatggctaccgccgtagggatcttatttattccggcgctgtatctgcatattcaacggttgcgcgagtggacaaaaaaccgcaagcaggatgttgacgaaagcctgtaa

SEQ ID NO: 41759 - DNA, 1491 bp, Yersinia pestis
atggatattttttcaagttttaatttatacaataaagaattgtatagtaacagccccacacaccctgcctttgataaaagtaaaccgtatatatcagaattaaaaagtcgtgaagagaaaaatctaaacggtgaagtcaactttaaagacaatgttgacaaactgattatgtgccgtcatctatcaagtcaatatatattggattcattatccgatgaggataccggaaaggttgatttagataaattctcatccaaagacatcatcgcaaaccgaataaccagcaacgttgaagagctttacgagcaacttcagttgcaagcaaaagaaatttattttattcctaacaatgaatttggcatctgtctcagtaagatctttaagagtatggagagaaagtcagaaaatactcaatccatactacttgagtcattcaaccacgcgatggcagtaagattgagaatcaaggaaaatgaaaacaacaacacgaaaaggtacgtcattagtgtttatgaccccaacatgactaatgttactgtccgctgtgaggtggatgatttagttaaagtgagagattttcaggtgaaggattttattaatcatcatttatttggcaacttttacaagagctacaacccaactgaatcaagtgaaatatcaaccctttatatttgtaaaaaaccagctaacgaaagtgttcctgagtgtacagggaaaaaaattacattttatgattggatagccttacctgcctcgtctattaatttatacactttcctcattgagggattctcacaagaaattaaaaatctaaaaaatcaattagaaataatatataagaaaaacccggaaaagctgatggaaatacttaccgctaaaagtaccgatggaataatgggttttgaacaagcattacttaatgatcacgctgatgccataaacgcatttggcgagctgctacaattagttcccgaaaacaaacgcagtgaattacttgtaaataataaaaaaacaaagtacacattatttgatatagtttgttctagagaaaaaaataaaacaacaatggcattcaaaaatatagtgtcacttatctctaaaaatgagcgttataaattaatagaatcaaaagtaaacatacttgatactgttattaattcacttattaccaaaaaagacagtagtcatcttaacgaaatttttgaattaatctcattagcgccagaagagcatgtcatcaacttactgtccaatatagatataacgcaatctcttgaatattcgttatatcacaatgatactaaatcgataaatatcatcactaaaatgctcaagggattatctgaacaaggtcgggaaaatataccttttctgagaaaattagatgagtctatagtgaatatgtatatccaactcggtaaaaaaatagccgtttctgcctaccgtgaattattggcactgaaaccgggaacgctcaaagagagtaaatag

SEQ ID NO: 41760 - DNA, 11118 bp, Yersinia pestis
atgaatacaatatttaaagtgatttggaatgcatctttgaatgtctgggttgtggtgagtgagctggcaaaaggccggataaaaaccaagagcagtcgtaacttgatatcagagggtgtattaccaaaatttgaacaaagtatggtatcgaaactgttcagaaaaaaccttttggccctatctctgggcagtattgtttttctaagcaccggccctgtatttgctgctgatattactgtcagcacgcaggcagagctttctgccgcgttatccaatggtacttatgacaaaattattttaggtgctgacattacgctcattgggagcctgaccgtcaatatgacgagtaatcaggttgtgattgatggccaaggaaagtttggtctaaccgttaacaatacgacaaattatggtctggtggtgtcatcgggttcagggaccttaacgctacaaaatatgtccaaaattgactcggccaactactacagcatggtcgtgttgaacggtgccaatactgccgtcaatgtgatttataacaatattgatttcctgggttcctctcaacttatttatatgggggcctatggggcggccaccaatagtataatgacctttggcgatatcttgaacgatgtggtggtcaatgaccgtgctcaggaaattggtgaagtcaataaactggcgtttaccggtagatttcatgttacgcatacggggtcctctgtgacatcttttgtcagcactggcggggcaaataatacatcaaccatggattttgccagtggtgctgatgtcaagatagaccggacggggtcgactggagacctgaccagtaccggtgttaatgcctttgcctatacttttgctgatggtgctagctttgagttaattgctaatcagaatgttttcagcggaaccactaccaatagaggcttggaaattggtagttataatagtatcgatggctttggttccggggtgaaaatagttctgcaatctcgctccgatggttcaattatttcaggtaatgggattgataacgccaccactaatgccgctggtatcaataataatgccagtggtgatgctaatgttatttacaatctgggtactggctctattttaaaggccacgaatactgggattttagcgacaaaaaatgcgaataatgccagtgatatttatattcgctctgcgggtgatatcactgctgcaacgggtatttctgcaacacataacggaaccggcaccgttaaaatcaagaatgatggcaccatcaccagtaccaccgccgggatcgccatttcttccgcatcaataaaagagatcagcgttgataatactgacggtaccatcacggcgactgccggtacaggcgttaacgtactggccagtgccatattaaatctgttcggtggcaccattaatacctcggcgacggccaacggtattacgtttgcgggcacggagggtggccataccctgactgatttgacgattaatctgttgggtacgggtattgctttgtcaaacgtggctggcgtcaatttgacgttaagtaacgtaactttaaacacacttaatgggacggcgctaaatagcctgacagggttaacgttagtcgatagccttaatgggcgtaacaccattaatattgaaggtgccggcatcggaattgcggcgacaaataccgaattgaataccttcgatgcagaggcattagatattaatgttaatggtgccgggatcggcattcaagccactggcggtggtgtcaatctcagcgcttctaacttgatcattaatgttgccaatacattgggtactgcgctgcaaatcacggatgggatagataataccaccaccattggcaacgaaatccaacttaatgccgagaatgcgacggcaattaacttcctcggctcctccagtaaaacgttaaacaacaatggcaccattaaaggcagtgtgatattcgcgggtgttgctgaccatatcattaataacaatggaacactggatggcacattaaccaccggtgccggtaatgacacgttagtgctagacagtagctcgcaaagtaacgatgtgattaacctgggggatggcaataatagcgtgaccattcagaatggggcgacagtgtcctccattatcactgggaatggtaatgatactttcacgatcaatgggatgagcgtggggagtacctacctcggttcgctggatgcgggcacggggctcaataccctaaatttcaatgcctcaaccgacgaactagcggcagccacgtcacttcagggcttcaccaatattaatcttgtcgacagccatatcactctggtgtctgacgataatatcggcagcggtatggtcaatatcgatagcagtagtgagctgctatttggtagcacgtttgatgggattttgcatgcgacattaggcgctggcacgggctctgccattgttaataacagcgccaacgtgtcgttagagcaggccagtatgtttgctggcacgtggcaagttaatcagggcggggcgctaaccgccagtaacagtaaccaattaggttcggccaagattgggttggacggtacgttgaacctggacaacattgcactattcaatcatgtgctgaccgggaacggcacactgaatgtggcgaagaaccttgccaccaccgcgtttgactttggttcgacggtgggcggggcgtttagtgggatcgtcaatctgacaaagactacttttgctttaagtgcggataacgcggcggcactggccagtgccaccttaaagctgtcggatgacagtgtgaccaccgtgggcaccactgaccgcaccctgcacgggctggatttgagtggcggtacgctgatctttgatggtgcggtgccgcagtctcagaccagcggggttgtcacggtcactgacctggcactgaacagcgggacggtcaatatcaccggctctggtagctgggataacaccgatccgctggcaacaaatgtgtcgatccttgaacaggatcgtgctggctcgacgctggaactgattaatgccactaatgtgaccggagatattgatgccttggatttactggtcaatggcacggccattacttctggtacgcaaggggtgcagtctgccatccagcagggcggcagtacggtagccaatgccatccacaattatggcctggccagcagtaacagcaatggtgacagcggcctgtatgtgaattacaccctgagtgcgctggagttgttagccgatggcgctgatgcgttgttgctggcgaccgaaagcggtttgacggccaacagagtactgaatgccgagctattcggtgtcggcggtttggtggtggatgcccaaaatggcgccttaaccttggctaacggcagtaaccgttacgagggaacgaccaccgtcacggcgggtgagttgatcctcggggcgaatggggccttcggccagacgtcattactggatatcgccagtggggccagtgccaatattaatggctatagccagacggtgggggcggtgaccaacgtggggacggtgacactgggcagcggcggggtgttaaccagcggcctgctgaccaatggcgggatccttgatttaaccgggggcgcactgaacctgactgcgggcggggcctctactgtggcaggcggcttgaccggtgccggaaccctgaatattaatggcggtaatttgtcggtcagtgccgccaacagtggcttgagcggccagacccatattgccgatgtggcctcggtgacactgaccgataccggcacgttaggtaccagcgccgtcgaggtgctgggtacgctgaacctgaacggtgccaatgcagccatgaccaacgtactcagtggtgacgggacgattaataccaacgcggcagtcacgctgagcgggaataacagttttagcggcgcacatcagatcggtaccgatggcgaactgaccgtgggacaggccagtaatctgggggccagcagcgccacggttaatctgggcaccctcacttctcatctgatcttgaatggtgtcagcgagagtattgccaacgttctgagcggtgtggcgggttcaacagtcgatattatcggcggggcagatactgcactgacggccaataacagcggcttcctcggccaatatgccttggcgggtaacagcaaactgacggttgcgtcaacgaacaatctgggggcgtcatccagtgtggcgctggcaggggcgggcgatactctgtcgctgagcggctttaacggcacctttggtaacagcgtcaccggcagcggtgtactgcaagtgaccgatgatgccgaggtcaccctgaccagcagcaacggggtaagcaacgcggtaaccattgatatcgctgatgcgacgctaaatctggacgatattgctctgtttaatcatgtgttgaccggtaacggcttgctgaatgtggcgaaaaacgatgccagcaccgcgtttgactttggttcgacggtgggcggggcgtttagtgggatcgtcaatctgaccaataccacctttgctttaagtgcggataacgcggcggcactggcgcgtgccaccttaaaactgtcggatgacagtgtgaccaccgtcggcgccactgaccgcaccctgcacgggctggatttaaatggcggtacgctgatctttgacggttcaccgccgcaatctcaggccaatggggtcgtcacggttactgatctggcactgaacagcgggacgatcagtattaccggggcgggtaactgggagaatgaacatccggtgacgccaccgaacgtgtcgctccttgagcaggatcggggtgacattttactggagctgattaatgccgcgaatgtcaccggcaatgccaacaatttggatttgctggttgatggcacagccattacctctggtacgcaaggggtggagtctgccatccagcagggcggtagcacggtagccaatgccatccacaactatggcctgaccagcagtaatggcaatggtggcagcggcctgtatgtgaattacaccctgagtgcgctggagttgttagccaatggcgcgaatgcgttgttgctggcgaccgaaagcggtttgacggccaacagagtactgaatgccgagttattcggtgttggcggtttggtggtggatgcccaaaatggcgccttaaccttggctaacggcaataaccgttacgagggaacgaccaccgtcacggcgggggaattgatcctcggggcgaatggggcattcggccagacgtcattactgaatatcgccagtggggccagtgccaatattaatggctaccgccagacggtgggggcggtgaccaatagcggtgcggtaacgttgggcaacggtggggtgttaaccagtggcttgctgaccaatggcgggatccttgatttaaccgggggcgcactgaacctggctgcgggcggatcgtctaccgtggcaggcggcttgaccggtgccggcaccctgaatattaacggcggtgatttggcggtcagtgccaccaacagtggcttgagcggccagacccatattgccgatgtggcctcggtgaccctgaccgggacgggtacgttgggtaccagcgccgtcgaggtgctgggtacgctgaacctgaacggtgccaatgcagccatgaccaacgtactcagtggcggcggggtgattaataccaacgcggcggtcacgctgagcgggaataacagctttagcggcgcacatcagatcggtaccgatggcgaactgaccgtgggacaggccagtaatctgggggccagcagcgctacggttaatctgggcaccctcacttctcatctgatcttgaatggtgtcagcgagagtattgccaacgttctgagcggtgtggcgggttcaacagtcgatattatcggcggggcagatactgcactgacggccaataacagcggcttcctcggccaatatgccttggcgggtaacagcaaactgacggttgcgtcaacgaacaatctgggggcgtcatccagcgtggcgctggccggggcgggcgatactctgtcgctgagcggttttaacggcacctttggtaacagcgtcaccggcagcggtgtactgcaagtgaccgatgatgccgaagtcaccctgaccagcagcaacggggtaggcaatacggtgaaggtcgatatcgctgatgcgacgctgaacctgaacgatattgcactgttcgaccatgtgctgaccgggaatggcacattgaatgtggcgaagaaccttgccaccaccgcgtttgactttggttcgacggtgggcggggcctttagtgggatcgtcaatctgaccaataccacttttgctttaagtgcggataacgcggcggcactggcgcgtgccaccttaaaactgtcggatgacagtgtgaccaccgtcggcaccactgaccgcatcctgcacgggctggatttaaatggcggtacgctgatctttgacggctcgccgccgcaatctcaggccaatggggtcgtcacggttactgatctggcactgaacagcgggacgatcagcattaccggggcgggtaactgggagaatgaacatccggtgacgccaccgaacgtgtcgctccttgagcaggatcggggtgacattctgctgcaactgattgatgccgataatgtgaccggcaatgccaatgatctggagctgatgatcaatggtaccactatttccgcaggacaaggggtgcagtctactgtccagcagggcgggtatacggtggcgaatgctacgcataactatggcatgaccagcaatggcggcagtggcctgtatgtgaattacaccctgagtgcgctggagttgttagccgatggcgctaatgcgttgttgctggcgaccgaaagcggtttgacggccaacagagagctgaatgccgagttatccggtgtcggcggtttggtggtggatgcccaaaatggcgccttaaccttggctaacggcaataaccgttacgagggaacgaccaccgtcacggcgggggaattgatcctcggggcgaatggggctttcggccagacgtcattactgaatatcgccagtggggccagtgcgaatattaatggctatcgccagacggtgggggcggtgaccaataccggtacggtaacgttgggcaacggtggggagttaaccagtactgacaccttgatcaataccggaatgattaatgtgaccgatggcatcctgaatctggagaatgggggggcttctagcattagcggcggcttaacgggcaacggtatcctgaatatcaagggtggcgatttcaccatcagcatcgataacaatggtctggcggggcaaaccaatatttccgatggtgcatcagtcactcttggtaatggggggaccattatcggaaccggtaatttgggcagcagcgttattgatgtgctgggggatctaaacctggtcgcggataattcactggctaacgtgatcagtggtgacgggacgattaataccacagcaacagtgacgctgagcgggaatagcagctttagtggtgcacatcagattggtaccaatggcgaactgaccgtgggtcaggccagtaatctgggggccagcagcgccacggttaatctgggcacccttacttctcatctgatcttgaatggcgttagcgagagtattgccaacgttctgagcggtgtggcgggttcaacagtcgatattatcggcggagcagataccgcactgacggccaataacagcggcttcctcggccaatatgccttggcgggtaacagcaaactgacggttgcgtcaacgaacaatctgggggcgtcatccagcgtggcgctggcagggacgggcgataccctgtcgctgagcggctttaacggcacctttggtaacagcgtcaccggcagcggtgtactgcaagtgaccgatgatgccgaagtcaccctgaccagcagcaacggggtaagcaacgcggtaactattgatatcgctgatgcgacgctaaatctggacgatattgctctgtttaatcatgcgttgaccggtaacggcttgctgaatgtggcgaaaaacgatgccagcaccgcgtttgactttggtgctaccgtgggcggggccttcaccggcacagtcaacctgaacaattctacttttgatttaagcggcaataacaccacagtattggcccaggctacgttgaaattatccagcggtaacctgacctcggtgggtaacggtgtgcagaatattggcacattggcgatgaatggcggcacgttgctgtttgataatattgttgataacgcaggcattatcacttcagatgggacgattgcggctaatagcatcaataccaccgggggcggtgaggttcgggttaatttaccgagcaatctggcaccaagtctggatgggctctcggtgatggaactggatgaaggcgaaatcattgtcactctggcaactggggcggcgacagggacaggccatgagttgacgttgacggatgagaatggtgatccgatcagcgcggtcacttatcagggggtccataacgctggcagtacctcagccgccgccaccggttcgtttaattacggcatgaccactggcgaggattatgatggcctgtatgtcaattacggtctgaccgcgttagaactattgagcacgggcagcgaggcgttggtattgaccgccatcttggcgaataacgggactcaatctaacgatctttcagcccaaatcacagggagcggtgatctggcctttgcgtcggctaatgatggcagcacggcatccttatctaatagcaccaacagctatactggtaccacttgggtctcttcaggtaatttgcgtctggatgctgattcagcactggggcaaacctccttgctggcgatgagtaccgccactcatgttgatatcaacggtacccagcaggtggtgggtgagttagccaccgaagggggcagtacactggatctcaacgacggtaagttaaccgtaacggggggcggccaaattgatggtgcattgactggcggtggtgaactggtactgagtggtggcttgctgaatgtttcttatgataacgctggctttactggcagtactgatattgccaatggcgcggtggcacacctgtctcaggcgcaggggctagggaacggcaccattaataacaacggcacacttcatctggataatactatcgggacactgtttaacgctttgaccggtagtgatggcgaggtattgctaagtaacaatgccagtgttcaattggccggtgataacagcggttactcgggtctgtttactaatcaggccgggagtattctcattgccaatagtgccgagcatttaggtggcagcagcatcgccaatagcggtgcgttgatcctggatacgggttcagtctgggagttaaccaataccatcagcggcacggggaccttggttaagcgtggcagcggaacggtaaaaattgaaggcgatacggttagcgcaggtctgactacgattgaagagggtttactgcaattgggcagttcggcggttacccagacactttcgctggaagagtccctgcaagagagggcattgctggtatcattcgcatcgaatatggccaatctgaccagtaacgtactgattaccgctaacggctccttagggggatatggtcaggtgaccggtaatgttgagaactatggcaacctgattatgccaaatgccttaacgggcggggattttggcaccttcaccattgatggtaattacaccggtgatgaggggatgatcaccttcaatactatcctggctggcgatacatcggtaacggatagactggttattaccggggataccgcagggcaaagttatgtcacggtaaacaatattgggggtgtcggggcgcgcacctttgaaggcatcaaaattattgatgtcggcggtgattctgccgggcagtttaccctgaatgggcgcgctgttggcggtgcttatgagtacttcttgtatcaaggtggggccagcactccagatgacggcaactggtatctgcgtactgaggcagatgaccgccgccctgaaccggcgagttacaccgctaacctggcggcggccaacaatatgttcgtcaccagtctggcggatagaatgggtgagacgctgtataccgatgtctttaccggtgagcagaagaccactagcctgtggctgcgtaacgaaggtagccataatcgctcccgcgatgatagcggcgagttgaaaactcaggataaccgttatgtgatgcaacttggcggcgatgtggcgcaatggagccgcaatgcacaggacctgtggcgtgttggggtgatggcgggctatgccaatagcagcagttctaccgtggcacaggttgctggctaccgttctactggctcggtggatggctacagcgtggggatctatggctcatggcttgccgataatgccgatgatactggcgcgtatgtcgattcttgggtgcaatacagttggtttgacaaccgcgttagcgggcaggatttagccactgagaaatatgactcaaaaggctttaccgcatcagtcgaagggggctatgccttcaaagttggcgaaagtgttaaccagagctactttattcagccaaaagcacaggtggtgtggatgggcgtaaaagccgatgaccatacagaaaccaatggtacggttatctctggtgacggtaatggcaatatccagacgcgactcggggcgaaggcctttatcaatccaagtgataaagccaaagtcagtggcccggcattcaagccttttgttgaagccaattggatccataacaccaaagattttggcacgacattagacggtgtcacggtgaaacaagccgggacggcgaatatcgcggagctgaaactgggcgttgatgggcaggtaaatagccaactgaatctttggggaaatatcggtcagcaagtgggtaacaagggctacagcgaaaccagcgtggtgttaggcgttaaatataatttctaa

SEQ ID NO: 41761 - DNA, 1557 bp, Yersinia pestis
atgtcagatgtaaaaccgcagaacgatcggcagaccggcatactgaacgcgattgaacgtattggtaatgccatgccagacatcaccatgctatttatttacgcgctgggggtgtgctgggcactctcctttggattatcgtttatcaactttgattatttccaccctctgaccggtgatcagattaaagttaccaatatgttggcaccggttgaactggtgacctttattaccactatggtcaaaaactttattaacttcccaccgctggcgatcaccattgttgctactttggggattggtattgccgagggcagtggctttattcaggtgatgttgaaaaaaatgctcaacgtcactccacagcgtattttaacgccagcggtcgtctttatcggtgtggttagccatgtcgcctctgattcagcttatgtgatcctgatgcctgtcgccgcgatgatgttctatgccagtgggcgtcacccattagccggtattgccgccgctttcgctgggttagcagggggattctctgccagctatacgccatcgattatcgacccgattatgcagggcttcacccaaggagccgcgcacattattgacccaagttataacgtcaatgtgctgtgtaactacttcctcagtttcggtagcacctttggcgtgattttggtgtgctggtttatcaccgataaaattgtggagcctcgtttgcttaaatcgatgccactgaatagcgatctcagtgggttgcagagcaataatgagttacagaaggttactccgcaggagagtaaagcgtttaaacgggcagggttggttatgctgctgatgttgattggcttggccgcagcactctatccggaaaactccttattgcgttcaccagatggcagcctgacccgccctgatgcaccgattatgcaagcgattgtgccactgctgttctttatgtttgcgattcctggcctgatctatggtttcagttctggcacctttaagagcaccaaagatgttaccgccagcatggaaaacattacccgctcattggtctcgtttttggtctttagcttcttctgcgcccagttcctctattcattcagccactctaatattggcacattaatggcgatttctggcgcggacttcctgcgtacgctggcgatgcccgctggtttcacgattttaggtgtgatcctgttatcttgtgcgctggatattattattacgtcagcgtcatctaaatggtccattctggcaccgatattggttccaatgctgatggccgtagggatttcacccgagttgacccaagccagtttccgcgttagctcaacagtgaatatctcgacaccaatgtttgccttctatccgctgatcattatgtactgtcgccagtattgttcgaagaccggcgtcgggacgttatgcgccatgatgctgccttatacactagggttaaccgtggtactgaccctgatgttgtatctgttctggggtctggatattccattaggtttccagagtgggtatacgtatccagcaactcaatga

SEQ ID NO: 41762 - DNA, 2889 bp, Yersinia pestis
atgcataaacagcttgcccgcattgtcggtatcgttttctttttaggtttactggctccatcgagttgggctgcaattcctgcgtggcaacctttggcggaaaccatttacaaaagtgaacatgacttacgtaaatatcaggcaataaaattatccaatggtatgacggtactactggtttccgatacacaagcccctaaatctttggcggccttagcgctaccggtagggtcactggaagacccagataatcagctcggcttggcccactacttggagcatatggtgctcatggggtccaaacatttccctgaacctggcagtttttccgaattcctaaaaaagcatggggggagccataatgcgagcacggcttcttaccgaaccgctttctatcttgaaattgaaaatgatgcattggcacctgcggttgagcggttggcggatgccattgctgaacccttgttagaccccattaatgcggatcgtgagcgtaatgctgtcaatgctgaattgacgatggcccgttcacgcgatggtatgcgtatggcgcaagttaatgcggaaacgcttaatccggcacatccaagcgcacgtttttctggtggtaaccttgaaactcttagggacaagcccgatggcaagctacatgatgaattggtgagcttctatcaccgctactattctgccaatctcatggtcggggtgttgtacagcaaccaatcattagagcagctagcacaattagccgcagacaccttcggccgtatccctaatagggatgcaaaagtacccacgattacggtcccagtcgtgacacctgatcaaacgggaatcatcattcactatgttcctgctcaacctcgtaaacagataaaagtcgatttccgtattgcgaacaatagtgcggattttcgtagtaaaacagatacctatattagctacttgatcagtaatcgcagtaaaaacaccttatctgactggctacaaaaacaggggctggcagatgcaatcaatgcgggtgctgacccaatgttggatagaaatgggggggtgttctctatcactgtctcactaaccgataaggggctggcacaacgtgatgttgtcgtcgcggcaatttttgattacatcaatatgctgcataaagaggggattaaaaaaagctatttcgatgaaattgcacatgtattgaatctcgatttccgttatccctctatcacccgtgatatggactatatcgaatggctcgtggatatgatgttacgagttcctgttgcacatacgcttgatgcgccttatctggctgatcagtatgatcccaaagcaattgcatcccgattggccgagatgacgcctgaaaatgcccgcatctggtttgtcagccctgaagaaccgcataacaaagtagcttattttgtcgatgcaccttatcaggtcgataaaataggcgtacagcggatgaaagaatggcagcaactggggcaaaagattgcgctaagtttgccagcactgaacccgtacattcctgataatttcactctgatcaaagcagacaagaacattacccgcccacagaacgtggcagaccagccaggattgcgggtgttttacatgccaagtcagtattttgctgacgaacccaaagccgacattacggttgctttccgcaaccctcatgcattgaactcagctcgccatcaggtgctttttgccctgacggattaccttgcgggtctctcacttgatcaactgagttatcaggcctctattggtgggatcagtttctctaccgcaccgaacaatggcttgtatgttaatgctggtggttttacacagcgtatgccgcagttactgacatctttggtttcaggctatgccagttttactccgacagaagagcaattggtacaggctaaatcttggtatcgtgagcaattagacgtggcagagaaaggcaaagcttatgagttggctattcagcccgctaagctgctatcgaatgtgccttattcggagcgaagtgagcgacgtaaactacttgatagcatcagtgtgcaggatgtgctgacctatagagatgatttactgaaacagtctgcgatagaagttttggccgtgggcaatatgacagccgaacaagtcactgaactcactgaatcgctgaaaaaacagctgaacttaatcggaaccacgtggtgggtcggtgaagatgtcattattgagaaaacacagttggccaatatggaacgggtcggcagtagttctgacgcggctttggcagcagtttatgtccctactggctatacagaaattgctggtatggcacgtagtgccttgttagggcagatcattcaaccatggttctatgatcaattacggacagaagaacagcttggttatgctgtattttctttcccaatgtcggttggtcatcaatggggcatcggcttcttactgcaaagtaatagtaaggaacctaattatctttaccagcgatacctcgcattttatccgcaagctgaaaaacgcctgcgcgaaatgaagcccgatgattttgaacaatataagcaggggctggtcaatcaactattgcaaaggccacagacattagatgaagaggcagagcgctaccgtaaagacttcaatctcaataattttgcatttgatagccgtgagaagatgattgctcaagtgaaacagcttacggctaatgaactggcggatttcttccagcaagcggtcattaaaccacaaggtctggcactgctttctcaagttaaaggtcaggggcaggccggaggattcgcagtaccggagggatggacgacttatccaaccacttccgctttacaggctacgctgccgcagaaggtattggcaccatga

SEQ ID NO: 41763 - DNA, 1959 bp, Yersinia pestis
atgatgacgctattggctcaggctgctcgagaccgcttattgcgcccactggatgtgcagttttcacgaatgattgccggcgatgatgacccgcgattacaactggccgcagcgatccttagtgcagaagtaggggccggtcatgtttgcctgccattacgctatttacagccagaactgctattcggtgggcggcaacccgatttatcactggcgctatggcaggcggcgggctcgccagataaagcacagtggctacaggcattacaaaacgccccagtagtcagtgatggctctcaaccaacaccattagtgctacagcaggaacgtttatatctgcaacgaatgtggcagtacgaaggagatgtcgtccaatttattgccagtgactctgtttttataaacagagatagtgattttatgaccagtaaaggtattgccacttctgttgatgaatcgctattacgggagacgctagacgctttgtttggttgtgctggtagtgaggttgattggcaaaaagtggcggcagcggttgcggctacccgtagaatttcagttatttccggcgggccgggcacggggaaaaccaccacagtagccaaacttttgacagcattgatacggcttagccaggggcaacgtttacgtattaaacttgcggccccaaccggtaaagccgctgcacgccttactgaatcactgggcaaagcgattcggcaattctttcttactgatgatgaacgtaaattattccctgatcaggcttcgaccttgcaccgtttactgggtgttcagcccaatagccagcgcctgcgttaccaccgtggtaatccattaaatcttgatgtactggtcgttgatgaagcatcaatggttgatttacctatgatggcgcgcttaattgcggcattacctgccaaggccaaggtgatattccttggtgaccgtgaccaactggcctcggttgaggcgggggcggttctgggggatatctgccgttttgccgaattaggttacagcgagcaacgggcacagcaattaactcagttaacgggctatttattaactaataatgcattaaccagcaatgtactaaccaataaggcattagccaataaagcgcagccagatgaaacctattctgattcagcgaatgtacgcgatagcctgtgtttactgcgtaaaagttaccgcttcgatgaaaagtcagggattgggcagcttgctctggccgttaatgcaggggagtatcggcaggctttatccgtattaaacagtgcgtattctgatgttgaacgcttcccgctggccgatgaggaagattatcaggtactgctagaggcttgtgctgtggggtatcagcattacctcgaacgggtggctgcgttagcccctgcggcagaggtattggcagcatttggccgctaccaactgctgtgtgcattacgttccgggccattcggtgtcagtggcttaaacgaacgcattgaacaggttttacatcgtaaaggattcattatccgtccatcagggccttctggccgttggtatgttgggcggccagtgatgatagaacttaatgatagcgcacttggcttattcaacggggatattggtattgccttacatgataatgaaggcgagctacgggtatattttcaattgcccgatggcaatataaagtcagtacaacctagtcgccttcccagccatgaaaccgcttatgctatgacggttcataaatcgcagggttcagagtttgaacacacagcattggtattacctaacacgttcatgcccgtgttaactcgtgaattggtctataccgccattacccgcgcccgtcagcatctgacgctttattgcagcgatgccgtgctaagtcatgccatacgtacaccgactctccggctgagtgggctagttgatcgcttgaatacattaaatcgccaataa

SEQ ID NO: 41764 - DNA, 1251 bp, Yersinia pestis
atggcagattcaaatcataattctggtcgtcgccgtctattacaaggtgccgcagcagcttggatgctgagtataagccgggttggatttgccgcatcttcacatattgttgctgtccgggtgtggccctcttctacttacacccgagtcacattagagtcaaatacaccactgaagtaccgccaattcgccttaactcatcccgaccgtattgttgttgatattgaaggcgtacagctaaatagcgtattgaaagagatcagccggcaagttcaatccgctgacccttatctcaaacaggcgcgggtagggcagttcgataaaaatactgttcgtttggtattggaactgaagcagagtatcagccctcaattatttaccctgaaacctttcgctgaattccgtaatcgcttagtggtcgatctgtaccctgcggaggggggcacatcggcagaagatgatccgctgctggccctattggaagattacaataaaggtaatgtggatcgaaccttgccaccagaaacacccaaagcaggtaaagcagggcgtgacagacccattattatcatgttggacccaggacatggcggggaagatcctggggctatcggcaaaaataaaaccaaggaaaaagacattgtgctgcaaattgctcgtcggttacgggcgcttattcagaaagaagccaatatgcgggtgtttatgactcgtaatgaagatgtctttatcccgctgaaagttcgggtggcaaaagcacgtaagcttcgtgcggatttattcatttcgattcatgccgatgcttttaccaatcgggcggctagcggctcctcggtctttgctttatcgaccaaaggagccaccagtactgccgctcgttttctggctcagacacaaaatgaggccgatcagattggtggggtcagcaaaagtggtgatccttatcttgaccataccattattgatttattgcaaaccgcaactatcaacgatagcttgaagtttggtaaagaagtactgagtcggatgagtaaaatcaacaaattgcacaaaaatcgtgtcgatcaagcaggatttgcggtactaaaagcacctgatatcccgtcaattctggtagaaactgcgttcatcagtaatttggaagaagagcggaaattacgtaccagccgttttcagcaacagatagcggaatctatttttgctggtatcaaagcgtactttgctaatggcggggcaatggcgcgattgtga

SEQ ID NO: 41765 - DNA, 1134 bp, Yersinia pestis
atgtttcagctatctacgcaagacattcatctggctgcgcaagcagacaataaaaatgcggcgatcacccaagttgcggctgcattaactcaagcgggttgtgtgactgccgcttatgttgacggcatgttggcccgtgagcaacaaacctcaacgtatctgggcaacggtatcgccattcctcatggtaccactgatacccgcgaccaggtgctgaacaccggtgtgcaggtttttcaattcccacaaggcattgagtggggcgcggaccaaactgcttatattgttatcggcatcgctgcccgttctgatgaacatttggcgctactgcgtcagttgacgcacgtactcagcgatgacgcggttgcggcacgtctggctaaaaccacttcagctgaagagttacgcagtttgctaatgggtgagcaaaaaaccgctgaattccattttgatacctcactgattgcgttggatgtggcggcagacaacctgatcacactgcaagcactgaacgcgggccgcttgcaacaaattggcgcggttgatgcccgttttgtcagtgatgtcattactcgtgagccactgaatctggggcagggtatctggttgagtgacagtaccgaaggcaacttggtcagtgcggtcaccatcagccgcccggctaccgcatttgaacacaagggtgaaaaagtggctttgctgctcaccctgtctgtggcagatgatcagccgctgaccgtgctgaactatttaagcgagttgctgctggcacaaaaagctgatgcgttgctgaacgccgatgctgccgcgttgctggcgttgttgaccagcgaatatgttgagcagagtaaagtattaagcgctgagttcgttattcgtaatgagcacgggttacatgcgcgcccagggacgatattagttaatacaatcaaacagtttaccagtgaaatcaccgtgaccaatttggacggcaccggcaaacccgcaaatggacgtagtctgatgaaagttgtggctttaggggttaaaaaagggaatcgcctgcgctttaccgccagcggcgaagatgcacaaaccgcactggataccatcggtgaagtgattgccgccggtttaggcgagggggcagcatga

SEQ ID NO: 41766 - DNA, 939 bp, Yersinia pestis
atgagcagaagagttgcgactatcacactgaaccctgcgtatgatctggtgggtttttgccctgaaatcgaacgcggtgaagtcaatctggtaaaaaccgccggtctgcatgcggcgggtaaagggatcaacgttgccaaggtgctgaaagacctgggcatcgatgtcacagtcggggggttcctcggtaaagataatcaggacggtttccaactgttattcagtgagttggggattgccaaccgttttcaggtggtaccgggccgcactcgcatcaatgttaaattgaccgagaaagatggcgaagtgactgattttaacttctccggttttgaagtgaccaaaccagattgggatcgttttgttactgattccctgagctggctggggcaattcgatatggtcgcggtcagcggcagtttgcctgcgggcgtcaatcccgatgactttactgactggatgaaacgcctgcgttctcagtgcccatgcattattttcgacagcagccgcgaagcattggttgcagggctgaaagcctcgccatggttggtgaaacccaatcgccgtgaattggaaatctgggcagggcgtccgttgcctgcattaggtgatgtcgtggaagccgctcacgcactgcgtgatcagggcattgctcatgtggtgatttctctcggtgctgaaggggcgttgtgggttaatgcctctggcgcatggttggcaaaaccgccggcctgtgacgtggtcagtacggtgggagccggtgattcaatggtagggggcttgatttatggcttgttaatgcgtgaatcgagtgagcacacgctgcgtttggccaccgccgtcgccgctttggccgtcagccagagcaatgtcggcattacggatcgcccacaattggcagccatgatggcaaaagtagacttgaaaccttttaattaa

SEQ ID NO: 41767 - DNA, 1701 bp, Yersinia pestis
atgaaaacgctactaataattgacagttcgctcgggcaggccagaggccatctcgcgacactgatgctgggtgctgcggcaaaaaaagcaggattgagctgggttgagaaagccgccgacgctgaactggtgattgtcgcggggtcatccgccccggctgacagtacgttgaatggcaaaaaagtctatgtaggggacgtggaaaaagcggttcgcgatcctgacggttttctggcacaggctattgcgcaggcggcaccttatcaggccgcggccacccctgagccaacgtcagtggctggcgctaaacgttctgtcgctggtcctaaacgtattgtagcaattacggcttgtccgactggtgttgcgcatacctttatggcggctgaagccatcgaaagtgaagcaaaaaaacgtggctggtgggtgaaggttgaaacccgtggttccgttggcgcaggcaatgagattacgccagaggaagtggctgctgctgatttagtgattgtggctgctgacatcgaagtggatctgaacaaatttgccggcaaaccgatgtaccgcaccacaaccggtctggcactgaagaagacggtgcaagaattggataaagcactggtcgaggctgatgtttatcagccgaaaaccagtagcagtgtggcgagtaagaaaactgagaccggtggcccttatcgccatctattgacgggtgtgtcttacatgctgccaatggtggttgccggggggctgtgtatcgctctgtcctttgtctttggtattgaagcattcaaagagaaagggacgttggccgccgcattgatgcaaatcggtggtgattctgcatttgctttgatggtgccagtgttagcgggttttattgcattctccattgctgaccgtccaggtctgacgccagggttgattggcggtatgttggctgtcagcacgggggcgggcttccttggtggtattattgccggtttcctggcgggttatgtggcgaaagccatcagcactaaattgcatttgccacaaagtatggaagcgcttaaacctattctgattattccactggttgccagtttgatcgtcggtttaacgatgatttatatcgtcggtacaccggtggcaaaaatcatgacgggcctgacgcattggttggagtccatggggacggcgaatgcggtactgctcggggctatccttggagccatgatgtgtaccgatatgggcggcccagtgaataaagcggcctatgcctttggtgtggcgctgttgagttcttctgtttatgcaccgatggcagccattatggcggcggggatggttccaccgctggcaatgggtctggcaacactgttggcccgtaataagttcgacaaaggggagcaggaagggggtaaagctgcgctggtactggggctgtgctttatttcggaaggggctatcccatttgctgctcgtgatccgatgcgtgtcttgccgtgctgtatcgccggtggtgcattaacgggggcgctgtctatggcgtttggtgcgcaactgatggcaccacacggtggcctgtttgtcctgctgatcccaggggctatccatccagtgctgttatatttggtggcaattgctgcaggtaccctgctcgcgggcggcttgtatgccatgctgaaacgccctgacgcgatggtggcgaaggtcgcgtaa

SEQ ID NO: 41768 - DNA, 2514 bp, Yersinia pestis
ttgaaaaaattaatagttcaatttactactattactctattgatgagcacttcatttttagtgggtgcccagcgttattcttttgatcccaatctgctagtggatggcaataacaacactgatacctcgttatttgaacagggcaatgaattaccgggcacctatttggtggatattatcttgaatgggaataaagtggactctacgaatgtgacatttcattcggagaaatcgccatcaggagagcctttcttgcaatcttgcttaaccaaggagcagctatcccgctatggtgtggatgttgatgcctatcccgagttatctccagcattaaaaaactcacagacaaacccgtgtgtcaatttagccgctatccctcaggccagtgaagagttccaattttataatatgcagttggtactgagtattccacaagcggctttacggcctgaaggtgaagtgccaatagaacgctgggatgatggtattacggcttttttgctgaactacatggcaaatatcagtgaaacccagtttcgtcaaaatggtggataccggcgttcacaatatatccagttatatcccggtttaaatttgggggcgtggcgtgttcgtaatgcgaccaactggagtcaatctggcgatagggggggtaaatggcaaagtgcttatacctatgccactcgtgggatttatcgtttaaagagccgggtgaccttaggggagagttacaccccaggtgattttttcgacagcattccctttcgtggcgtgatgttgggggacgatcctaatatgcagccaagtaaccagcgggattttataccggtggtgcgtggtattgcccgtagtcaggcgcaggtggaaatcagacaaaatggttatctgatttatagtacggtggtgccgccggggccgtttgaactctctgacgtgatcccgagtaaatcaggcagtgacctacatgttagggtgctggaaagtaacggggcatcgcaggcgtttattgtgccttatgaggtgccagccattgcattgcgcaaagggcatttgcgatacaatctggtggcagggcagtatcgccccgccaatgctgatgttgagacgcctccggtcgctcaggcaaccgtcgcctacggcttgccgtggaacttgaccgcatttatcggtgagcagtggtcgcggcattatcaggcaacctctgccggattaggggggctattgggggagtatggcgcattgtcatccagtatcacgcaggcaaccagtcagtatcaccatcaacaaccggttaaagggcaagcctgggaggttcgatacaacaaaaccttacaagcctctgatacgtcattttcattggtgaatagtcaatacagcactaatggtttcagtacgttatctgatgtattacaaagttaccggcagagcgggagtggcgataatagagataaaattgacgaaaattctcggtcaagggatttgcgtaaccaaatcagtgcggtcatcgggcagtcattgggcaagtttggctacctgaaccttaattggtcgcggcaggtctaccgtgggccgattccggctaagaattcattgggaatacactataacctcaatgtcggtaatagtttttgggcactgagttgggtgcaaaatgcgaatgagaacaagaatgatcgaatattgagtttgtctgtcagtattccgctgggaggtcatcacgatacttatgcttcctatagaatgacatcttccaacgggagcaatgatcatgagataggaatgtacggccaggcttttgactctcgcttgagttggagtgtgcgtcaggcagagcattatggtcaacccaactcagggcataacagcggctcactcaggttgggctggcagggttcctatggcaatatcgcgggaaattactactatactccgagcatacgtcagttatccgctgatgtttccggaggggcgatcatccatcggcatgggctgacattagggccgcaaatcaatggcacctccgtgctggttgaagttccgggcgtcggcggggtgaccaccacagaagatcgccgtctgaaaacagattttcgcggttacagcattgtgtctggcctctctccttatcaggagcacgatatcgtgttggaaactgcagatttaccgccggatgcggaggtggcaaaaacagataccaaggtcttgccgaccgagggggcgattgttcgtgccagttttagcccgcaaatcggggcaaaggcgctgatgacgatcacccgcgctaatggccaaaccattccgtttggtgcgatggcgagcttggttaatcagtcggccaatgcagccattgtcgatgaaggggggaaagcctatctaaccgggttaccggaaacagggcagttattggtgcaatggggtaaagatgcgggccaacaatgccgggtggattaccagctctcgccagcggaaaaaggtgataccgggctgtatatgctcagcggagtatgccattaa

SEQ ID NO: 41769 - DNA, 858 bp, Yersinia pestis
atgaaatttgtcggtgcacatgtcagcgcagcgggtggtgtagatcaagcggtaattagagcgcatgaacttgaggccacggcctttgcgctgtttaccaagaatcaacgtcaatggcgggccgcccctttagcggaagacgtaattgagaaatttaaactcgcgtgtgagaagtacggctatacctcggcacaaattctgcctcacgatagttacctgattaatctcgggcacccagtcaccgaggcactggaaaaatcccgtgaagcctttatcgatgagttagttcgctgccagcaactggggttatcattactgaacttccatcccggtagccatttactgcaaattgatgaagaccaatgcttggcgcggattgccgaatcgatcaacatcgcgttagacgccactgaaggcgtgactgcagtaattgaaaataccgcaggccagggcagtaacctgggctttaagtttgaacatttagccgccatcattgaaagagtggaagataaaagccgcgtcggcgtctgtattgatacctgccatgctttcgccgctggctatgatttacggactgaagaagattgtgagcacaccttcgcggcattgggcaagatcgtcggcttccagtatctgcgtgggatgcatcttaatgatgcgaaaagcgaatttaacagccgggttgaccgccaccacagcctgggtgaaggcaatattggcaaaaccgtattcagctatattatgcgcgactcacgtttcgataatatcccattgattctggaaacggtgaatatggatatctgggccgaagagatcgcctggctgaaatcacaggcagagattgagccctcgttgtaa

SEQ ID NO: 41770 - DNA, 825 bp, Yersinia pestis
atgcagcaactacaaaacgttattgaaaccgccttcgagcgccgtgctgacattacgccagcgaatgtagacaccgtaacgcgcgaagcgattacccatgtgatcgatttactggacaccggcgcgctgcgcgtcgcagaaaaaattgatggtcagtgggtgacgcatcagtggctgaaaaaagcggtactgctttctttccgcatcaatgacaatcaagtaatggaaggcgctgaaacccgttactatgacaaagtacccatgaaattcgcaggctatgatgaagcgcgtttccaacgtgaaggtttccgcgttgttccaccagcaaccgtgcgtaaaggcgcatttattgcccgcaatacggtgttgatgccttcctatgtcaatattggtgcttttgttgatgagggcactatggtcgatacttgggccaccgtgggttcttgcgcgcaaatcggtaaaaacgtccatctatctggtggcgttggtattggcggcgtcttggagccactgcaagcgaacccaaccattatcgaagataactgcttcgtaggcgcacgctcagaagtggttgaaggcgttatcgtcgaagaaggttctgttatctccatgggcgtgtttatcggtcaaagcacccgtatttatgatcgtgaaactggcgaagtccattatggccgagtaccagcaggttcggttgtcgtctctggcaacttgccatcgaaagatggcagctatagcttgtactgcgcagttatcgtgaaaaaagttgacgcgaaaactcgcagtaaagtcggtattaatgagttattacgcaccatcgactaa

SEQ ID NO: 41771 - DNA, 2739 bp, Yersinia pestis
atgacaagccggcaccgccggcttttttatgggctgcgttcctcatcgggtaaacatatgtctgacaatcacaccgaacactccctatcgctgacgctcactcccactatttctgagcagcccgcacttcccagcacttatcttgatagcgacatccattgcccgatactgaagcaacggcttgacgctttccaacgctggcaggcagaggcatttaatagtggcacctctgccgaggtattaattgcggcacgcagtgattatatcgatcatctgttacagcggttgtggacattctatggttttgacaaggtgccagaaacagctctggttgcggtcggtggctatgggcgcggcgaactgcatccattatcagatattgatgtgttagtactgagtaagcagcgtctaaatgatgaacaggcgcaacgggttggccaactcattaccttattgtgggatttgaagctggaagtcggtcatagtgtgcgcacactggaagagtgcttgctggaaggcctcgcagatttaaccatagccaccaatatgattgagtcacggttgatttgcggtgatgtcgccctttttttacagatgcaaaaacatattttcagtgacagtttctggccctcccctcaatttttccatgcaaaagttgttgaacagcaagagcgtcataaacgctatcacggcaccagctataatctggaacccgatatcaaaagtagccctggtggattacgggatatccacacattactctgggttgcccgtcgccatttcggtgcgacatcgttaagtgaaatggttgattttgggtttctcaccaacgccgagcgtaatgaactgaatgaaagccagagttttttatggcgtatccgttttgcgctgcacctggtattgactcgctacgataaccgcctgctgtttgaccgccaactgagcgttgctcaacttttacgctacgaaggtgaaggcaatgagcccgttgaacatatgatgaaagatttctatcgtatgacaaggcgtgtcagtgaactgaacaatatgctgctgcaattgtttgatgaagccatactggcattagatgcgaatgaaaaaccgcgtccacttgacgaagagtttcaactacggggagatttaattgatctccgtgatgagaacctatttgttcgtcagcctgaagcgatcatgcggatgttctatctgatggtgcgcaatcaggatattaaaggtatttactccactaccgtccggcgtttgcgccatgcccgtcgtcatctgaaagcccctttatgtcacattcctgaagctcgtaaactgttcatggccattttgcgccaccccggtgccgtttcacgtgcgttgctgcccatgcatcgtcacagtgttttatgggcctatatgccgcaatggggcagtattgttggccaaatgcaatttgatctatttcatgcttatacggtggatgaacacaccatccgtgttttgctaaaaattgaaagcttcgcggatgaagatacccggccacgtcatccactctgcgtcgaactctaccctcgcctgcctcagcctgaattactgctgctggccgccctgtttcatgatattgccaaagggcgtggcggtgatcattcaatactgggtgcccacgacgcggtggagtttgctgaacagcatgggcttaattcacgcgaatcccaattagtcgcttggttagttcgctgccatttattgatgtcagtgaccgcccaacgtagggatattcaggacccggccgttattcagcaattttctgccgaagtgcaaagtgaaacgcgcctgcgctatctggtcagcctgaccgtggcagatatttgcgccaccaatgaaaatctatggaatagctggaaacagagcctgttacgcgaactgtactttgcgaccgaaaaacagctacgccgcggaatgcaaaatagccctgatttacgtgagcgtgtacgccaccaccgcctgcaagcgttagctctactgcggatggataatattgatgaagaggcactgcatcgtatctggagccgttgccgagcggattacttcctacgccactcgccgaatcaacttgcctggcacgcccgccatttgctggagcacgactcaaccaaaccgctagtcttagtcagccgtcaggctacccgtggtgggactgaaatatttatctggagccctgaccgcccatcactctttgccgctgttgttggggagcttgatcgccgcaacttgagcgtccatgacgcacaaattttcaccaatcgtgatggtatggcgatggatacctttattgtattggagccagatggcagcccgttggcacaggataggcatccaataatcagccatgcattacagcaagcgataaaccggtcagattaccaacacccgccgcgggttaggcgattatcacctaaattacggcatttcagcgtgccaaccgaagctaactttttaccaacccataacgagcggcgtacttatctggaattaattgcgttagatcaaccagggttactggcacgtgttggcaaaatttttgctgatttagggttatcactgcacagtgcacgtatcaccaccatcggcgagcgagtagaggatttatttgttttagcagataaagatcgtcgagcactgagccttgaaacccgtcgtgaattagcacaacgattggcagatactctcaatccaaacgataaactgtga

SEQ ID NO: 41772 - DNA, 825 bp, Yersinia pestis
atgactaaaacacctgtttctggcttggttcgtacagcattattcgcagcattagcttctgctttcagcttatcagcccaggcggctgaggcactgcgggtagcggctgaccccgtgccccatgctgaaatcctgcaattcgtacaaaagctggacccttcactgaatttgaccattatcgaaatccccaacggggtgaactccaacgaattgctggcccatggcgatgttgatgctaattattttcagcatctcccatatttacactcacaagagcaggcactagggcaaaaatttgtggttgcagccaccgtccatattgagccacttggcatttattcacacaaatataaaaacgttgccgaagtgccggataagggcagcgtcgcggtaccgaataacgtcactaacctcagccgtgcactctatttactgcaagagcagggactgatcaccttaaaaccgggttttactgacccagccaaacagcaggcaacaccgaaagatatcgcggagaatcccaagcacctgaaaatcttggaaatcgaatcaccacaaatccctcgctcattggatgatgttgatttagccgtcattaatggcaactatgctctggaggcagggttaaatccggcaaccgatgcattggggttggagaaagctgaaggtaatccttacgccaatattttggtgaccacccctacgttggaaaatgatccgcgaatcaagcaactggcaaaagatttgcaattgcaggaagtggctaaatttattactgaaaaatatgctggctcggttatcccggtggcaggaactcaaccatga

SEQ ID NO: 41773 - DNA, 726 bp, Yersinia pestis
atggcaactgtttccatgcgcgacatgctccaggctggtgttcactttggtcaccaaacccgttactggaacccgaaaatgaagcctttcatcttcggcgcacgtaacaaagttcacatcatcaacctggaaaaaactgtaccaatgttcaacgaagctctggctgagttgactaaaatttcttcccgtaaaggtaagatcctgtttgttggtactaaacgcgcagcaagcgaagcggtaaaagaagctgctaacaactgcgaccagttcttcgtgaaccatcgctggttgggcgggatgctgactaactggaaaactgttcgtcagtccatcaaacgtttgaaagatttggaaatccagtctcaagacggcacctttgataagctgaccaaaaaagaagcgctgatgcgtacccgtgaactgaacaagctggaaaacagcctgggtggtatcaaagacatgggcggcttaccagacgcactgtttgttgttgatgctgatcacgaacacatcgctatcaaagaagctaataacctgggtatcccggtattctctatcgttgatactaactccgatccagatggcgttgacttcatcatccctggtaacgatgacgcaatccgtgcagttaaactgtacctaggcgctgttgctaccgccgtccgtgaaggtcgttctcaagatctggccgttcaggcggaagaaagcttcgtagaagctgaataa

SEQ ID NO: 41774 - DNA, 858 bp, Yersinia pestis
atggttgctattaccgctgctttggtaaaagaactgcgtgagcgtacagccgcaggcatgatggaatgtaaaaaggcgttggttgaagctaatggtgacattgagctggccatcgacaacatgcgtaagtctggtcaggctaaagctgccaagaaagcaggccgtattgctgctgaaggtatcatcctggctaaagtttccgctgatggtaagtacggtgtgattctggaactgaactgcgaaactgacttcgttgctaaagatgctggcttcaaagcattcggcgaagaagttatcaacgcagctctggctgaaaaaatcgctgatatcgatgttctgaaagctaagttcgaagaacaacgtgcaaacctggtcgctaaaatcggtgagaacatcaacattcgccgtgtcgctgtactggaaggcgacattctgggtacttacctgcatggcgcacgtatcggtgttatggttgcggccacgggtgctgatgaagaactggttaagcacattgctatgcacatcgctgcaagcaagcctgaatatgttaagccagacgatgttcctgctgaagttgttgctcgcgagcaccaaatccagttggacattgctatcgaatccggcaagccacgtgagattgctgagaagatggttgaaggccgtatgcgtaagttcactggcgaagtctctctgactggtcagaacttcgttatggacccaagcaaaactgttggcgatctgttgaaagaaaacaacgctgatgtcgtgaacttcatccgctttgaagtgggcgaaggcattgagaaagttgaaactgactttgctgctgaagttgcagcaatgagcaaacagtcttaa

SEQ ID NO: 41775 - DNA, 726 bp, Yersinia pestis
atggcaaccaatgcaaaacccgtatatcagcgtatcctgcttaagctgagtggcgaagccctgcaaggcgcagaaggtttcggtatcgacgctagcgttttggaccgcatggctcaggaagttaaagagctggttgaattgggcattcaggtcggtgtagtcattggcggtggtaacttattccgcggtgccggtttggcacaggctggaatgaaccgtgtcgtgggcgaccacatgggaatgctggcgactgttatgaatggtctggcaatgcgagatgctttgcaccgtgcctatgtgaacgcccgcctaatgtctgctattccacttaatggcgtttgtgataattacagttgggccgaagcgattagcttgctgcgtcataaccgtgtggttatttttgctgcgggtaccggtaacccattctttacgacggattctgctgcgtgtctacgtggtatagaaattgaagccgatgttgtgttaaaagcaacaaaggttgatggggtttactccgcagatccggtgaaaaatcctgacgcaacattgtacgaacagttaacctatcaggatgttttagaacaagagttgaaagttatggatctggcggccttcactttggcccgtgaccataacctgccaattcgggtcttcaacatgaataaacccggcgctttgcgtcgtgtggtgatgggtgagaatgaagggacattgatcgctaaataa

SEQ ID NO: 41776 - DNA, 558 bp, Yersinia pestis
gtgattaacgaaattagaaaagatgccgaagtgcgcatggaaaaatgtctggaagcattccagaaccacattagtaaaatccgtacgggtcgtgcctctccaagtatccttgatggcattcaggttgagtactacggtacggcgacaccattgcgccaattggctaacattgtagtagaagactcccgtactttagcgctaacagtcttcgaccgtagcctgagtgctgcggtagagaaggctatcatgacttcagatttggggctgaatccatcgtccgccggtactgttatccgtgttccattgccagcattgacggaagagcgtcgtaaagacttgattaaagtcgtgcgggcagaagcagagcaggggcgtgtgtctattcgtaacgtgcgccgtgatgctaacgataaagtgaaggcattgctgaaagacaaagaaatcagcgaagacgaagatcgccgttcacaagacgatgtgcaaaagctgacggatgcctatatcaagaaagttgatgctgcattggcggtaaaagaagctgagttgatggatttttaa

SEQ ID NO: 41777 - DNA, 759 bp, Yersinia pestis
atgtcgcctgtaaaagaagatagggctaacttgtccccccggagtccacgtcatgttgctatcattatggatggtaatggacgttgggctaaaaataagggtaaattaagagttttcggccataaagccggggtgaagtccgttcgacgcgcagtgagttttgctgcgaagcataatttagatgcgctcactctttatgcttttagcagtgaaaactggaatcgccctgaccaagaagtgaccgctctgatggagctttttgttcgagcactagacagtgaagtaaaaagcttgcataaacataatgttcgtttatctattattggtgatatcagccgttttagtgggcgtttacaagagcgaattcgtcgttcagaaaaattaacggcaaataatgacggattgaaactcaacattgctgccaattatggtggccgttgggatatcatccagggggtgcgccatttagctgaacaagttcagaaaggggaattgcaacctacagatatcagtgaagagtcgctcaactcgtatatctgcctgcatgagcaatctcaggtggacttagtgatcagaaccggtggtgaacatcgcatcagtaatttcttgttgtggcaaatagcctatgctgaactttactttacagatgtcctctggcctgattttgatgaaaatgtctttgaaggtgcgctgaatgcatttgcacaacgcgagcgtcgcttcgggggaactacacctatcgatgccactgcatcctag

SEQ ID NO: 41778 - DNA, 1302 bp, Yersinia pestis
atggacactacgcaaacaagcactcttgcctcggcaagaaaaatctcatcaagtacatggcgcaaaagtgacaccatgtggatgttgggtctgtacggtacagcgattggcgcaggtgtactctttttgcccatcaacgccggtattggtggcctgctaccactgattgttatggctatcattgctttcccaatgacctactacgctcaccgtggcctgtgccgattcgtgttatccggtaaaaatccaggtgaagatattactgaggtggttgaagaacatttcggtgtaggcgcaggtaaactgattaccctgctttacttcttcgctatctaccccattctcttggtgtacagcgtagcaattaccaataccgtggatagtttcattacacatcagatacacctgccatcaccaccacgcgccattttgtccctgattctgattgtgggcctgatggctatcgtgcgctttggtgaacagaccatcgtcaaagccatgagcatcttggtattcccgtttgttgccgtattgatgatgttggcgatatacctgatcccaaactggtcaggtgcaatattcgaaaacgtatccatggacggtaacggcacaggtagcggcctgtggatgacaatgtggctaatcattcccgtcatggtgttctctttcaaccactcaccgatcatctcagcctttgctgtagcaaagcgcgaagagtacggggtggatgcagagaaaaaatgttcacgcattttgagctttgcccacatcatgatggttatcaccgtcatgttcttcgtcttcagttgcgtactgagcctgtctcctgcggatctgatggatgcaaaaaaccaaaacatctccattttgtcttatctggcaaaccattttaatacgccagtaattgcctatatggcaccggttattgcctttattgccatcactaaatcattcctgggccactatctgggcgcccgtgaaggttttaacggtatggtcattaagtctctgcgtagtagaggcaaaaccattgagcagaacaaactgaaccgcattactgcgttgttcatgttagtcaccacctgggctgtcgcgaccttaaacccaagtatcttggggatgatcgaaacattgggcggccctatcatcgcgatgctcctgttcctgatgccgatgtatgccattcataaagtcccggccatgcgtaaatacagcggccagatcagtaacgtattcgtggtactcatgggcttgatcgccatctctgggatcttattcaacttaagcaacttgtttaattag

SEQ ID NO: 41779 - DNA, 849 bp, Yersinia pestis
ttgctgaagtatcgtctcataactgctttgattttgattccggttgtcattggtgcactgttcctgcttccgccggttggtttcgctattgttactctcgtcgtctgcatgcttgcagcctgggaatggggtcaattagcgggttttgccagtcgtactcagcgtatctggttagcgatactgtgcggattcctgcttgttgccatgctgcttagtctccctgaatatcagcattcacctcatcacctcttggtgagtacaccactatggctctctatgggctggtgggttgctgcattgatgctggtgcttacttacccgcgctctgctgtatcttggcgtaactcgcgcctcctgcgcatcatcttcggtattctgactattatcccatttttttggggaatgtttgctttacgccagtatggctacgagcagaaccataataccggcgcttggtggctgttatatgtcatgttattagtgtggggggcagattctggcgcctacatgtttggtaaattgttcggtaaacacaaattagcgcctaaagtctcaccaggtaaaacatgggaaggattaattggcggtttactgacgtcagctctgatatcattgctgtttggtcgatacgcaccgttggatatcgtccccgaaaaactgttaatctgttccgtggttgctgcattggcctcggtactcggtgatctgactgaaagtatgtttaaacgtgaagcgggaatcaaagacagtggtcatttgattcctggtcatggtgggatactggatcgtatcgatagcctgaccgcagctgtgccggtatttgcctgcttaatgctgttagtgttttaa

SEQ ID NO: 41780 - DNA, 672 bp, Yersinia pestis
atgactaccaattacgctcattatattgatcacactctactggcgatggatgccaccgaagcgcaaatcattaaactgtgcgaagaagctaaacaacaccatttctatgctgtatgtgttaactctggatacgttcctgtggctgcccagcaattagccgggagttcagtcaaagtctgctcagtcattggtttcccgctgggtgcaggtctgactgcagcaaaagcttttgaagctcaagccgcgatcaatgcaggtgcacaagagattgatatggttatcaatgttggctggctgaaaagtggcaaaattgccgacgtcaaagcggatattaaggccgtgcgggacaattgcgccgctacaccgttgaaggtaatattagaaacttgcctgctcagcgatgaacaaattgtacaagtttgcgaaatgtgtcgtgaacttgacgttgcttttgttaaaacatcaaccggttttagtaccggtggcgctaaagaagaacacgtcaaattgatgcgtgcaacggttggcccggttatgggggttaaagcctctggtgctgttcgtgacagagcaaccgccgaaaccatgatccaggcaggtgctacgcgaattggtaccagctctggagttgccattgtttcaggtcaacaagccgccgcatcaggttactag

SEQ ID NO: 41781 - DNA, 597 bp, Yersinia pestis
atgaattattttttcttctccatgataaacgcaacgccagcatcatcaccatggatgatttcttttgcgactttcatcgcacgtgacctgattatgctcatccctattttactgatagggctgtggctatgggggccaaaagataccatggacatgcaacgtactgtggtgacgaaagcagctatcgctctcgctttttccatgctttctgctacctgtatcgggatgctcattcctcatgatcggccttttgtcgatggctttggttatgcctttatgagccatgcgccagacagctcttttcccagtgaccacggcaccgctattttcacttttgcactggcctttcttttttggcatcacctttggtccggtgtcagcctgatgtttatcgccattgcgattgcctggtcacgtatctatctgggtgttcattggccattcgacatgctgggtgcgtttctgttaggtattgtcggctgcttgttcgcgcaactggtttggaacttatttggggaaattattgccagtaccacaaagcgcttctatcacatgagttttgccctaccaatcagtaaagggtgggtcagaggttag

SEQ ID NO: 41782 - DNA, 1023 bp, Yersinia pestis
atgccttcaattcgactggctgatttagcccagcagttggatgcacaggtgcacggtgatggcgatcttgtcatcaccggcatcgcttctatgcattctgcccaacctgagcaaatcacgtttttgtcaaacagccgctatcgggaacaacttgcatcttgcaatgcaggtgctgtggtattgactgaggctgatttacctttttgtaaagttgctgctttagttgttgaaaatccttatttcacctatgcgcgcatggctcaaataatggataccacccctcaacctgctcaggatatcgcaccgagtgccgtgatttctccgcaggcaacgttgggcgagggggtttctgttggtgcgaatgcagtcatagagtcgggtgttgtactcggcgataatgttgtcatcggtgcgggttgcttcattggtaagaacacccatattggtgcgggtagccgtttgtgggctaatgtttctatctatcatgaagttgttattgggcagaattgcctgatccaatctggtactgtcattggtgccgatggctttggttatgcaaatgatcgtggtaactgggtaaaaataccgcagcttggttctgtacatattggcgaccgtgttgagattggtgcctgtacaacgattgaccgtggtgcgctggataacacgattattggtaacggtgtcatcattgataaccaatgtcagattgcacataacgttgtgattggcgacaatacggcagttgccggtggtgttatcatggctggcagtttgaaagtgggccgctattgtatgattggcggtgccagtgtgattaatggccatatggaaatttgtgacaaagtaacaattaccgggatgggaatggtgatgagaccaatcactgaacctgggttatactcctccggtattccgttacaaccaaataaaatgtggcgcaaaactgccgctctagtgatgaatattgatggtattaataaacgcttaaaagctgttgagcgtaaaatcgataaagaataa

SEQ ID NO: 41783 - DNA, 546 bp, Yersinia pestis
ttgactactgacactcatactctgcatattgaagagattttggatctactcccgcaccgttttccgttcttgctggtagaccgtgtccttgattttgaggaaggaaaatttctgcgtgcagtgaagaacgtctcttttaacgagccatttttccaaggccatttcccaggcaagcccatcttccctggtgtgcttatattagaagcgatggcgcaggctacagggattttggcgtttaagagccgcggtaaactggaaccgggcgagctttattactttgctggtattgatgaagcacgttttaagcgcccagtagtgcctggcgatcagatgatcatggaagttgagtttgttaaagaacgccgtggcctaacccgttttaccggtgtagctaaagtcgatggcgaaatcgtttgcactgccaccatgatgtgcgcgcgtagcaaaccagcagcacctgcagaatctgtcgttgtaaaaccagatgttgtaaaaccagatgttgtaaaaccagatgttgtaaatcctgtcgttaaggagtcctga

SEQ ID NO: 41784 - DNA, 1185 bp, Yersinia pestis
atgcaaaatagcccattgactgctgattgttcattaaacgctggacgtcccctaacgattggtttagttgccggagaaacttccggcgatatcttaggcgctggattaattcgggcgctgaaagttcaggtacccaatgcccgatttgtcggtgtcgctgggcctctgatgcaagccgaagggtgtgaagcctggtatgagatggaagagttagccgtcatgggcgttgttgaagtattagagcgcctgccacggttattgaaaatcaggaaggatctgactcagcgttttagtgagctttctcccgatgtctttgttggcattgacgcccccgatttcaacatcacccttgaagggcgcttaaaacaacggggtattcggactattcattatgtcagcccatcagtctgggcctggcgacaaaaacgtgttttcaaaattggaaaagcgaccgacatggtgttggcttttctcccttttgaaaaagcgttttatgatcgtttcaatgtcccttgccgttttataggccataccatggccgatgccatgccactagtacccgatcagcaggcagcgagagcagagcttggcattgcgcctaatgccacttgtctggcgctgttaccgggtagccgccactctgaagttgaaatgctcagcgctgattttttacgtacagcggtaattctgcgtgataaattgcccaatttggaagtagtggttcccttggtcaacagcaagcgacgtgaacaattcgagcgaattaaagcggaaattgcgcctgatttatccgtacatttactggatggtaaagcgcgtgtcgcgatgatcgccagtgatgcagcattgttagcctcaggcacggctgcactcgaatgtatgctggccaaatgcccgatggttgtggggtatcgtatgaagccatttactttctggttggcagagcgattagtcaaaacaccttatgtttcattaccgaatctgttagcaggggaagagttggtgacagaattgttgcaacaagagtgccagccgcaaaaactcgctggtgcacttttgccgttgctacaaggtggtagcgaaatagcagccttaaaagaacgttttttggttctgcatcagagcatccgctgtggtgcggatgaacaggcagcacaagctgtattggagctggcagatcgatga

SEQ ID NO: 41785 - DNA, 597 bp, Yersinia pestis
atgagcgagacttttatttacccacaggctaatttaatcgcaggcgtggatgaagtgggtcgtggccctttggtgggtgccgtagtcactgcagcggtgatccttgatcctaaccggccaatagttggcttggcagattcaaaaaaactcagcgagaagcgccgcctgtcactgtatgacgaaatcactgaaaaggcactatcatggagtcttggtcgtgctgaaccggaagaaattgatcagcttaatattttgcacgcaaccatgctggcgatgcaaagggctgtatcggggctgcatattgtacccgattatgtattgatagatggtaaccgttgcccgaaattacagatgccgtcactggccgttgtcaaaggagatagccgggtggcggagatcagcgcggcttctattttagccaaagtgacgcgtgatcgtgaaatgaccgagttggacctcctcttccctgaatatggtttcgcacaacataaaggctacccaacggcttttcatttggaaaagttagccgcgcttggtgccacggtacatcatcggcgcagttttggcccggtgaaacgggtgctgggtttggtgtaa

SEQ ID NO: 41786 - DNA, 3516 bp, Yersinia pestis
atgattcaatccactcatttctggtatctggatatggccgaacctcgttttgtccacctgcgtgttcatagcgattattccatgatcgatggattagctaagattggacctttggtgaaaagagctgctgcattaggtatgcctgctctggctattaccgattttactaacctctgtggcctggtgaaattctacggcagcgcgcatggtgcggggattaaacccatcatcggtgctgacttctacgtacaaagtgaaatactgggtgatgaattagctcacctcacggttttggctcgcaataatgaaggctatcaaaatctgactttattgatctcagaagcctaccaacggggttatggcgctgcgggtcctatcattgatcgcgattggctgatcaaacataaagaaggactcattctgctgtctggtggccgaatgggggatgtgggcaaatttctgctacggggtaaccaggttcaggttgatcaatgtctcgccttttatcaggaacactttccagactgctattacctcgaacttattcgaaccgggcgtccagacgaagaaaactatcttcatgctgccgtggcattggccactgagcgtggtttacctgtcgttgcgaccaatgatgtgcgttttattgatgaatcggattttgatgcccatgaaatccgtgtcgctatccatgatggttttacattggtcgatcctaaacggccgaagaattacagccctcagcagtttatgcgcgatgaagaacagatgtgtgagctgttcgctgatattccagaagcgttgatcaacagcgttgagatagccaaacgctgtaatgtcactattcgccttggggaatatttcttaccgcagttccccacaggggagatgagtacagaagattttctggtagaaaaagccaaacaaggtttggaagaacgtttggaatttctgtttccggaccctgaggttaggctgcaaaaacggccagaatatgatgaacgtctggatatcgagctcaaagttatcaaccaaatgggcttccctggttacttcctgattgtaatggagtttatccagtggtcgaaagataacggcgtaccggtggggccggggcgtggctctggtgcaggctcattggtggcttatgccctgaaaattactgatattgacccactggaatttgatctactgttcgagcgcttccttaatccggaacgtgtatcgatgcctgacttcgacgttgacttctgtatggagaaacgtgatctggtgatcgaacacgtggcggaaatgtatggccgcgatgcggtttcccagataattaccttcggtaccatggcggctaaagcggtcatccgcgatgtcggccgtgtattaggccatccctatggctttgttgatcggatctcaaaattaatcccactcgatccggggatgacactggaaaaagcgtttgcagcggagccacagctagctgaaatttatgaagctgatgaagaggtcagggcgctaattgatatggcgcgtaagctggaaggagtaacgcgaaacgccgggaaacatgctggaggcgtggttattgcccccactaagattaccgattttgccccactctattgtgatgcggaaggcaataacccagttacgcagtttgataaaaatgatgtggaatatgctgggctggtgaagtttgacttcctcggtctacgtacactaaccatcattaattgggcgttggagatgattaacgcccggcgcgctaaaactggattggaacccattgatatcgcctctattccgctggaggataaaaaaagcttcgatatgctgcaacgttcggaaacgacagcagtattccagctggaatccagagggatgaaagacttgatcaagcgcctgaagcccgactgcttcgaggacatgatcgccttagtggcgttatttcgtcccggtccgttacaatcagggatggttgataactttattgaccgtaaacacggccgggaagcgatatcttacccagatattgagtggcaacatgaatccttgaaacctgtgcttgagccgacctacggcattatcttgtatcaggaacaggtcatgcaaattgcgcaggttctgtccggctactcactgggtggtgcggacatgttgcgtcgtgccatgggtaagaaaaaccctgctgagatggctaagcagcgttctgtatttgaagatggtgcgaaaaatcagggtattgatggtgagctggcgattaaaatctttgacctggttgagaaatttgcaggttacggttttaacaaatctcactcggcagcttatgcattagtctcctatcaaacgttgtggttaaaagcccattatccggctgaatttatggctgcagtaatgaccgctgatatggataatacggacaaagtggtcggcttggtcgatgaatgctggcgtatggggctgaaaattctgccccctgacatcaacagcggtttgtaccatttccatgtaaacgatgatggcgaaattgtttatggtattggtgccattaaaggtgtaggtgaggggccgatagaagccattctggaggcgcgtaaagaggggggctattttaaagagttatttgacctatgcgcccgtgtcgataccaaaaagcttaacaagcgtattttagaaaaactgatcatgtccggtgcatttgaccgtttggggccacaccgtgcagcattgatgagttctctcggggatgcgcttaaagccgcagatcaacatgctaaagccgaagcaattggtcaggtagatatgtttggtgtattagccgacgcgcctgagcaggttgagcaatcctatgccaatgtgccgccatggcaggagcaggttgttttagatggtgaacgggaaacgctggggctgtatttaactggccatccgatcactcagtacctcaaggaaatcgaacgctatgccggtgggatgcgtttgaaggatatgcatccgacggatcggggcaaaatgaccaccgcagtggggttggtgatcgcggcaagggttatggtcacaaaacgtggtaatcgcattggtatttgtacgctagatgaccgctctggtcgtctggaggtgatgttattcaccgatgcattggaaaaatatcagcatttattggaaaaagaccgtatcctgatagccaccggacaggtcagctttgatgactttagtggtgggcttaaaatgaccgcccgtgagttaatggacatcagtgaagctcgtgaaaaatatgcaagtgggcttgctatctcgctgactgacaggcaaattgatgaccagcttttgaaccgtctccgtcagtcgttggaaccccatcgagcggggacgatcccagtacatctttattaccaacgggaagatgctcgcgcccggctgcggtttggagccacatggcgcgtgacgcccaccgatcgcttattaatcgatttgcgaacgttggtaggtaatgagcaagtggaactggaatttgactaa

SEQ ID NO: 41787 - DNA, 960 bp, Yersinia pestis
atgagtctgaattttcttgattttgaacagccgattgcagagctggaagcgaaaattgactcgctgactgcagtcagccgtcaagacgaaaaattagatattaatctggatgaagaggtccagcgtctgcgtgagaaaagtgttgagctgacgcggaaaattttctcggacctcggcgcatggcagattgcccaattggcacgccatcctcgtcgtccttataccctggattatatcgctaatatctttaccgatttcgaagagctggctggtgatcgtgcttatgccgatgataaagctattgttggcggtattgcacgtctggatgggcgcccggtgatgattattggtcatcaaaaagggcgtgaaaccaaagagaagatccgtcgtaactttggtatgccagcaccagaagggtatcgtaaagctttacgtctgatggaaatggctgaacgctttaagttacccattattactttcatcgatacaccgggggcttatccgggtgttggggcggaagaacgtggtcaatcagaagcgattgcgcgcaacttgcgtgaaatgtcacgactgaatgtccctatcgtctgtaccgtgattggtgaaggtggatctggtggtgcgttggctatcggtgtgggtgataaagtgaatatgctgcaatacagcacttattctgttatctctccagaaggttgcgcctctattctgtggaaaagtgcggataaagcgccattagccgcagaagcgatgggcattactgcacatcgcctaaaagaactgaagatgattgactcagtgatccccgagccgttggggggcgcacatcgcgattacgccgcgattgctatctcactgaaagcgcaactgttggcagatctcaatgatttggatgtgctgaatgacgaagagttattgaatcgtcgttatcagcgcttgatgaactacggctattgctga

SEQ ID NO: 41788 - DNA, 846 bp, Yersinia pestis
atgaataacttaccggaggtgcgttctgtctggcgtcgggtgatcctgaccgtcggttataccttcctgtatgccccaatgttgatgttggtaatttattcgtttaacagctcgaagctggtgacggtgtgggctgggtggtcaacccgttggtatacgcagttatttaatgattcggcgatgatctctgccgttgggctgagtctgacgattgccgccgcctctgccactatggcggtggtgttggggacgattgccgcggtggtcatggtgcgctttgggcgttttcgtgggtcaaccggttttgcttttatgctgactgcaccgctggttatgcctgatgtcatcaccggactgtcactactgctgctgtttgtggcgatggggcatgccattgggtggcccgcagaacgtggcatgttcaccatctggctggcccatgtgactttctgcacggcctatgtgacggtggtcatcagttcgcggttgcgcgaattggaccgttctattgaagaggcggccatggatctgggcgcgacaccactgaaggtcttctttgttattacggtaccgatgatcgcccctgcgctgatctctggttggttgctggcctttaccttatcccttgatgatctggttattgccagctttgttgccgggccgggggccaccacgttaccgatgttggtattctccagtgtgcgtatgggggtgaatccagagattaatgcgttagcgacacttatcctgctggtggttggggttatcggtttatttgcatggtggataatgtcgcgtgcggaaaagcagagattgcgcgaattacgtaaagctgctcgtagctga

SEQ ID NO: 41789 - DNA, 1383 bp, Yersinia pestis
atgaacttagtcacctcgaaacccaatgtgttacttaaccctcttttcgctcaactgggtgaaaaccgtcatgtgttggtggggtttagtggtgggttagattccacggtgttactgcatttattggtctgtttacgtcaacaacttattcctgaactgaacattcgcgctattcatattcaccatggtttaaacccgcaggctgatagttgggtaaaacattgtatgcagcaatgtgatcaatggaaaattgagcttaaggtggtgcgagttaatattgatcctcggcagaacgggatagaagcggcagccagaacagcacgttaccaagccttttccgccaatttggctgccaaagaagtcttactgaccgcccagcatttggacgatcaatgtgagaccttcctgttggcacttaagcgtggtagcgggccggcgggtctctctgcgatggcggctaaaatgccctttgcccacagccaactgttgcggccactactcgctttttctcgagagatattagagaactatgcacaggcacagcaattacaatggattgaagatgatagcaatcaagatgatcgttttgatcgcaatttcttacggctaaatgttctgccgatacttaatcaacgttggccacattttgctcaggccacggcacgtagtgcggggctatgtgctgagcaggagcagttattggatgaactgttggctgaaaacttgcagcagttacagggacctgacagatcactctctattgatggactattacaggcatcaatggcgaaacgggcggctatattgcgccgctggttggcgagtcttggtgcaccaatgccatcacaaagccaattgcagcgcctgtggctggaggtcgccatggcacggcaagatgcggagcctcaattaatgattggcacccgtcaggtacgccgttttcgtcaacatctgtatttattaatgcccttggctgaaataacaacaaattacttaccttgggcaaccgttaaggccgccccaaattcgtcgataatacctttattacccgagccattatggctacctgccgatttaggcgtactgaggtttgtctcagcgggtgggcaagcggtccgtcctgccgccgttggcgaggagataagtgtacgttttggtttacagggagatatcaaaattgttgggcggcatcactcgcgtcaaagtaaaaaagtatggcaagagctgggtattcccccatggcagcgggaacgtattccgctgttatatttcggtgaacaattaattgcagccgcgggggtattcgttacccaagcggggcaggcgaatgaaaatgagccatgctggcacttagattgggataaaccacttagattgggataa

SEQ ID NO: 41790 - DNA, 789 bp, Yersinia pestis
ttgatgaaagccgatgtgctggctcaactcgcggggctgcagcaagaaatcagccagttacacgataatgcccagcaaaatcagtctcattttgtgttgttagagcgccgttttagtcgcttgcagtcttttaatgacgagccacagctacaagattaccggttgcagttggagcacgatgatgcggtggtaaaacaaattgcccaattgcggcaggtcgccaatgcggcactgtgtgactatgaaaaacatcaggtatgcgccttgtgtagcccatcctccaagactgacgactacctgacaagttttaaccaatcgctgcaacaagagatcaaactcgccggtatgcagatgggtgagaaggtgttgttggtgggcagcggtgccttgccgaccacggcgctggtactggttgccaagctcggtgcaaccgtcttttgctacgatcacgatcccgccgcacagcagttagctcgccagctcgttcaatccctcggtctggaaaaacaggtgcaatttattgataacctgaaagagttaacggaccgtcccgttgaccacattatcgtcgcttcattggtggcggataaacaggcgttattagcacaattggttccctatgtgacccggtccagcaaattagtgatgcgctatggcaatgggctgaagtctattttcaactgcccttattgccatgaggtgaactgttcacattggcgcaccgccagtaaaccggtgaccaccgggctttatgaccttatcattttggaacctaatcatcatgcataa

SEQ ID NO: 41791 - DNA, 1371 bp, Yersinia pestis
atgcataacaccctgccgaccttgattctgggggccgggcctgcggctatccaacttgcggtggatattagtgctacaggtgatgctaggttggggctctataatcggcccagcacgaaaggcgaacggttaaagcagtatctggcactcacgccgaccctttatttgcagggtaccggcaaggcacaagcgacccagaaagagagcagtgtcacgattgattgctatatcgatcaattggcgcaggcggttggtgattggcaacgtttgattctggcagtccctgccgatcactattacgccgtcctacaacagattccgtgggccgcgttaccacaattaaagtcagtgattttactgtcctcttcgatgggttccggcctgatggtgcagaatctgttaaacgccgcggggaagcgcgatgtcgaggtcatcagcctgtccagttattatgcggatactaaatatattcgcgctgaaacccaagacattagcgctaatacccaagacattaatgctggaacccaagacattggcgctatacagccttatcgggcgtataccaaagcatttaaacagcggatatatctggccaatcagtggggtaatgcgggatcggcagagatgagctggttaacggcggtattagcccgccaccacattgacaccttaccgtgttctaacttgttggccgccgagcgttttagcattaccaattatgtccatcctcctttggcgctggcggataccacgttgcaggcgctgttctatccagagcaacgtagccagtatctgtataaaacccaaccagaagggccggtctgtccggcggtgattgcggatttagcgggtttggccgatgactataaaaggctcctcaaccggctaggggtggaagaaatcaacttgctacgttttctcaatgacgataactatccggtgcctgcctccatggtcagtcgtcgctggattgacgaatttccacagcttccccctcttgagcagcaatacgcactgtttgttcgttataccgccttgttagtggacccgtactctacaccggatgaacaaggccgattctatgacttttcggcggtcaaggtggccacggtatatcaagacgcgaatgcgctgtggcatttgccgcgagtgccgctggaggatgttcacaaattgcgaacgctgctattactggcgggcgcgctggatgtggtgatgcccacagcgcagcggctgctacagcgattccagcaggcgctcaaggcgtttattgaccgggtcggtgaggaacattgccatccctctttattgggggacgattgtgacaggcaggcggccatcatcgaacaacaatggcggagccagacatga

SEQ ID NO: 41792 - DNA, 717 bp, Yersinia pestis
atgaatgaatttcaacctttagcaagtgccgccggtatgaccgtcggccttgccgtttgtgcactggcactcggtttggttctggcgatgctgtttgccgtcggtgaatcatcacgtttgaaagtggttagttacctgactatcggttgggtgactcttttacgcggattacccgagattctggtggtcctgtttatctatttcggctcttctcagctgttgatgatgttgtcggacggtttcacgctgaatctctatctgtttgagctgcccattaagcttaatctggataatttcgaggttagcccattcttgtgcggtgtgatcgcactggccctgctctattccgcttatgcatcgcagacattgcgcggcgcactaaaagcggtgcctatcgggcagtgggaatccggccaggcactcggtttaagccagacggcgattttcttccgtttgattatgccgcaaatgtggcgacatgccttgccaggtttgggtaatcaatggttggtattactcaaagataccgcgctggtgtcgcttatcagtgtcaatgacctgatgctgcaaaccaaaagtattgccacccggacacaggaacccttcacgtggtatgtgattgccgcagcaatctacctggtcgtgaccctgctgagccagtatgtcctcaaatggattgaactccgtaccacccgttttgagcggagcgcatcctga

SEQ ID NO: 41793 - DNA, 966 bp, Yersinia pestis
atgagtaaaccgattcagatggaacgcggcgtaaaataccgtgatgcagacaaaatggcgttaatcccggtaaaaaacgtggtgaccgaacgtcaggagctgttgcgtaaacccgagtggctaaaaatcaagcttccgactgattccagccgcattcagggtatcaaagctgcaatgcgtaagaatggtctgcattcggtttgtgaagaggcctcctgccctaacctgtctgagtgctttaaccacggtacggcaacatttatgatccttggtgcaatttgtacccgccgttgcccattctgtgacgttgcccatggtcgcccagtcacaccggatgctaatgagccagagaagctggcacagacgatccaagacatgggtctgcgctatgttgttatcacgtccgttgaccgtgatgacctacgtgatggtggtgctcagcattttgccgattgtatttcagcgatccgcgccaagaatccaaccatcaaaattgaaacgttagtccctgatttccgtggtcgtatggatcgcgcactcgatattctgaccgcaaccccaccagatgtatttaaccataatttggaaaacgtaccacgtgtttatcggcaggttcgtccaggggcgaactacgattggtcactgaaattacttgagcgcttcaaagaagcacatccagatatcccaactaaatccggcttaatggtcggcttgggcgaaaccaatgccgagattgtcgaggtcatgcatgatttacgccgccacggggtcacgatgttgacgctggggcaatacttgcaaccaagccgccatcatttacccgtacaacgttatgtcagcccggccgagtttgacgaaatgaaagcagaagccatggctatgggctttacccatgcagcctgtggcccatttgttcgctcttcttaccatgcagacctgcaagcgaaaggtatggaagtgaagtaa

SEQ ID NO: 41794 - DNA, 1008 bp, Yersinia pestis
atgaaggtattggttaccggcgcaaccagtggattaggccgaaatgcggttgaatatctccgtcgtcaggagatcagtgttatcgctactggtcgtaatcaggcgatgggcgcgttattgacaaaactgggggctaaattcattcatgctgacctgacggatctggtttcctcacaggcaaaagccatgctggcggatgtcgatacgctgtggcattgttcgagctttacctcaccgtgggggacagagcaggcttttgcgttggcaaatgtgcgcgcgacgcggcgccttggagaatgggcagcggcttatggcgtagagaatttcattcatatctcctcacccgccatttatttcgattaccaccatcatcgcaatattcaggaagatttccggcccgtgcgctttgccaatgaattcgctcgcagtaaagccgccggtgaagaggtgatcaaactgctggcgctgtccaatccacaaacacattttactattctgcgcccacaggggttattcggcccgcatgataaagtgatgttgccccgcttgctacatatgattaaacattacggtaccctgctgctgccccgtggcggtgacgcactggtggatatgacctatctggaaaacgccgtacatgcgatgtggcttgccacccaaagccaaaagaccctttctggccgcgcttataatattaccaaccagcaaccccgccctctgcgcaccatcgtacaacagctactggacgcgttggatatgaaatgtcgaattcgctcagtgccttatcccatgatggatatcatggccagggcaatggagaaaatgagcaataaagcagaaaaagagccggtgttaacacactatgcggtggctaaactcaattttgatctcacactggataccctccgtgccgagcaagagttgggctatcgcccaatcatctcactggatgaaggtattctccgcaccgcccgctggctgaaagaacacggtaagtttcgcggctaa

SEQ ID NO: 41795 - DNA, 1722 bp, Yersinia pestis
atgaagcaaactgtggcaacactgatcgctaaaacgttggaacaggcaggcgttaagcggatttggggcgtaaccggggattcactcaatggtctgagtgatagcctgcatcgcatgggaactatcgagtggctgggcacacgtcacgaagaagtggccgctttcgccgccggggcggaagcacagctcaccgggcagctagctgtatgcgcgggttcctgtggccccggtaacctgcatttgattaatggcttatttgattgtcaccgtaaccatgtcccggtactcgccattgctgcgcatattccctccagtgagattggtagcggttattttcaggaaactcacccacaggagttattccgcgaatgtagccactactgtgaactcgtttcgaacccagaacagttaccaagagtgttagaaatcgccatgcgccaagccattcttaatcgtggcgtatcggttattgttctgccgggcgatgttgcgttacagccagcgccagaagatgccgccgtcatctggcaaacaccgaaattaccattagttcagccaccgatgagtgagttaacgctcttggctgacaccctgaataaagctaaaaatattacgttgatgtgcggtagcggctgcgctgatgctcatgatgaagtggtcaaattggctgagagactacaagccccggtggttcacgccctgcgtggaaaagagcatattgagtgggacaacccttacagtgtcggtatgaccgggctgattggtttctcctcaggctatcaagcgatgctcaatgccgataccctgattctgctggggacgcagttcccttaccgcgcgttttatcccactcacgccaatatcatccagattgatattaatcccggaagtcttggcgctcattgccccgtcaacatggcgctggttggcgatatcaaaaccaccctgaccgcgctgttgccgcagttagatgccaaaagtgaccgcgcgtttctggataaagcgctggaacattaccgtaccacccgccaagatctggatgctctcgccaccgcgaatgataaccaaccgatccacccacaatatctggcacaacaaatcagtcactacgccacagaagatgcgattttcacctgcgatgtgggtaccccaaccgtttgggccgcacgttatttgcagatgaacggcaagcgccgtttactggggtcgtttaaccatggctcaatggctaacgccatgccgcaagcaattggtgcccaagcaaccgcccctgaccgacaagtcgtggccttgtgcggcgacggtggtttcaccatgctaatgggggatttcctctcactgacccagctaaaattacccgtaaaaatcgtggtatttaataacagcgtactggggttcgtggcaatggagatgaaagcgggcggctatctgacggatggtacggacctgcataatccagacttcgccgccattgccaacgctgctggcatcaaagggattcgggtagaaaaagcctctgagttaaatgcggcactggaaagtgcctttgcacatcctggccccgtattggtggatgtcgtgacggcgaaacaagagctctcaatgccaccacagattaagtttgagcaagccaaaggatttagtctttatatgctcagggccattattaatggccggggggatgaagtgatcgagctggcaaaaactaactggttacgctaa

SEQ ID NO: 41796 - DNA, 1023 bp, Yersinia pestis
atgaccgattttattccaaccgattcccctacccccttctgccctaaccgtatgcaggtccattccatcgtgcaagagacgcccgatgtctggagcctacggctgattaatcacgatttttactcttatttgccgggccaatacgcgttggtgagtattcgcaacagtgatgaaaccttgcgcgcctataccctctcctcgacaccgggtttaagcccttttatccaactcaccgtgcgctgtttacctgatggtgaaggctcccgctggctgacgcagcaggttaatgtcggggattatctgtggctttctgatgctcagggcgagtttacctgcgccaatgccgatgatgaccactatctgatgctggcggcgggctgtggcgtcacacccgtaatatcaatgtgtcgcgcactactggctcagcgcccacaggccgatattcgggtaatttttaatgtccgcacccctgccgatgtcatttttgccaatgaatggcacaccttattgcagcgctatccacagcaattaaaactcacgctgatggcagagtcagcggcaacggcggggtttattgaggggcgaattaatgcccgtattatgcagcaggtcgcccccgacattgctcatcgccgcgtgatgacttgcgggcctgcgccctatatggcgtgggttgaacagtattgccaacaacagcaagtgcctgccgatcatttccagcaagagcaatttcgtaccgctgatgaggttatcgataccagtaatgaattgacgatgactatcagccgcccgctacgcagtgtcaacgtcccggttggcacctccctgctctttgcgctggaacaacataaaataccggttatggccgcctgccgcgcgggtgtttgtggctcatgtaaaacccacattttgcatggcaaatacaccaccaccagcaccatgacgctaacgccggaagaaatagcgcaaggttatgttctggcatgcagttgccaacttcagggggatgtccaattggcgtga

SEQ ID NO: 41797 - DNA, 471 bp, Yersinia pestis
gtgaaactgcaactggtagccgtcggcacgaaaatgccagactgggtgcagacaggttttatcgaatatctgcgccgctttcccaaagatatgcccttcgagctggcagaaatacctgcgggtaaacggggcaaaaatgccgatatcaaacgcattctggaaaaagaaggcgagctgatgctagctgcggtagggaaaaataaccgtattgtcacgctggatatcccagggacaccctgggagaccccgcaattagcccaacaattagaacgttggaagcaggatggccgtgatgtaagcctgctgattggcgggccggaggggttagccccggcctgtaaagccgccgcagagcagagttggtcgctctctccgttaacgctacctcatcctttagtgcgtgttttagtggctgaaagcctctatcgtgcctggagtattacgaccaatcatccttatcaccgggaataa

SEQ ID NO: 41798 - DNA, 897 bp, Yersinia pestis
gtgtattcaggattgctgatcattcttttgccgttaattattggttatctcatcccacttagccgcaaaacacttattcaatggatcaaccgctcgttaagctggatggtctacgtgattttattctttatgggtattagcctggcattcctggagaaccttagcgctaatctgctgcttattttccaatataccagcctcttttttctgtgtattttatgcgccaacctgctcgccctgtttttactcgaacgtaaaataccgtggaaacatacacatcgtcaggagatattaccttcacggttgcatatggcactggagtcattaaagctctgcggtgtcgtgatagtgggtttcctgttaggcctgagccaatgggaatggctacaatttgcggccaaaggcagtgaattagccctgattttcctgctatttttggtcggaattcaattgcgtaacagcggtatgacgctgcgccagatagtcttaaatcgccgggggaccctagtggcctttgtggttgcgctgagtgcgctcgtgggcggcattatcgctgctgcgctgctcggtttgccgataaaaaccgggttggcgatggcctcaggttttggctggtattcactgtctggtattttactgaccgatgcctttgggcctgttattggtagcgccgcgttcttcaatgacctcgcccgagaattagtggcaattatgttgatcccaacattggtgcgcagtagccgctccaccgcactgggcttatgcggtgcaacctcaatggactttaccttgcccgtattgcagcgcagtggtgggttggaaatggtccctgcggctatcgtacatggctttttgctcagtttgctggcacccatattaatggctttcttttcctaa

SEQ ID NO: 41799 - DNA, 1668 bp, Yersinia pestis
atgtatcttgaacgcgtagaaattgtcggttttcgtggtattaatcgtatttcattgaaccttgacgataatacgttgctgatcggtgagaacgcttggggtaaatccagtttattagatgcgctgacactgcttttatcgccagaaccccaactttatcatttcactgtgcaggatttttattatccaacaggggatgaaagcgctaaagagcgtcatctacaggttattttgactttttgtgaaaaagatattggtcattggcatgctccacgttaccgccagctagccccactgtggataaaaaataacgatgggttacatcgtatctactatcgagtggaaggagagctgggtgatgatgggacggtatgcacgtggcgtacttttctgaatttagacgggcaacctctgccgttgcacgatatcgaaaaactggcgcggggagtgatccgtattcacccggtactacgattacgggatgcgcgttttatacgccgtttgcgccgtaccgtttccgaagacagtaaagcgccagataaggttgcattgaatcggcagttagatcagttgagccgcgagttggtacggaatccgcaaaaactgaccaatgcagagttgcgccaaggggtggaggcgatgcgccaactgcttgagcattattttgctgagcaaggttctcaattgccgggtcatcacaataatccccctcgtccgcaaccggaacgtgcggcgtggcaagcactagacaatatcaaccgcatggcggcagaacctaacagccgcagtatgaggctaattttgttggggatgttttcaacgttattgcaagcaaaaggctcactgagcctcgatcctcatgcccggccattgctcttggtcgaagacccggaaacgcggttacacccgattatgctctccgtcgcttgggggttgctcagccaattaccgctacagcgtatcaccaccactaactccggcgaattagtgtcattagtgccactggaaagcatttgtcgcttggtacgtgaatcttccagagtggccacttaccgtattggcccaagaggcatgagccctgaagacagccgtcgaattgcttttcacattcgcttcaaccggccctccgccttatttgcccgttgctggctgctggtggaaggcgaaacagaaatttggctgctgaacgaattagcccgccagtgcggttatcactttgaggctgaaggggtaaaagtgatcgagtttgctcaaagtggtttgcgcccgttgctgaaatttgccaaccggatggggatccagtggcataccttgaccgatggtgatgacgcaggtaaaaaatacgccgccacggtacgcaatatggccgatcaggggcgcgatagtgagcgggatcgcctaacaattttgcctgcacccgatatggagcattttttataccgcgcaggttttgatgaagtgtatcaccgtgtttcggcgatccccgcgaatgcgaaaatgcagccacgcagggtcattgataaagccatacaccgtacttccaaacccgatttagccattgaagtggccagccaagcagggcaatggggggtagaatcaatccccccactgttgaaaaagatgttctctcgcgtggtctggttggcccgaggccgggctgatgaatag

SEQ ID NO: 41800 - DNA, 2583 bp, Yersinia pestis
atgcaagagcaataccgcccagaagatatcgaaacgcaagtacagcttcactggcaagagaagcaaacctttaaagtcactgaagacgccagcaaagaaaaatattattgcctatctatgctgccatacccttcaggacgcctgcatatggggcacgttcgtaattacaccattggcgacgttatctctcgttaccagcgtatgttgggcaaaaacgtcttgcagccaattggctgggatgcgtttggcctgcccgctgaaggggctgcggtaaaaaacaataccgcccccgcaccttggacttacgacaacatcgaatacatgaagaaccagttgaaattactgggcttcggctatgactgggatcgagaaattgccacctgcaaacctgattattatcgttgggagcagtggttcttcaccaagttgtatgaaaaaggaatggtctacaagaagacctctgcggttaactggtgtccacacgatctcactgtgctggctaacgagcaggtcattgacggctgctgctggcgttgtgacaccaaagttgaacgtaaagagatcccgcagtggtttatcaaaatcaccgattacgctgagcagttgctcaacgatctggacacgctggaaagctggccagagcaggtgaaaaccatgcaacgtaactggattggccgctctgaaggggtcgatatcgttttcgacgtcgtggatagcgaagagaaactgtctgtttataccacccggccagacacctttatgggcgtgacctacgtagcggttgctgctggtcatcctttgtcattgcaagcggcggcgactaatccggccctggctgatttcgttgctgaatgccgtaataccaaggttgccgaagctgaaatggcaaccatggagaaaaaaggcatggcgacgggtctgtatgccatccatccattaactggcgagaaactgcctatatgggccgctaactttgtcttgatggattacggtactggcgcagtgatggccgttccgggccacgatgcacgtgactgggaatttgccaccaaatataacctgccaatcaaaccggttattttggccgcggatggcagtgagccagacttgagtcaggaagccatgaccgagaaaggcacgctgtttaactctggtgagtttgatggcctgaatcatgaagatggttttaatgccattgccgataaactggtcgcactcggtgttgggcagcgcaaagtaaactatcgtctgcgtgactggggtgtttctcgccagcgttattggggtgccccgatcccaatggttacgttggaagatgggactgtcgttcctaccccagaagatcaactgccggttatcctgccagaagatgtggtaatggacggtatttccagcccgatcaaggccgatcctgagtgggctaaaaccaccgttaacggtattccgggtctgcgtgaaaccgataccttcgatacctttatggaatcatcttggtattacgcgcgctacacctgcccgcaatatgatgacggtatgctggaccccgcagccgctaactactggttacctgtcgatcagtatgttgggggcattgaacatgccattatgcatctgatgtatttccgcttcttccacaaattactgcgtgacgccggtctggtggactccgatgaacccgccaaacgcctgttatgtcaggggatggtactggctgacgccttctattacaccggtaataacggtgagcgtatttgggtttcaccggtcgatgcgattgtcgaacgtgatgacaaaggccgtatcgttaaagctgtagatgcggaaggccatgagctggtgtacgccggcatgagtaaaatgtcgaaatcgaaaaacaacggtatcgacccgcaagtcatggtagaaaaatacggcgcggataccgtacgtctgtttatgatgtttgcctcaccagcagaaatgacgctggaatggcaggagtcgggcgttgaaggggctaaccgcttcctgaagcgtgtttggcgtctggcctttgatcacaccgcgaaaggtgcagtgaagccactggatattgccagcctgactgaagaacagaaatccctgcgtcgcgacctgcataaaaccattgcgaaagtgaccgatgatgttggccgccgtcaaaccttcaacacggcaattgctgctgtgatggagttgatgaacaagctgggccgtgcacctcaggaaacggagcaagaccgcgcactgatgcaagaagctttactggcggtagtccggatgctttatccattcacccctcacgtctgcttcagtttgtggcaagctttgggtggagaaggcgatatcgatactgcgccgtggccaattgctgatgaacaagcgatggttgaagactctaaattagtggtcgtacaggtcaatggcaaagtgcgtggcagaattacagtgcccgccgatgccactgaacagcaagtccgtgaacgcgctggtcaggagcacttggtggctaaatatctggatggcgttactgtacgtaaagtcatctatgtccctggcaaattgcttaatctggttgtgggttaa

SEQ ID NO: 41801 - DNA, 918 bp, Yersinia pestis
atgcaaatgcgtaaattggcgttagtgctactgttagcagggatgacaagtagcgtggctcaagcagaagatgcaacagcgaaggcagatacggctattgatacgttgcaaaaggttaaaaacaacggtgttatcgttgtgggccaccgtgaatcttctgttccattctcttattatgataatcagcagaaagttgtaggctactcgcaggattactccaacctcatcgtggatgccattaggaaagaacttaatgcgccaaatttagaggtgaaattgatccccatcacgtcacagaaccgtatcccattactgcaaaacggtacctttgatttcgagtgcggctctacgaccaataatctggaacgtcagcagcaagcggcattctcaaataccatttttgtcgtcggcacccgtttactcaccaaaaaagactctgaagtcaaagacttcaaagatttggcaggtaaagccgttgtggttacttccggtacaacatctgaagtactgctcaacaagctgaatgaaaaagacaacatgaatatgcgcatcatcagtgcaaaagatcacggtgactctttccgtaccttggaaagtggccgcgcggtcgcctttatgatggatgatgcgctgttagccggtgaacgggcaaaagccaagaaacctgatgaatggagtattgtcgggacaccgcagtctgaggaagcttacggttgcatgatgcgtaagaatgacccggcctttaaagcgttattagataaaacgattgcaacagcgcaaaccacgggcgtagctgaaaagtcatttgaccgctggttcaaaaacccaattccgcctaaaaatcttaatatgaatttcgcactctctgacgaaatgaaggcgctgttcaaagcacctaacgataaggcgttgaactaa

SEQ ID NO: 41802 - DNA, 1548 bp, Yersinia pestis
atgtctattgctctattcctccaacgccagtgggttcgcgccctactggcgctattttttggtgcctgtggcacgcttgcttactcgccgtttgatcattggcctgccgccattgtttcactattcggtttgctcagtctgacgttgaaccgcaccaccaaacaagccaccttcattggtttttgttgggggatggggctatttggcagtggcatcaactgggtgtatgtcagcatctccgaatttgggggtatgccaacggcaatcaatatcgtcctcgtcatcttgctagcagcatatttatcactctacaccatgctattcgccggtttattagcccgcctgtgccctaaggctacctggtggcggctcgcgattgcggccccggtactctggcaattaactgaattcctacgtggctgggtattaacgggtttcccgtggttacaattcggctacagccaaattaacggccctctgcgagggatagctcccctcctcggtgttgatggcatcacatttatcttgatggctatcagtggcttgctggtctacgcctgctatcaacgtcgtattgtcgcagcaattatcgcgctggccttactgctgctgccctggccactgcgccaaatacagtggttcacaccagagcctgaaagagcagtcaatatcgccatggtacaaggcaatattgctcagtcaatgaagtgggatcccaaagccctgatcaccacattgcaaatttatcttgatgaaacccggccatttatgggcaaagcccccattattatctggccagaatcagctattcccgatattgaaaccgatcagaacaccttcctgacaatgatagatggcctgatgcgggcaaatcatagcagcctgatcaccggcattgtagatgccaagcggcaacccgaggggcaagggtatcaattctttaacagcatcattgtgttaggcgataaagatacctatcaatacccgacccgcaaccgttatagcaaacatcacttggtgcccttcggtgagtacgtaccgctcgagtccctactgcgcccgctggctccgttatttaatttacccatgtcttcatttaaccggggtgattatgttcaacccccactcactatcgctggatttaacctcacggcggctatttgttatgaaatcgtcttgggccagcaagtacgggataacttccgccctgaaacagattttctactgactatctccaatgatgcctggtttggtcactccattgggccgtggcaacatttccaaatggcacgtatgcgcgcactggagctgggccgcccgctactgcgcagcaccaataatggcattactgccgctattggcccaagtggtgaaattctggcgcagatcccacagttcactcaacaggttctagaggtcaaggtcaccccaaccaccggtatcacgccatatgcccgttttggctcatggccaatgtggattattactctggttttgggcgcctttaccctgtactgcgcaatccgggggcgctctgataagcactaa

SEQ ID NO: 41803 - DNA, 879 bp, Yersinia pestis
atgagcgacgaccattcacaaaacagcgatagccccagtcccaagaaagggttctttactcttatccttaaccagctcttccacggtgaacccaaaaaccgtggcgatttggttgagcttatccgtgattctgaacaaaacgatctgatcgatcccgatacccgagacatgctggaaggcgtgatggatattgccgagcagcgcgtgcgggatattatgatcccacgttctcagatggtcacattaaagcgtaatcaaacgctggatgagtgtctggatgtgattattgaatccgctcactcccgctttccggtgatcagcgaagataaagatcatatcgaaggtattctgatggccaaagatctgctgccgtttatgcgcacagattctgaaccattcagtattgataaagttttacggacggcgattgtcgtgccggaaagtaagcgtgttgaccggatgctcaaagagttccgctcacagcgctatcacatggccattgttattgatgaatttggtggcgtttcaggcttagtaaccattgaagacattcttgagctgatcgttggcgaaattgaagatgagtatgacgatgaagaagacagagatgtccgtcaactcagccggcacacctataccatccgtgcgctaacgcaaattgaagatttcaatgaagtgttcaatacccatttcagcgacgatgaagtagacaccatcggtggtttagtgatgcaagcctttggccacttacctgcccgtggtgaaacgattgaaattgaaggttacttatttaaagttgccatggcagatagtcgacgtatcattcaggttcatgtaaaaatcccggatgatgctccgcaacctaaactggaagaataa

SEQ ID NO: 41804 - DNA, 1182 bp, Yersinia pestis
atgaacaaatcgcaaccaaattatgatgttgtggtcgttggcggtggcatggtaggtgctgcggcggcgttggggctggcacaaattggctggtcggtggcgttactggaacatgatgctcctgcaccgtttgacaaggatagcgtaccggatttgcgggtttctgctcttggttgtacttcggtggcgttattgaagcagcttggtgcttggcctcaagtacaacagatgcgttatgcaccttatcgtcgcttggaaacctgggaacaaccggggtcacaggtggtgtttgatgcggcctcgctgtctttacctgagctgggctttatggtcgagaaccggattttgcagcttgctctatggcaacagtttgctgaatgccctaatttgacgctgttgtgcccgtcacggctacaaagcatggttagaatagatgactactggaaagtcacattgaatgaacaggaggagatacagggccgtttagtgataggtgccgatggtgcgaactcgttggtgaggcgtttggcggggataggcaccagcggttggcagtatcgccagtcttgcatgttgatcaccgtagaaactgatgtcatgcagcaagatacgacatggcagcaattcttcccgaccgggccgcgtgctttcctacccctgtttgatcactgggcatcattggtttggtacgacagccctcaacgtattcgtcagcttcaggcgatgtcgatggcacaactgagccaggaaatcgcagccttcttcccctctcgtttgggggctgtcaaggcgattgccgctggcgctttcccgctggttcgtcgccatgcgcagcagtacgtaaaaccggggttggtattattgggagatgccgctcataccatcaatccattggctgggcagggggtcaacttgggataccgtgatgttgacgcattgctggaggtgcttagtcaggcccgtgagttggctgaaccttggcacagtgagcaggttttactgcgttaccagcgtcgccgccgcaccgataatctcatgatgcaaagtggcatggatctgttttacacggcctttagtaatgatctgccggcggttaagtttgcacgtaatctggcgttgatggtggcccagcgtgccgggaagctgaaagaacatgcattgaggtatgcgttggggttgtag

SEQ ID NO: 41805 - DNA, 3918 bp, Yersinia pestis
ttgagccaggaatatacagaagataaagaagttaccctaaaaaaactcagcaatggccgccgtttgcttgaagctgtgttgattgtggttactattttggctgcgtacctgatggttgcgctggtcagtttcaatccctcagaccctagctggtcccagactgcatggcatgagcctatccacaatttgggtgggagtatcggtgcctggatggctgacacgctgttttccacctttggtgttttagcctacgcaattccacccatcatggtgatattctgctggacggcttttcgccaacgtgatgctagcgagtatctcgattactttgccctttcattacggctgattggcaccctggccctgattttgacgtcgtgtgggctggcggcacttaatatcgatgatctttactactttgcctctggtggggtaattggtagcttattcagtaatgccatgttgccgtggtttaacggtgtcggtgcgaccttaacactgctgtgtatttgggtggtgggattaacgctatttactggctggtcatggttggttattgccgagaaaattggtgcagcggtattaggttcactgacatttatcactaaccgctcccgtcgtgaagagcgctatgatgatgaagacagctatcatgacgatgatcatgctgatggccgcgatatcaccgggcaagaaaagggcgtcgtttcaaacaagggcgtcgtttcaaacaatgcggtagtgggggcgggtgttgcggcctcatcggcgttagcccatggcgatgatgacgttttgttctcagccccttcggtgacggacagtattgttgagcatgggtcagtggttgcaactggtacagaaacaactgatacaaaagcaactgacaccaacgatgagtatgacccattattgagtccgttacgggctacggattatagcgttcaagacgcgacatcttcgccaatcgctgacgtagcggttgagccggttctcaatcatgatgcggcagcaatctatggtacgacaccggtaatgaccaatacggcaacaccgcctctgtattcttttgaactgccagaagagtcactgccaattcagacacatgctgcgccaactgaacggcctgaacctaagttgggtgcatgggatatgtcgccaacgccagtctctcattccccattcgatttctcggcgattcagcgccctgttggtcagttagagagtcgtcagccgggtagtaaccagtcaggtagtcatcagatacatagcgcccagagcagtcatatttcggtaggtaatacgccgtatatgaaccctggcttggatgcacagattgatggtttatccacaacgagcctgaccaataagccagtattagcatctggtactgtggcagcagcgactgcggcggcggcttttatgcccgcgtttacggccaccagtgacagtagctcccaaataaaacaaggtattggccctgaattgccacggccaaatccggttcgtattccaacacggcgtgaattggcctccttcggcatcaagctgccttcgcagcgtatggcagagcaggaattacgtgaacgtgatggtgacgaaacacaaaaccctcagatggcggcatcttcttacggtactgaaataacatctgatgaagatgctgctttgcagcaggctatcttgcgcaaagcgtttgccgatcagcaatcagaacgttacgcgttatcaactttagcagaacagtcatctataacagaacggtcacctgcggcagaaatgccgaccacgccctcgcaggtgagcgatcttgaagatgagcaggctttgcaagaggcagaattacgtcaggcttttgccgcgcaacagcaacaccgttatggggctacgggggatacagataacgccgttgacaacatacgttcggttgatacgagtacggcttttaccttctcaccgattgctgatttagtcgatgacagcccgcgtgagcctctgttcacgctttctccttatgttgatgagacagatgttgatgagccagtgcagttagaagggaaagaagaatctctcctccaagattatcctgagcaagtgccaacttaccagccacccgtgcagcaggcacatttggggcaatccgcaccaactcagccaagccatacgcaatcaacatatggtcaatcaacatacgggcaatcaacatatggccaatcgacaccggcaccggtgtcacagcctgtagttacatcagccagtgctatatcaaccagcgttacacccactagcattgcgtcgctgaatacagcaccggtgagcgcggcaccggtagcgccatctccgcaaccgccagcgttttcacagccgacagcggctatggatagtttgatccatcccttcctgatgcgtaatgaccagccgttgcaaaaaccgacaacaccattgcctacgcttgatttgctgtcttctccgcctgcggaagaagagccggtggatatgttcgctttagaacaaaccgctcggttggttgaggcccggttaggtgattatcgggttaaagctgaagtggtggggatttctccggggcctgtcattacccggtttgaactggatctagcacctggcgttaaagcgtcgcgaatttccaatttatcccgcgacttagcccgctctttatcggctatcgcggtacgtgtcgtggaggttatccctggtaaaccttacgtcggcttagagctacctaacaaacatcggcaaaccgtttacctgcgggaagttctggattgcgccaagttccgtgagaacccatcgccattagcgattgtgctaggtaaagatattgccgggcaacccgtggtggctgatttagctaaaatgcctcacttactggttgcaggtaccaccggctcgggtaaatctgttggggtgaatgcgatgatcctcagcatcttgtataaagctacgccagatgacgtgcgctttatcatgattgacccgaaaatgttggagctgtcagtgtatgaaggtattcctcatttgttaaccggggtagttaccgatatgaaggatgccgcaaatgcattgcgttggtgtgtcggtgagatggaacgccgctataaattgatgtctgctttaggtgtgcgtaatttggcaggctacaacgagcgagtggctcaagctgaggccatggggcgtccaatcccggatccgttctggaaaccctctgacagtatggatatctcaccaccaatgttggtaaaactgccatacatcgtggtgatggttgatgaatttgctgacctgatgatgacggtgggtaaaaaggtagaggagttgattgcccgtttggctcaaaaagcccgtgctgccggtatccatctggttttggcaacacagcgcccgtcagtggatgtgattactggtttgattaaagccaatattccaacgcgtattgcatttacggtatcgagtaaaattgactcgcgtaccatccttgatcaaggtggtgccgaatcactgctggggatgggggatatgctgtatatggcccctaactcctcaattccggtacgtgtccatggtgcgtttgtccgtgatcaggaagtgcatgctgtggtgaatgactggaaagcccgtggtcgtccgcaatatattgatagtatcctcagtggcggtgaagagggcgaaggcggtggccttggtctggacagcgatgaagagctggatccattgtttgatcaagccgtgaactttgtgctggaaaaacgccgggcctctatctcaggtgtacagcgccagttccgtatcggttataaccgggccgcgcgtattatcgagcagatggaagctcagcagattgtgagtacaccgggccataatggtaatcgtgaggttctggcaccaccaccccatgagtaa

SEQ ID NO: 41806 - DNA, 1665 bp, Yersinia pestis
atgtgttctattttcggggtcttagagcttaaaaccgaccctattgaattacgcaagaaagcgctagaaatgtcacgtttgatgcgtcaccgtggcccagactggtctggtgtctgggcgaatgataaagccatcctcgcccatgagcgcttatctattgttgacgtcaataccggtgcccagccgctgtataatgccgcccacacacatatcttggccgtgaatggtgaaatttataatcatcaagcattacgtcagcaatatagcgaccgttacgccttccaaacgggttcagactgtgaagttattctggcgttgtatcaagaaaaagggcccgcgttcctcgatgatctgcaagggatgtttgccttcgtcctatacgataccgagaaagacgcctacctgatcggccgtgaccatttaggtattatcccgctgtatatggggcacgacgaacacggcaatatgtttgtagcttcggaaatgaaagccttggtacccgtttgccgcaccataaaagaattccctgctggcagctatttgtggagtcaggatggcgagatccgcgaatactatcatcgcgattggtttgattacgaccacgtcaaagacaacgtaaccgacaaaatccaacttgccaacgcattggaagatgcggttaaaagccatctgatgtccgatgtcccttatggggtattgctgtctggtggcctggattcatccgttatctctgctatcaccaaaaaatttgccgcccgccgtgtagaagataatgaacgcagcgaagcctggtggccacaactgcactccttcgccgtcggtttgattggctcacccgatttacgcgcagcacaagaagtcgctaaccacttgggcacggtacaccatgaaattcatttcaccgtgcaggaagggctggatgccatccgcgatgtgatttatcacatcgaaacctatgatgtgacgactatccgcgcgtcaacgccgatgtacctgatgtcacgtaaaatcaaagccatgggcatcaaaatggtgctatctggtgagggttctgacgaagtcttcggtgggtatctctatttccacaaagcgcccaacgccaaagaattacatgaagaaaccgtgcgtaaactgttagctctccatatgtatgactgcgcccgtgccaacaaagcgatgtcagcttggggcgttgaagctcgtgtgcccttcctggataaaaacttccttgatgtcgccatgcgtatcaatccacaggataaaatgtgcggcaatggcaaaatggagaaacatatcctgcgagaatgtttcgaatcttacctgccacacagcgtcgcctggcgtcagaaagaacaattctctgatggtgttggctatagctggattgacaccttgaaagagaaagcagccgagcaagtcactgaccaacagatggaaaccgctcacttccgcttcccgtacaacacacctggctcgaaagaagggtatttgtaccgtgaaatctttgaagagctgttcccgctacctagtgcggcggaatgtgtccctggcggcccctctgttgcctgttcatcagctaaagccattgaatgggatgaatcattcaaaaatatggatgatccatcaggccgtgcggttggcgtccatcaggatgcttacaaataa

SEQ ID NO: 41807 - DNA, 1344 bp, Yersinia pestis
gtgagtaatatgtccctcgatttttcccaaaatgagtttcaaccactggccgcgcgtatgcggcctttgacgttggatcaatatattggtcagcaacatttgctggcaccgggtaagccgctaccgcgggcaatcgttgccgggcagttacactccatgatcctctgggggccgccgggaaccggtaaaacaacattggcagaaattattggccgctacggtcaagccgatgttgagcggatttctgcggtgacctccggtattaaggagattcgcgaggctatcgagcgggcgcggcaaaaccgtgatgctggccggcggactatcttgtttgttgatgaagttcatcgtttcaataagagccagcaggatgcatttctaccccatattgaagatggcaccatcacttttattggtgctacaacagagaacccctcctttgaactaaattctgcattgctctcgcgagccagagtctatttgctcaaggcactaaccgcagcagatatcgagaaggtgattgaccaggcgatgtctgatagcagtcgaggttacggcgggcagaatattttactgcctgatgaaactcgccgcatgatgtctgagctcgtcggcggagatgctcggcgggcgttgaatagcctggaaatgatggctgacatggctgaaatagatgccagtggcgtccgtgtgttgacgccagaattgctgaaagaggtctctggtgagcgtagcgcccgttttgataacaaaggcgaccgttattacgatttgatctcggcggtacataaatctattcgtggttcggcaccggatgcggcgctgtactggtatgcacgcattatcaccgcggggggcgatccgctctatgttgcccggcgtttgttggctatcgcatcggaagatgttggtaacgccgatccacgtgcgatgcaggtggcgatatcggcctgggattgctttacccgtgtggggccagccgaaggggagcgggcgattgcccaggcaattgtttatttagcctgcgcgcctaaaagtaacgcggtgtatgctgcatttaaagccgcgatgcaggatgctcgcgataagcccgatttcgatgttccagagcatttgcgcaatgcgccgactaaactgatgaaagagatggggcttggcgctgagtatcgctatgcccatgatgagcagcacgcctatgctgcaggtgaaaattattttccacctgaaatggcggcgacccgctactatttgccaacatctcgtggtctggagggtaaaatcggtgagaagctggcatggttagctgaacaggataaaaatagcccgataaaacgctaccgctag

SEQ ID NO: 41808 - DNA, 1230 bp, Yersinia pestis
ttgatgagcaccggcggacaagcacaaattggtaacgtggatctggtaaaacaactcaatggagccgcggtttaccggctaattgatcagcaaggcccgatttctcgcatacagattgccgatctcagccagctagcccccgccagtgtcaccaaaatcacccggcaattgttggagcgcgggctgatcaaagaggtcgatcagcaagcctccaccggggggcgtcgcgctatctctatcgtgacggaaaaccgccaattccataccgttgcagtccgtttaggtcgtaatgatgccacgatcaccctctttgacatgagcggtaaatcgctgggtgaagagcactatgccctgccagaacgaacacaagaaacgctggaacacgccttatttaatatcatcagtcagtttattgacgcctatcagcgtaaattacgtgaactgattgccatcgcggttatcctgcctgggctggttgagcaaagcaaaggtatcgtgcgctatatgccgcatatcagtgtcagtaactggccgttagtcgataatctacaagcgcgctttaacgtcaccagttttgtgggtcacgatatccgcagcctggcactggccgagcactattttggtgcaacccgtgactgtgaagactccattttggttcgtctacatcgaggcacgggtgccggtattatcgttaacagccaaatatttttaggcagcaacggcaacgttggcgagataggccatattcagattgatccattaggtgatcgctgctattgcggtaactttggttgtctggaaaccgtggcatccaacgccgcgattgaaaaccgcgtcaagcaccttctcacccagggttatccaagtaagctgtctcttgatgactgccatattggtgctatctgtaaggccgcaaaccgcggtgacttgctggcctgcgaagtgattgaacatgttggtcgctacttggggaaagccattgctatcaccataaacttattcaacccacaaaaagtggtgattgccggtgaaattattgaagccgagaaaatcctactacccgccattcagggttgcattaatacgcaagttttgaaaaacttccgccaaaacctgccgatagtgacatcacaacttaaccaccagtcggctatcggcgctttcgcactggctaagcgcgctatgctcaatggtgtcttgctgcaacgtttgctagaaactcacccgtag

SEQ ID NO: 41809 - DNA, 1293 bp, Yersinia pestis
atgctcgatcccaatatgctgcgcaatgagctagacgcagtcgccgaaaaactggctcgcagaggttttaaacttgatgttgaggtgttgcgccaacaagaagagcgccgcaaagttttacaggttgaaacagaaagtctgcaggcagaacgtaactcccgatcgaaacagatcggtgcagcaaaggcgcgtggcgaagatatcgaaccattacgtctggaagtgaatgctctgggtgaaaaactggatgccgctaaagctgagttggataagttacaaaacgaaatccgcgatttagcgctgtctatccctaatctgccagatgattcagtaccggtaggtaaaaacgagaatgacaatattgaagtcagtcggtggggcgagcctcgcaaatatgacttcgacgtaaaagatcatgtttctctgggcgaaatggccggtggccttgattttgctgccgctgtgaaactgaccggcgcacgctttgtggtgatgaaagggcaaattgcccgtatgcaccgtgctctgtctcagttcatgttagacctgcacaccgagaaacacggttatctggaagcttacgtcccttatctggttaatcatgccaccttgtacggtacgggtcagttacccaagtttggtgaagatctattccatactaaaccgttggcagaagaatcagataacagtaactatgctttgattcctactgctgaagttccgctgaccaacttggtgcgcgatgaaattttggaagaggattctctgccattgaagttgaccgcccatacaccatgcttccgttctgaagcaggttcctatggccgtgatacccgtggtttgatccggatgcatcaattcgacaaagttgaaatggtgcagatcactcgtccggaagattctatggccgcgctggaagagttgacagggcacgccgagaaagttctgcaattactggagttgccataccgcaaggtattgctgtgtacgggtgatatgggctttggctccagcaaaacttacgatctggaagtatggttgccagcacaggacacttaccgcgaaatatcctcatgttctaacatgtgggatttccaggcgcgccgtatgcaggcccgttatcgcaacaagaccgacagaaagacgcgtttagtgcacacgctgaacggctctggtttggcggttgggcgtaccttggtagcggtgttggaaaactatcaacaggcagatggtcgtatccaggtccctgacgtattacgtccatatatgggtggcttggaatatattggttaa

SEQ ID NO: 41810 - DNA, 801 bp, Yersinia pestis
atgagacttatcccactgagaaatactgccgaagttggtaaatgggccgctcgccatatagtgaatcgcatcaatgcgtttaaacccactgccgaacgtccgtttattctgggcctgccaacaggcggcacaccaatggaggcatataagtatttgattgcgatgcataaagcgggcgaggtcagcttcaagcatgtggtgacatttaacatggatgagtacgttggcttgccgaaagaacatccagaaagctactacaccttcatgcacactaatttctttgatcacgttgatatcccggctgaaaacatcaatctgttaaatggtaacgcagcggatatcgatgcagaatgccgccgttatgaagaaaaaattaagtcttacggtaaaattcacctgttcatgggcggcgtaggggtagatggccatatcgcctttaatgaaccagcgtcttctctggcatcacgtacccgcatcaaaaccctgacacaagaaacccgcatagcgaactcccgtttctttgggggtgatgcaaatctcgtgcctaaatatgcattgacggttggggtggggacgttgcttgatgcagaggaagtgatgattctggtgaccggccatggtaaagcacaagctttgcaagccgccgttgaagggagcatcaaccacatgtggactatcagttgcctgcaacttcatgccaaagccatcatggtgtgcgatgaaccttccacgatggaactgaaagtcaaaaccgtgaaatatttccgcgaattagaagctgaaaacgtaaaagatctttaa

SEQ ID NO: 41811 - DNA, 2034 bp, Yersinia pestis
atgagtattcttggttacttacaaaaagtaggtcgagcgttgatggtccctgtggccacactgcctgcggccgcgatattgatgggtgtaggctactggatagacccagtcggttggggggctgataatgcactggcggcattattcatcaaatctggtgctgcaataatcgaaaacatgtcggtactgttcgcaattggtgttgcttacggtatgtcaaaagataaagacggtgctgcggcactgaccggttttgtcggtttcctggtattaaccacgctgtgttcgccagcagcggtttcgatgatcaaacagattccacttgatcaagtccctgccgcatttggcaaaatcgaaaaccagttcgtgggtattttggtcggtattatctctgctgagctttataaccgtttcagcggcgttgaactgccaaaagcgctctctttcttcagtggtcgtcgtttggttccaatcttgacgtccttcctgatgatcgcagtggcctttatgctgatgtacatatggccactgatttataacgcattagtgaccttcggtgaatacatcaaagatctgggttctgttggtgcgggtatctatgctttcttcaaccgcttactgatccctgttggtctgcatcacgctctgaactcggtgttctggtttgacgtcgctgggattaacgatattcctaacttcctcggcggccaagaatcgatcaataaaggcaccggcattgtcggtatcactggccgttatcaggcaggtttcttcccgattatgatgtttggtttaccgggtgctgcgttggcaatttaccactgcgcacgtccagaaaataaagcaaaagtggcgggtatcatgatggcgggggcatttgcagccttcttcacaggtatcactgagcctcttgaattctccttcatgtttgtggcacctgtgctgtacttcttgcacgccgtgttgaccggtatttccgtattcatcgccgccagcatgcattggatcgcgggctttggtttcagtgccggtttagtggatatggtgctctcttcccgtaacccgttggctacgcaatggtacatgctgatcccacaaggtctgatattctttgtgatttactacttagtattccgtttcactatccagaaattcaacttattgacacctggccgtgagctggcggtggaaggcagtgaagaagatggttacgacgtaaatgttgataaaacgccagcagtgaatgaaagtgaaatcaatagccttgctcgtcgctatattggtgccatcggtggttcagacaacctgacggccattgatgcctgcattacccgcctacgcctgaatgttaaagattcagccttggttaatgacagtgtagccaaacgcttaggggcctctggtgttattcgtctgaataagcaaagtgtacaaattatcgttggtactcgcgcagaactgattgccgcagcaatgcgcacggtgctggcgggtggcccaatccccgcggcaagcagcaatgctgcgcctacgggtgcaagaccgcaggcggtcattaacaccgcgaaaacggcttctttagttctggtttcgccaattaccggtgatgttgtgccattggcgcaggttcctgatgaggcttttgctagcaaagcggtaggtgagggggttgctatccgtcctacagacaaaatagttgtttctcccgctagcggcactattgtgaaaatcttcaatacggatcatgcgttctgcctggaaacggaaaccggtgctgagattgtggttcatatcgggattgataccgtgaagcttaacggccagggctttacccgtttagttgaagaggggacgacagtggttgctggtcagccggtgttagaactggatctggcttatctgaatgccaacgcgcattcaatgatcagcccagttgtcgtcagtaatattgatgactacgcggggatctcgctgttggcgagcggttcagtcgttgccggtcaaagccaattatttgagattcgtggcaaataa

SEQ ID NO: 41812 - DNA, 858 bp, Yersinia pestis
atgggaaaattagcattagcagcaaaaatcacccatgtgccttccatgtatctgtctgagttaccgggaaagcaccacggctgccgtcaggcagcgatcaatggtcatcttgaaattagtcggcgctgccgtgaacaaggggttgatactcttattgtttttgatacccattggctggtgaacagtgcgtatcacattaattgcagtgactctttttccggggtttataccagtaatgaactgccacatttcattcgcgatatggcttatgaatatgagggcaaccccgcgctggggcaaatgattgccgccgaagcctgcaagttgggggttcgtgcacaggcccacaatattccgagtttaaagctggaatatggcacgctggtccctatgcgttatatgaatagcgataagcactttaaagtgatctccatttcggctttctgtaccgttcatgcctttgatgacagccgtaacctgggtcaggccatcatcaacgccattgaacactatgatggcatcgttgcagttttagccagcggctctctctcacatcgctttattgatgatcaacgcgctgaagaagggatgaatagctacacgcgcgaattcgatcatcaaatggatgagcgggtcgtcgagctctggcgagaaggtaaattcagcgagttctgccaaatgttaccggaatatgcccagtactgttttggcgagggcaatatgcacgataccgtcatgctgctcgggatgctgggatgggataaatacgatggcaaggtggagtttgtcaccgatctgtttgccagttcgggtaccgggcaggtgaatgcgatattcccattggccgtttacgggtaa

SEQ ID NO: 41813 - DNA, 1668 bp, Yersinia pestis
atgagtgaggcagaagcccgcccaagtaattttatccgtcaaattattgacgaagatttagccagcggtaaacacacgtcggttcatacccgttttccgccagagcctaacggctatctgcatatcggccatgcaaaatctatttgcctgaattttggtattgctgaagattatcagggccaatgtaatttacgctttgatgacactaatccagtgaaagaagatgtcgagttcgtcgagtcaattaaacgcgacgtagagtggctgggcttcacttggagtggtgatgtacgctattcctcagactactttgatcaactgtatcagtacgctgtggagttgattaacaagggtcttgcgtatgtggatgagctgacccccgagcagatgcgcgaatatcgtggcaccttgactgcgccgggtaaaaatagcccatatcgtgaccgcagtgtggaagagaacctggcgctgtttgaaaagatgcgtgcggggggttttgctgaaggcaccgcctgcttacgggccaaaattgacatggcgtcaccgttcattgtgatgcgtgaccctgtgctgtaccgcatcaaatttgcagaacatcatcaatctggcaataagtggtgcatctacccgatgtatgacttcacccattgcatttccgatgcgctggaggggatcactcattcattgtgtacgttggaattccaggataaccgtcgcttgtatgattgggttctggataatatctcgattgattgtcatccgcgtcagtatgagttctcccgtctgaacctcgaatataccatcatgtctaagcgtaagctgaaccagttggtcacagagaaggtcgttgagggctgggatgatccacgtatgccgaccatttctggcctgcgccgtcgtggttataccgcagcgtctatccgtgagttctgccgccgtattggtgtcaccaagcaggataacaatgtcgaaatgatgtcactggaatcgtgtatccgtgatgatctgaacgaacatgcgccacgggcgatggccgtgcttgacccgattaaggttgttattgaaaatcgcgcggcgggtgaagagtggctgacgatgccaaaccacccgaataaccccgaaatggggagccgtcaggtgccattcgatagcgaaatctacattgatcgggctgatttccgcgaagaagctaacaagcaatataagcgcttggtcttgggcaaagaagtgcgcctgcgtaatgcctacgtgatcaaagctgaacgcgttgagaaagacgcagaaggcaatgtcacgacactttattgcagctatgacgctgagacattaaacaaagatccggctgatggccgcaaagttaaaggggttattcattgggtttctgttgcccatgcgctgcctgcggagatccgtttatacgatcgcttgtttaacgtaccaaacccagcggcagcggaagacttcctgtcaaccatcaaccctgagtccttggttatccgtcagggctttgttgagccaagtctggctgatgcggtatcagataaaacctatcagtttgagcgtgaaggttatttctgtgctgatagccgttattcacgtcccggtgctctggtgtttaaccgtactgtcggcttacgtgatacctgggcggcgaaagccactcagtaa

SEQ ID NO: 41814 - DNA, 399 bp, Yersinia pestis
atggcgcatttctacgcagaatgtactgacaacatccgtgaacaggccgaattacccgtcttgttttctaacgtaaatcaaactctggtgaacacgggtcttttcccattggcaggtattcgcagccgtgccatttggctggatacctggcaaatggcggatggacagcaagactacgcttttgtccatatgacgctaaaaataggctacggacgcagtatcgagcaccgacaggcggtcggaaagacattgtttgccttgattcaagcgcatttcgcagccctgatgtcccaacgttatctggctttgtcgttcgtcatagaggagctggatccaacgcttagctttaaacagaacaatgctcatacattgttccaacagggaacctctgcatgttag

SEQ ID NO: 41815 - DNA, 807 bp, Yersinia pestis
atgtttccattaacaaataaatttaaacaggcactgaaagcaaaaaaaccacaaattggcttatggctaggtttgtgtagcaattacagtgctgaaatcctggccggtgcggggtttgactggttgttgatcgacgatgaacatgccccgaatgatgtacaacggatcttagggcaattacagacgatcgcgtcttatccgagccagcccgtggttcgtccggcgtggaatgacccggtaatgataaaaaaattgctggatattggcgcacaaaccttattgctcccaatgattcaaaacgccgcacaagcgcgcgctgcgatcagtgcgacccgctatcctccgcaggggattcgcggcgtcggaagcgcgctggcccgagcttcccgttggaatagaatcgcagattatgtgcagcaagctgacgaacagatatgcgtattgctccaaatagaaacacgcgaagcactgcgcaatctacccgagattttggcggttgatggtgtcgatggtgtgtttatcggcccggccgatctcgcttctgatatgggttttgcgggtaatccacaccatcccgaggtccgtcaagccatcgatagcgcagtgatgaaaattaagactgccgataaagcggccgggatcttgatgaccacgccagagttggctgagtattatctgaaactgggggcactatttgtggctgtaggtgtagatacgacgctattagcacgcacagccgaggcactggcagcccgcttcggtgtgggtaatcatcatccaccgcttgcaccatcgggtggatattaa

SEQ ID NO: 41816 - DNA, 1086 bp, Yersinia pestis
atgacacaggtttataattttagcgctggtccagcaatgttaccggtcgaagtattacgtcgtgcagaacaagaattacgtaactggcatggtttgggaacgtcggtgatggaaattagtcaccgcagtaaagaatttatgcaggttgctgaagagtcggagaaagatctgcgtgacctgttgcagataccggctaattataaagtgttattttgccatggtggtgcccgagcacagtttgctgcggtgccattgaacttgcttggtgaccgcaacagcgctgactatatcgatggtggctattgggcgcacagtgcgattaaagaagcacaaaaatactgcactcctaatgttattgatgtcaccacccatgacaatggcttaacaggtattcagccaatgaagcaatggaagttgagcgataatgcggcctatgtgcactattgcccaaatgaaaccattgacggcgttgcgattaatgaacagcctgatttcggcaataaagttgttgttgccgattactcctcatccattctttcccgtcctatcgatattagccgttatggtgtgatctatgctggcgcacagaagaacattggcccagcgggcttgacactggttatcgtgcgtgaagatttacttgggaaagcccacacggcgttgccgtcgatcctggactacaaggtattggcagataacgattcgatgttcaatacaccgccaacgttcgcttggtatctttctggcctggtatttaaatggctgaaagagcagggtggtttgggcgaaatggaaaagcgcaatcaggcgaaagctgaactattgtacggtgccatcgaccgcacaggcttctatcgcaatcaggttgctattactaaccgctcttggatgaatgtgccgttccaaatggcagatgcttcattagataaactgttcttgagtgaagctgaagcacaaggtctgcaggccttaaaaggccaccgtgttgccgggggcatgcgggcttctatctataacgctatgccaattgaaggcgtaaaagccttaaccgactttatggctgattttgaacgccgccatggctga

SEQ ID NO: 41817 - DNA, 288 bp, Yersinia pestis
atggcaaaagaacaaacggatcgcacgacgctggatctgttcgcagatgaacgccgtccggggcgcccgaaaacaaacccattatcccgtgatgaacagcttagaattaataagcgaaatcaactacggcgcgataaagtacgtggcttacgacgcgtggaactgaagattaatgcagatgccgtcgatgctctcaacagccttgcagagcagcgtaacatcagccgcagtgagctgattgaacagatgttacttgctcagttagcgcatgatcaagaagggtgctaa

SEQ ID NO: 41818 - DNA, 693 bp, Yersinia pestis
atgacggcgatagccccggtgataaccgttgatggaccgagtggtgcgggtaaaggtacgctttgcaaagcattggctgaatcattgaactggcgcttgctggattctggtgcgatttaccgagtgctggcactcgctgctttgcatcatcaggtcgatatcagcaccgaagaggcattggtaccacttgccgcacatctcgatgttcgttttgtttcacagaatgggcagctacaagttattttagaaggcgaggatgtcagcaatgagatccgaaccgagacagtgggtaatactgcatcccaagcggcggctttcccccgtgtacgtgaagcattactgcgtcgccagcgagcttttcgcgaagcgcctggtttaattgctgatggccgggatatggggactatcgtgtttcctgatgcacctgtgaaaatatttcttgatgccagttcgcaagaacgcgcgcacagacgtatgctacagttgcaggaaagagggtttaatgttaactttgaacgtcttttggccgagatacaggagcgggataaccgtgatcgtaaccggtctgttgcacctttagtccctgcggcggatgcgttggtactggattcaaccagtatgtccatcgaacaggtgatcgaacaggcgctggcttatgcccaacgaattttagccttgccgttgaaaaaataa

SEQ ID NO: 41819 - DNA, 1674 bp, Yersinia pestis
atgatagaatcttttgctcaactctttgaagaatccctgaaaacaattgaaacacgtccgggctctatcgtccgtggtgttgttgtttctatcgataaagatatcgtactggttgacgctggtctgaaatctgagtcagcaattccagcagaacagttcaagaacgcgcaaggcgaactggaaattcaagttggtgacgaagttgatgttgctctggacgctgttgaagacggcttcggtgaaactctgctgtcccgtgagaaagctaagcgtcacgaagcatggctgatgctggaaaaagcttacgaagaagctgcaaccgttactggtgtgatcaacggcaaagtgaagggcggctttacagtcgaactgaacggtatccgtgcgttcctgcctggttcactggttgatgtgcgtccagttcgcgatactctgcatctggaaggcaaagagcttgagttcaaagtcatcaagctggatcagaaacgcaacaacgtcgttgtttctcgtcgtgcagttatcgaatccgagaacagcgctgagcgtgatcaactgctggaaaacctgcaagaaggcatggaagtcaagggtatcgttaagaacctgactgactacggtgcattcgttgacctgggtggcgttgatggcttgctgcacatcactgacatggcttggaaacgtgttaaacacccaagcgaaatcgtcaatgtgggcgacgaaatcactgttaaagttctgaaattcgaccgcgaacgtactcgtgtatcccttggcttgaaacaactgggcgaagatccatgggttgctatcgctaaacgttacccagaaagcactaagctgactggtcgtgtgactaacctgactgattacggttgcttcgtagaaatcgaagaaggcgttgaaggtttggtacacgtttcagaaatggattggaccaacaaaaacattcacccgtctaaagttgttaacgttggcgacgtagtggaagttatggttctggacatcgatgaagaacgtcgtcgtatttctctgggcctgaaacagtgcaaatctaacccatggcagctgtttgcagaaacccacaacaaaaacgaccgcgttgaaggtaaaatcaagtctatcactgacttcggtatcttcatcggcttggacggcggcatcgacggcctggttcacctgtctgatatctcctggaacgttgcaggcgaagaagcagttcgtgaatacaagaaaggcgacgaaatcgcagctgtggttctgcaggttgacgcagaacgtgagcgtatctccttaggcgtgaaacaactggcagaagacccgttcaataactacctgtctgttaacaagaaaggtgctattgttactggtaaagtaactgcagttgacgctaaaggtgctacagttgaattggctggcggcgtagaaggttatctgcgtgctttcgaagcaactcgtgaccgcgttgaagatgcgacgctggttctgaacgtaggtgatgaagttgaagccaaatatactggcgttgaccgtaaaaaccgcgtaatcagcctgtctgttcgtgctaaagacgaagctgatgagaaagatgctattgctacggttaacaccaagccagaagaaagtaatttctctagcgcaatggctgaagcgttcaaagctgcgaaaggcgagtaa

SEQ ID NO: 41820 - DNA, 768 bp, Yersinia pestis
atgaaattaaatttccgcttacaaaacgcaccgtcccctacctcagccctgccaatcattctgatccatggattattcggcaatttggataatctaggtgtattggctcgcgatctgcagcaacaccataatgttattcaggtcgatttacgtaaccatggcttatctccccgtgcaccacagatggattatcccgtaatagcgcaggatgtgttggcgttaatggatgaactggcaataacacaagccattattatcggccattccatgggcggaaaagtggcgatggcaatgaccgcgcttgccccaaatcgggttgaaaaactggtagcgatcgatattgcgccagtgaattatcaggtacgccgtcatgacactattttcgccgcgcttaatgctgtgagtgccgctggtgtgactcagcgcaacgaagccgctcaactgatgcgcacgttaataaaagaagaaggggttattcagttcttactaaaatcatttcagggcggtgaatggcgatttaatgtccctgccctctgggatcagtacgagaacattattggctggcagcccattcccccttggccacatcctattttgtttatccgtggtgagttatctccttatattcaagacagctatcgagatgatattgcccgtcagttcccacaagcccgtgcgcatgtcgtcgccggaaccggtcattgggtccatgcggaaaaaccagattctgtgttgcgggcaatccaccgtttccttgatgccgcataa

SEQ ID NO: 41821 - DNA, 1365 bp, Yersinia pestis
gtgattagcgtttttgacatgtttaagattggtatcggtccgtccagctctcataccgttgggccaatgaaagcgggtaagcaatttgtcgatttgctgataaccgaaggattgatgccgtctatcacgcgtgttgccgtcgatgtttacggctcactgtcgctgaccgggaaaggccatcacaccgatatcgccattattatgggtctggcaggtaacctgcctgataccgttgatatcgacagcatccctgcgtttatccgcgatgttgaattacgccaaaaactgatgttggcaaatggcctgcatgaagtcgatttcccccgtgaaggcgggatggtcttccgcagcgataatctgccactgcatgagaatggcatgcaaattcatgcttttgctggcgatgaaaaagtcctcagcaaaacatactactccatcggcggtggttttatcgttgatgaagagaattttggcaaagccagcgtgaatgacgttagcgtcccctacccgtttaactctgctgccgaaatattagccaactgcgagcaaactggcctgtctatctccggtatggtgatgcagaatgaactggcgatgcacagtaaagaagagattgagtcctatttcaccgccatctggcagaccatgcgcgcctgtatcgatcgcggtttgaataccgagggtgtgctgcctgggccactgcgtgtaccacgtcgtgcatcggcattacgccgcctgctggtctcttccgataagctgtccagtgaccccatgattgtcattgactgggtcaatatgttcgcactggccgtgaatgaagaaaatgcggcaggtggacgtgtcgtgacggcacccactaacggggcttgcggtatcgttccggcggttctggcctattacgatcactttatcgaaccggtgacacctgaaatctttattcgttatttcctcgcatctggtgccatcgggattttgtataagatgaatgcttctatttctggtgcagaggtgggttgtcagggcgaagtgggcgttgcctgttcaatggcggccgctggtcttgctgaattgctgggtgctagcccgatccaagtctgtatcgcagccgagattggcatggaacacaacttaggtctgacctgcgacccggttgcgggtcaggtacaggtaccatgtattgaacgcaatgcgattgcatcggtaaaagcgatcaactccgcacggatggcgatgcgccgtaccagtgaaccgcgcgtctccctcgataaagttatcgaaacgatgtttgaaacaggtaaagatatgaatgccaaataccgcgaaacatcgcgtggtggcctggcgattaaagtgcagtgtacttga

SEQ ID NO: 41822 - DNA, 186 bp, Yersinia pestis
atgacccaaacagaagtttatggtcttggtttccgttttaaggcttgtagcgcattgcttgagtcaggtttgtggtcaaaagacgatgtagaatgccagatgagtcatcaggagcgaaataccgttcgttcgtcttctatccataaggccgaacatatagataaacgcaagctaatggttcagtag

SEQ ID NO: 41823 - DNA, 600 bp, Yersinia pestis
gtgagtgaattaattactgggcagtacttgtccgagtttattaaccgtttccaactacaactgccgcaacccgataatgttttgactcatagtcactatttttctgccactaaccgccgtgctgctgtattgatacccattatttgccgcccagagcccacattattactgacccgccgcgctgatcacttgcgtaaacacgcgggtcaggtcgcgttcccgggtgggaaggccgatcctgacgatcagtcactgattagtaccgcgctacgtgaagccgaagaggaagtcgccattccggcatccgtagttcatgtgttagggaaactggctcccctgaacagttctagtggttatcacgtcacgccaattgtgggattagtaccagccaatatccctttttacggcaatgacgaagaagtggctgggctatttgaaatccccttacatgaagcgctgagcctctctcgctaccattcgctggatattcatcgggagggaatcaatcaccgggtctatctttcatggtacgaaaaccaatttatctggggcctgaccgccacgattattcgccatctggcgcagcaagtcagtatttga

SEQ ID NO: 41824 - DNA, 1377 bp, Yersinia pestis
atgtgtgagaaatttttaaccgtcaaagagttaccttatcaccctgatgccctgcttcaacaattcaccccacttgccaaccaagcttgggcgatgttgttgcactcaggatttgctcaacacccccatagtcgctttgatatcttggtcgctgatccaaaaataacgctgacaactcatggggataaaacggttattgtcagtgatcaggggcaggaaacctccctcgcggatcccttctctttgctgcagcagcaactggataaattcgccccagcgatgcctgctcaccctgatctgccgtttcagggcggagcgttagggctatttggttacgacttaggccgccgagttgaaaaattgcctgaactggcggcgcacgatatcgccttgccggatatggccattggcctgtatgactgggcgctcattgctgaccactctcggcagaagctcacgctggtatcccttggcgatgccgaacagcgcttgcattggctgcatcagcaaacaaccgatgagaacctcgtccccttcaaactcacggttccatggcaggcagatatgtcacgggagcagtacggcgaaaaattccgccaaattcaagcgtatctgcgtagcggtgactgttaccaaatcaatctggcacaaagattcagcgcagagtatcagggggatgaatggcaagcatttctgtcactgagtcgtagcaatcaagcccccttttcagcttttattcgcttacccgacaacgccatattgagtgtttcaccagaacgtttcttgtggttggagaatcatcaggttcaaacccggccgattaaaggtacgctaccccgtttggccgatcctgagcaggatcgccagcaagctgagcgattggcgaattcagccaaagatcaggctgaaaatctcatgattgtggacttactgcgtaacgatattggccgtgtcgcacgtccgggtagcgtccgcgtaccagagctgtttgtggtggagccttttcctgcggtgcaccacttagtcagtacaattaccgcaatacttcccccagaatgttcgccgaccgaattactgcgcgcctgtttccccggcgggtcaattactggtgcccccaaggtccgagcaatggaaattattgaacaactcgaaccctatcgacgcaatgcttattgcggtaacattggctacataagttgctgcggcaccatggataccaatattactatccgtaccctgatgacagagaacggtaagatatattgttctgccggaggggggattgtcgccgacagccaagagcaagctgaatatcaagaaacgttcgataaggtcgcccgtattttaccgcaactgggggagtgtgttatttcgtga

SEQ ID NO: 41825 - DNA, 987 bp, Yersinia pestis
atgaacaactctgcttttaattttcagaccttgtctcctgacctgattatggatgcccttgagggggcaggattacgggtagattcggggttaaccgcgctgaatagttacgaaaaccgtgtctaccagtttatggatgaagagagtaaacggtatgtggtgaagttttatcgccccgagcgttggagtagtgaacaaattacagaggagcaccagttttctctggatttggcggagtcagaaattccggtgattgccccattgcgactcaatggcaagactttgcatactcactgtggatttttcttcgctgtttttcctagcgttggtgggcgtcagtatgaaattgataatcttgaccaattggagtgggttgggcgttttcttggcagaatccatcaggccgctcgtaatagccttttcgttgcccgcccaacaatgggtatagaagagtatttgacagagccgcgtcagctactcgccaattgtgatttagtaccagtaaaacaacgggataaatttctggcagcggcagatttgctcattacaacgattaagcagtattggcatacagaatggcagcctttacggctacatggtgattgccatccaggaaatattttgtggcgtgatggtccgatgttcgttgatttagatgatgcgaggaatggcccggctatccaagatttatggatgctattacacggtgatcgccgtgaccaatctatgcagttggatatattgctggaagcttatagtgagtttgctgattttgatcagcgtgaattagcactaattgaacccttgcgcgcgatgcggatggtttactaccttgcatgggtcgccagacgttggcaagaccctgcatttccgaaaagttttccgtggatggctgaatctgatttttggctccagcagacagcatcattcactgagcaggttaagctgttgcaggaaccccctttgcagctgatgccaatgtactaa

SEQ ID NO: 41826 - DNA, 1749 bp, Yersinia pestis
atgatgaatgataaagatctatccacttggcagacctttcgtcgcctatggccgacgatctccccttataaggccggtcttatcgttgcggcgatagcattaatccttaatgcggccagtgatacttttatgctgtcgttactgaaacccttgctagacgatgggtttggcaattcgaacagttcaattctgaaatggatgcctttggctgttatcggcctaatggtagtgcgtggcgtgactggttttgtctcaagctactgtatttcttgggtgtcgggtaaagttgtaatgcatatccgccgccgcttattcagccatatgatgggtatgcctgtttctttctttgaccaacaatcgacgggtaccttattgtcgcgcattacttacgactctgagcaggtagctgcgtcctcctccagtgcgttggtgactgtggtgcgggaaggggcctctatcattggtttgttcattatgatgttttattacagttggcagttgtcgctgattttaatcgtcattgcacccattgtgtctatttcgatccgtctggtatccaaacgttttcgtaatatcagtaagaatatgcaaaatactatgggggaagtgaccaccagcgctgagcaaatgctcaaagggcataaagaagttttgatctttggtggccagaaggttgaaaccgagcgctttgatgctgtcagtaaccgtatgcgccagcaggggatgaaactggtttctgcctcttctatttcagatcccatcattcaattgattgcctcttttgcattggcacttgtactttatgcggcaagttttccaagtgtaatggaaacgttgactgccggtactatcaccgttgtattctctgcgatgattgctctgatgcgtccattgaagtcgctgacaaatgttaatacccagttccaacgcggtatggcagcctgtcagacgttattcagcatattggatatggagcaggagaaagacgaaggcaagcttgaagttgaacgggcgaaaggtgatatagaattccgccatgtgactttctattatcccggtaaggatacgcctgcgctaaatgatatcaatatacaccttgaagcgggcaagaccgtggcattggttgggcgctcaggttcaggtaaatccaccattgctaacttactgacccgtttctacgatgtcagtgaagggagcattttgttagatgggcatgatctgagagattaccggttaggtgccttacgtaatcaagtggcgttggtttcacaaaatgttcacttattcaacgatactgtcgctaataatattgcttacgcccgtaatgaacagtacagccgtgctgaaattgaagaagccgctcgaatggcgtatgccatggactttatcaataagatggaacacggtttggataccgttattggcgagaacggtatcatgctctccggtggtcaacgtcagcgtatcgctatcgcgcgtgctttactacggaactgcccgatattgattttggatgaagcgacttcggcgctggatacagaatcagagcgagctattcaggccgctttagatgagttacaaaaaaaccgaacttctctggtgatcgcccatcgcttatccactatcgagaaagcagatgagatcgtggtcattgaagacgggcgtattgtggagcgtggtgtacacgctgaattgctggtccagcaaggtgtctatgcgcagctcaaccgtatgcagtttggccaatga

SEQ ID NO: 41827 - DNA, 1383 bp, Yersinia pestis
gtgagcacaacttccttttcttccctgacactgcctgctgagcagttgtccaatcttaatgaacttggctataccgagatgaccccggtacaagctgcggtgttacccgcaatcctcaacgggcaggatgtccgggcgaaggccaaaaccggcagcggtaaaacagccgcatttggcattggtttgctggacaaaatagcggtaggggaatttgttacccaagcgctggtattgtgcccaacccgagaattagcagaccaggtcagtaaagagctgcgccgtttagcacggtttacacaaaatattaaaattctgaccctgtgtggcggccaaccgatgggccaccaattagattctctggtccatgcaccgcacattgtcgtgggtacgccagggcgtattcaggaacatctgcgcaagaaaacgctggtacttgatgagttgaaaacgctggtgttggatgaagctgatcgcatgttggatatgggtttttccgatgccattgatgacgtgattgcgtatacccctccacagcggcaaaccttgttgttctctgccacctacccatcaggtattgagcagatcagtgcacgagttcagcgccaaccattgaatgttgaagtgggtgataccgatgaagagcccgctattgaacaggtgttttttgaaacgactcgtgagaaacggctgccactgctgatctcagttctgagccattaccagccggcctcttgtgtggtgttctgtaacaccaaaaaagattgtcagagcgtttatgagtcactggaatcacgtggtatcagtgtcttggctttgcacggggatttagaacagcgtgatcgtgatcaggttctggtgcgttttgccaatcgtagctgccgtgtgttggtggcgaccgatgttgctgctcgtggtttagatatcaaggatctggagctggtcattaactttgaattggcgtttgatcccgaaattcacatacaccgcattggccgtaccgggcgcgcagggatgagcggcctggccgttagcctatgtacgccacaggaaatggtacgtgcccataccatcgaagattatctgcaaataaaattgaaatggacacctgcggaacaggttagccgtagcaccaacatcatgctggaaccagaaatggtgacgttatgcattgacggggggcgcaaagctaaaattcgccctggtgacattctcggggcattaaccggtgatgcagggttaaccgccgcagatgtgggtaagattgatatgttcccggttcatgcctatgtggctatccgtaaagccagtgccaagcgtgcgttgcaacaattgcagcaaggcaaaatcaaaggtaaaaactgtaaagcccgtctattaaaataa

SEQ ID NO: 41828 - DNA, 2799 bp, Yersinia pestis
atggctcagattgcagaaaacccattgctccttgttgacggttcctcttacctctaccgtgcttaccatgctttcccaccactgactaatggtagcggggagccaaccggtgcgatgtatggcgttctgaacatgctacgcagtctgctgctgcaatatcgaccaagtcatgttgcagtagtttttgatgcaaaaggtaaaacgttccgtgatgaactttttgctgaatataaatcccaccgaccgccaatgccggatgatttacgggtgcaaattgaacctcttcatcagatggttaaagcgatgggattgcctttattggtcgtttctggcgtcgaagctgatgatgttattggcaccctagctcgggaagccgaaaaagcaggccattcggtattaatcagtactggtgataaagacatggcgcaattagttacgccgaatatcactttgatcaataccatgaataacactattttagggccgcaggatgtttgcgataaatatggtgtccctcccgaactgatcattgattttctcgctctgatgggtgactcctccgataatattccgggagtacctggtgttggcgaaaaaacagcacaggctttattgcaaggtttgggtgggttggatacgttattcagtaatctggataaaatatcaaccttgacgttccgtggtgcgaaaacaatgtcggccaagctagagcaaaataaagacgttgcttatctctcctataaattggctactatcaagacagacgttgagttagatgtaacctgtgatgagctaaccgtttctcctcccgatgataaacagttacatcagttattcagtcgttatgaatttaagcgttggctggctgatgtcgaagccggcaaatggttggacagtaaaaaagatcggccaacagggcaaacaagcagtcaatcttttgttgccgcagatacggcccctactgctgaagtcaccgcagtgctttcacaagagaattaccagactattttagatgagaaagcattggctgattggattgagcgccttaaagccgctgaagtttttgcttttgatactgaaactgatggccttgatacccttagctgtaacttaattgggatgtcttttgctgtcgctccaggtgaagcggcttatctgcctctggctcatgattacctggatgccccgccccaacttgaccgtgactgggttctggcgaccctgaaaccacttctggaagacgataaggcgcttaaagttgggcagaacctcaagttcgataaaagtatgctggctcgttatggtatcgatctaaaaggtatcgctttcgataccatgctggagtcttatgttttggatagtgttgcgggccgtcatgatatggacagcttggcggagcgctacctcaatcataaaacgattacgtttgaagagattgccggtaaaggtaaaaatcagctaacgtttaatcagattgcgttggagcaagctggcccgtatgccgcagaggatgccgatgttacccttcaattacatttggtcttatggccaaaattacagcaaagtgaaggcctcaagcgggtattccaagaaattgagatgccgttattgccgatcttgtctcgtattgagcggactggcgtattgattgaccaaaatatattagcggcacactcaaaagagctcaccatccgtttggatgagctggaaaagcaggcccatgaattggctgaagagccattcaacctggcatcacctaaacagctacaggctattctttatgaaaagcaaaaattgcctatcttgaagaaaacacctggaggcgcggcgtcaacgaatgaggaagtgctggctgagttggctctggattatcctttgccgaaggtgattctggaatatcgtggtctggcgaaactaaaaagcacttacaccgacaaattgccgctaatgattaaccccgtctccggtcgggtacacacttcctatcatcaggcagtgacagcaaccgggcgcttgtcttcccgcgatcctaacctacaaaatatccctgtacgtaatgaagaggggcgacgtattcgccaggcctttattgcaccgaagggctactgcattatggcggccgactattcgcaaattgaactgcgtattatggcgcatttgtcgcaggataacgggctgttagctgcatttgctgctgggcaggatattcaccgggcaaccgccgcggaagtatttggttcgccattggaaaaagtgacgacggagcagcgtcgtagcgcaaaagcgattaattttggtttgatttatggcatgagtgcttttggcttggcacgccagttggggatccctcgtggagaggctcaacgttatatggatctctattttgagcgttatccgggggtgttggagtatatggagcgtactcgtaaacaggctgctgagcagggctatgtcacgacactggatggtcgccgcctctatctgccggatattcactcacggaatgcaaaccgtcgaaaagcggctgaacgtgaggcgattaatgcccctatgcaaggtacggctgcggatattatcaagcgggcgatgattgcggtggatggttggttacagcaagagccagaaccgttggtgcgtgtcatcatgcaagtacacgatgaattggtctttgaagtgcatgaaagtgttttgcaaagtgctgagcagaaaatccgtgagttgatggagcaaagtatgcaactggctgtgccattgaaggtggatgtcggtgttggcgctaactgggatcaagctcattag

SEQ ID NO: 41829 - DNA, 669 bp, Yersinia pestis
atgttttcgtttactgtccaacagcggatgaccgcgttggtatggctatcgctattccatattgtcatcattacctccagtaactacctggtgcaattgccgatcgctatcttcggctttcataccacttggggggcttttacctttccatttatcttcttagccactgacctgaccgtgcgaatttttggtgcccctttggcgcgccggattattctttccgtgatggtgcccgcgttgttgatttcgtatctgatatcagcactgttttatcagggaagctggcaggggttccccgcattaaccagttttaatctggtggttgctcgtatcgccgtcgccagttttatggcctatgttcttggccaaattctggatgttcaggtgtttaaccgcctacgtcagcgtaatgcctggtgggttgcacctactgcggccatgttctttggcaatatcagtgacaccatggcattcttcttcattgctttctatcgcagtagtgacccgtttatggcagcacactgggtggaaattgcgttagtcgattacagctttaagctgttaatttgcatgttgttcttcctgccagcttatggcgtgatgctgaatgtgttgctgaagtactttgcccggcagacgggtcagccagtgctggcaactgaacgatag

SEQ ID NO: 41830 - DNA, 1050 bp, Yersinia pestis
atggcaacaggcacgctgcccgatgctgggcagatcctcaatactctcattaatagcattctgctgttagatgatgatttggctattcattatgccaaccccgcagcccagcaacttctggcgcaaagctcccgtaaactttttggtacacctctgcctgatttattaggctatttttcactgaatatcgtgttgatgcgagagagtttgcaagccgggcaagggtttactgataacgaagtgacattagttgttgatggccgggcacatattttatcgctgaccgcacagtccctagcggaagggtttattctgctagaattagccccgatggataatcagcgccggttaagccaagagcaattgcaacacgctcaacaagttgccgcacgtgatttagtgcgcggattggctcacgagattaaaaacccactcggaggcctacggggcgctgcgcaattattagctaaagcgttacccgatccagcgttgctggaatatacccaagtgattattgaacaggcggatcgcctacgtaatttagttgatcgcttgttaggcccacagcggcctggccaacatattacacagagtattcatcaggttgctgagcgggtttgccaattagtctcattggaaaaaccagataacgtcacgttaatccgcgactatgatccaagcctccctgagcttgcccatgatccagaccaaatagaacaagtgctgctgaatatcacccgtaacgcattacaggctctcggggagactggcggcacaattacacttcgcacccgaaccgctttccaagtgacgctacatggcatgcgctaccgtttagccgctcggattgatattgaagatgacggtcccggtgtaccaacgcaattacaagataccgtattctatccgatggtcagtggccgcgagggcggtacgggtcttggtttatctatcgcccgtaatcttatcgatcagcattcgggtaaaattgaatttaacagttggccaggacacaccgagttttcggtttacctgcctattcgccagtga

SEQ ID NO: 41831 - DNA, 972 bp, Yersinia pestis
atgaacgtagtaaaaccaataacacgtatcagcgccatcaactggaataaaattgaagacgataaagatctggaagtgtggaaccgcctgacatctaatttttggctgccggaaaaagtcccgctgtcgaatgatattccgtcgtgggcgacactcacgccacatgaacaacaactgactatccgggtttttaccggcctcacgctattggatacgatccagaatacactgggcgcacctgcattaattaaagatgcgattaccccccatgaggaagcgatattttcaaatatcagctttatggaggccgtacacgcacgttcttatagctctattttttctacactttgtctgacatcagatgtagacgatgcctaccgttggagtgaggataatgggccactccaaaagaaagctgatattatttcacagcattaccataatgacgatccgctgaagaaaaaaatagccagtgtatttttggaatcatttttattctattccggattttatttacccatgtattggtccagtagagctaaattaaccaacaccgcagatcttattcggcttattattcgggacgaagctgtccatggatattatatcggctataagtttcaaaaggggttgggaaaaatagatagtgcccatcgtcaggaaataaagaatttcgctttcgacctactgcaagatctctatgataatgaagtgcgttataccgaagatctgtatgaccacgttggctggacagaggatgtaaaaaaatttctccactacaatgccaataaagcactcatgaatttaggctatgaggcattatttcccgccagccaggcggcggtcagccctgcaattctggccgcgttgtcgccaaacgcagatgaaaaccacgattttttctccggatcaggttcatcttatgtgatcggtaaagcggtcaatactgaagacgaagattgggatttttaa

SEQ ID NO: 41832 - DNA, 1410 bp, Yersinia pestis
atgtccgctgaacatgttttgacgatgctgaatgagcacgaagtgaaatttgttgatttacgtttcactgataccaaagggaaagagcagcacatcacgatccctgctcatcaagtcaacgctgacttcttcgaagaaggcaaaatgtttgatggctcctcgattggtggctggaaaggcattaacgaatccgacatggtactgatgccagacgccagcactgccgttatggacccgttcttcgcagattcaacactgattatccgttgtgacattcttgagccaggcaccatgcagggctatgaccgcgatccacgttctatctccaaacgtgctgaagacttcctgaaatcttcaggtatcgctgataccgtgttgttcgggccagaaccagaattcttcctgtttgacgatatccgttttggtagcagcatcaatgggtcacacgtatccatcgatgacgtcgaaggcgcatggaactccagcaccaaatacgaaggcggcaacaaaggccaccgtcctgcagtaaaaggcggttacttccctgttcctccggtcgactctgcacaagacctccgttctgccatgtgtctgacgatggaagagatgggcttggtggtagaagcacaccaccacgaagtggctaccgcgggtcaaaacgaagtggctacccgcttcaataccatgaccaagaaagcagatgagatccagatttacaaatacgtcgtacacaacgtggcgcacgcatttggtaaaacagcgacctttatgccaaaaccgatgttcggcgataacggctcaggtatgcactgccatatgtctttgtccaagaacggtaataacctgttcgctggcgacaaatacggcggcctgtctgaaatcgccctgttctacatcggcggtatcatcaaacatgcgaaagccattaatgccttggctaacccgaccaccaactcctacaagcgtctggtcccaggttatgaagcaccggtcatgctggcatattcagcccgtaaccgttcagcttctatccgtattcctgttgttgccagcccgaaagctcgccgtattgaagcgcgtttccccgatcctgcggctaacccgtacctgtgcttcgccgcgctgttgatggctggccttgatggcatcatcaacaaaattcacccaggtgatgcgatggacaaaaacctgtatgacttgccgccggaagaagaagctgagattccaaaagttgccggttcactggacgaagccatggccgcattgaacgaagatcgcgagttcctgactcgtggtggcgtgttcaccgatgatgctatcgatgcgtatatcgagctacgtagagaagaaatggatcgcgtgcgtatgactccgcatcctgttgagttcgaactgtattacagcgtttaa

SEQ ID NO: 41833 - DNA, 1248 bp, Yersinia pestis
atggtgggcgatagccgtctcacgcgagataatagcttcgaaagctgtatcaaatgtacggtctgtacgacttactgtccggtggcaaaggttaacccactctatccggggccgaaacaagctgggccggatggtgaacgcctgcgtctgaaagatccggcactgtacgatgatgcgctgaaatattgtaccaactgtaaacgctgtgaagtggcttgcccgtcagatgtcaaaattggcgatattatccaacgggcgaaagccagccatagcactaacaaacccaaattacgcgatgccatcctcagtcataccgacatcatgggcacgctttcgacaccgtttgcaccggtgatcaatgcggtgacggggttgaaacccgttcgggtattgttggacaaagcgctgaaaattgaccatcgacgtgaattacccaaatactcatttggtacctttcgccgttggtatcgcaaacaggcggaaaaacagcagcaatataccgagcaagttgcgtttttccatggctgttttgtcaactataaccaccctcaattaggcaaggatttagtcagcgttttcaatgcgatgaatatcggtgtgcagttgttgaaacgtgaaaaatgctgtggtgtcccactgattgtaaatggttttattgagcaggcgaaaaagcaggcacgggtaaacctagaatcactcactgatacggtcattggccgtgatattccggtagtcgccacctcctcaagttgtaccttcaccctgcgggatgaatatcctcatttattagatgtggatacgaccccggtgcgcgataaagtagagttggcgactcgctacctttaccgcttattggatcaagggcgagagctacctctgaagcctttattctcattaaaccccttattggcatctcaagaagccccattgcgcattgcctatcacacaccttgtcatatggagaaaatgggctggacggcctataccctggctttgctccaacggatacccggtgttgagctggtggtgttagattctcaatgttgcggtatcgccgggacctatggttttaaatcagaaaactacgcgacatcgcaagggattggggcatcgttgttccagcaaattgaggatagcggggttgatttggtgattaccgattgcgaaacctgcaaatggcagatcgaaatgtcgaccagtaagaaatgtgagcacccgattactttactggcgcgggcattggcttga

SEQ ID NO: 41834 - DNA, 2082 bp, Yersinia pestis
atgctgaacctttatgatgctgatgggcgtatccagtttgataaagaccggctggccgcacggcaatactttttgcagcacgttaatcaaaacacggtgttcttccataatctacaggaaaaaattgattacctgattgaggagggatattacgaaaaagaggttctggatcaatacgattttagctttatcaaaagtctattccagcaagcctatagcaaaaaatttcgtttccccacttttctcggggcgtttaaatattacaccagctacaccctaaaaacctttgatggcaaacgttacctggaacgctatgaagatcgcgtttgcatggtcgcactgacactggctacaggtaaccagacactggcgcgggaactggtagaagaaattatctctggccgcttccaacccgccacaccaaccttcctcaattgtggcaaaaaacaacgtggtgaactggtctcctgcttcctgttgcgtatcgaagacaatatggaatccattggccgctcgattaactcggcactgcaactctctaaacgtggcggaggcgtggcgttcctcctcagcaatatccgtgaggtgggtgctcccatcaaacggattgaaaatcagtcttcgggtgttatcccgataatgaaaatgttggaggacgcgttctcctatgccaatcagttgggtgcccgtcagggggcgggggcggtctatctccatgcccatcatccagatattttgcgttttctggataccaagcgggaaaatgccgatgaaaaagtacggattaagaccttatcgttgggggtggtgataccggatatcacttttgaactggcgaagaataatgaagaaatgtacctgttttcaccttatgacattgaacaggtttacggcgtgcccatgtctgaaatcagcatcagcgaaaaataccgcgaaatggtggataacaaacgcatccgcaaaagcaaaattaaagcccgcgagttcttccaaattctggctgagatccaatttgaatctggctacccttatatgatgtttgaagatacggttaatcgcgctaatccgattaaaggccggattaatatgagtaatttgtgttcggaaattttgcaggtcaacgcccccactgaataccacgaagacctcagctatcgccgtatcgggaaagatatctcctgtaatcttggctcgctgaatatcgcgcaggtgatggattcacccgattttggtaaatccattgagatcgccattcgtgggctcactgccgtatctgaaatgagcaatattcgctcagtgccatccattgaaaaaggcaatcaagaatcacatgccattggccttgggcagatgaacctgcacggttatctggcgcgggagcgtcttttttacggctcggaagaggcgttggattttaccaatatctatttttataccgtggcgtatcacgcgatccgtgcctcaaaccagttggcaatagaacgggccagccatttcaaaggcttcgatgaatcagattatgcttcgggtgctttcttcagcaaatatatcgagcaaagctggcagccaaaaacagcaagagtacaggcactgtttgccgatgccggtattgccataccaaaccaacaagattggatcgcgctacggcaatccgttatggaacacggtatttataatcagaacctacaggcggtgccaccaacaggctctatttcctatatcaatcattcgacatcaagtatccacccgattgtctctccgattgagatccgtaaagaaggcaaaataggccgtgtttattatcccgcaccctatatgaccaacgataaccttgaatattatcaagatgcctaccagatcgggcctgaaaaaatcatcgatacctatgccgcagcgacccaacatgttgatcagggcctctctctgacgctgttcttccgtgataccgctaccacccgcgatattaacaaagcacagatttacgcttggaagaaagggatcaagaccatttattacatccggctacgtcagatggcattagagggaaccgaagtcgagggctgcgtttcctgttcgctgtaa

SEQ ID NO: 41835 - DNA, 1824 bp, Yersinia pestis
gtgatcgagaatctgcgtaacatcgccattattgcgcacgttgaccatgggaaaactaccctggttgataagttgctacaacaatctggtactttcggtgaacgtactgaagcaactgaacgtgtaatggactccaacgatttggagaaagagcgtgggataaccatcctcgcaaaaaatactgccattaattggaaagactaccgcatcaacatcgttgataccccagggcacgccgatttcggcggtgaggttgagcgtgtaatgtctatggttgactctgtgctgttggtcgtcgacgcaatggatggcccaatgccgcagacccgtttcgtgaccaaaaaagcctttgctcatggtctgaaacctatcgtggttatcaacaaagttgaccgtcctggcgcgcgccctgactgggttgtggatcaggtgtttgacctgttcgttaacctggatgcgaccgacgaacaactggacttccctatcatctatgcatctgcattgatgggtatcgcgggtgaagaccacaatgatatggcagaggatatgaccccgctgtatcaggcgattattgaccatgttcctgctcctgatgtagacagttctggtccgttgcagatgcaaatctcccaactggattacaacaactacgtgggtgtcatcggtatcggccggatcaaacgtggtattgttaagcctaatcagcaagttactgttatcgatagcgaaggtaagacccgcaacggtaaagtgggcaaagtactgggccatatgggtctggaacgaatcgaaactactcaggcagaagctggcgacatcgttgctatcaccggcctgggcgagttgaacatctctgacactatctgtgatgtgaatgcggttgaagcattgccaccactgtctgttgatgaaccaacggtaaccatgtatttctgcgttaacacctctccgttctgtggtaaagaaggtaagtatgtgacttcacgtcagattcttgaccgtctgaacaaagagttgatccataacgtagctctacgtgttgaagaaacggaagatgctgatgcattccgtgtatcaggccgtggtgaacttcacctgtcagttctgatcgaaaacatgcgtcgtgaaggtttcgagctggctgtttctcgtcctaaagttatcaaccgtattatcgacggtcgcaatcaagaaccttttgaaagcgtaacgctggatatcgaagagcagcaccagggcgcagtaatgcaagccatgggtgagcgtaaaggtgacgtgaaggacatgatcccagacggcaaaggtcgtattcgtctggattatatgatcccaagccgtggcctgattggcttccgtactgaattcatgaccatgacttctggtaccggcctgctgtactccacattcagtcattatgatgatgtgcgtccaggtgatatcggccaacgccaaaacggtgtgctgatctctaatggtcagggtaaagcggttgcgttcgccttgtacaaactgcaagaccgcggcaagctgttcatcggtcacggtacagaagtgtatgaaggccagatcatcggtattcactcacgttctaatgacctgacggtaaactgcctgacaggtaagcagctgactaacatgcgtgcatccggtactgacgaagcaaccactttggttcctttcctcaagaaaacgttggaacaggcactggaattcatcgatgacgatgaattggtagaagttaccccgcaatcaatccgtatccgtaagcgtcacctgacggaaaacgatcgtaagcgtgctggacgtggtccaagagaaggttaa

SEQ ID NO: 41836 - DNA, 405 bp, Yersinia pestis
atgaatccgctggtttatttctccagcagctcggagaactcccatcgttttgtcgaaaagttacaactacccgccatccggatccctattgccggggcgcgggaaaagctacgggttgagcagccctatattttgttggtacctagctatggggggggcagcccggttggcgcggtacctattcaggtcattcggttcctgaacgatgttcataaccgttcattgatccgcggtgttattgccgcgggcaacactaattttggcgacgcctactgtctggcgggggatattatctcccacaagtgtcaggttccttacctgtatcgctttgaactcctaggtacagcagaagatgtggcaaacgttcgcaagggagtaactgaattttggcaacgacaaaactga

SEQ ID NO: 41837 - DNA, 810 bp, Yersinia pestis
atgtatcatgttgttgcttccgatttagatggcacgctgctatcgcctaatcatacgttgaccccttatacgaaagaaacactcaaattgctgacgcagcgtgatgtgcattttgtgtttgccaccgggcgccaccatatcgatgtggcacaaatccgcgataatttggagatcagtgcttttatgatcacctctaacggtgcacgcgtgcataacactgagggagaattgattttcagtcataaccttgatgcggatattgcccgtgatttgtacaatcttgaacatcataatccggatatcctgactaacgtctatctgggcgacgaatggtttatgaaccgcgaatgtccagagcaagaagagttcttccgtgaatccgtgttcaattatcaggtatttgaacctgcattactgccgactgacggcgtatgtaaggtgtatttcacctgcgaagatcatgacaagttgctgatcttggaagaggccattaatgcccgctggggcgatcgcgttaacgtcagcttctccttccctacctgcctggaagtgatgggcggcggcgtgtccaaaggccatgcgctggaacaggttgctaaaatcatcggttattcactaaaagactgtattgcctttggcgatggcatgaatgatgtcgaaatgttgtcgatgtctggcaaaggctgcatcatgcgcgacgcacatcagcggctaaaagatgtgttgccgaatttggaagtgataggctctaatgctgatgatgcggtaccacactacttgcgtaagatgttcttaggtaaggaagagtaa

SEQ ID NO: 41838 - DNA, 1014 bp, Yersinia pestis
atgctgttaggtcatcacatgaataattggttaacccgagaagagcaatttgctgcttttattaatgggccattgttggatttctggcagcaacgagacgaacagacgtttatgggcgtcgataatatccccattcgctatgtccgttttcgtgcgccgcatcatacccaagtcgtggtggtagtgccggggcgtatcgaaagttacgtcaaataccctgaagttgcttatgacctgttccagcagggctatgatgtgatagtgctggatcatcgcgggcaagggcgttctgggcgtatgctggatgatcataaccgtggtcacgtgattaagttcgatgactatattgaggattttgcacaactggtgcagatcgaaattaccggtagccattatcagcagcgttttgcgctggcccactcaatggggggcgcgattctgacgcgttttctagccagagagcctgatgtatttaatgccgttgcgttatgtgcgcccatgtttggtattcatttacccctgccgggctggttggcacgccgtattgttaactgggccgaagggcaccaaaagctacgggattattacgcgattggtactgggcattggcggccactgccgtatttggtcaatatgctgactcacagccgcgagcgttatcgccgctatttgcgccaatattcagacacaccagaaatccgcgtgggtggccccacttaccattggctacgtgaaagtttgctggtgggggagcaaattattgctgaagcggagaaaatcaccactccggtattattgttacaggccagtgaggatcgggtggttcataacccagcccacgatgctttttctcaggcaatgacattggcagggcacccctgtgaaggggggcgtcctcaggtcattcaaggcgcacgccatgagatcctgtttgagcgggacacgctgcgtgccgaggcgcttagcgccatattgcgctttttcgcgcaacatcaatcatcagtcggccattag

SEQ ID NO: 41839 - DNA, 1161 bp, Yersinia pestis
gtggctgaagatagcgatcaggaaaaaagtgaagaacccacagccagtaagctggagaaggcgcgtgagaaaggccagatcccgcgctcgcgtgaattaacctcaatgctgatgcttggggccggtttgactatcctgtggatgtccggtgaatcaatggcccggcaactctcggctatggttgcgcaagggctgcattttgatcacagcatggtcagcaatgacaaacaaatgctgcggcaaattggcatgttattacgccaaacgctgctggcgatgctgccgatttttgccggattagtgatagtcgctttagcggtaccgatgctcttggggggagtgctgttcagtggcgagtcaataaaatttgacctaaaacggatgagtccggtagcgggtttaaaacgcatgttttcctcacaggcgctggctgagttactgaaagccattttgaaggcgacactggttggttgggtcaccgggttattcctttggcataactggcccgacatgatgcgcctgattgccgcgccaccggttgcagcattaggtgatgcgcttcacttgatcattttctgcgggctggtggtggtcttagggctgtcgccaatggtcgggtttgatgtgttttaccagataaccagccatatcaaaaagttacgtatgaccaaacaagatatacgcgacgaatttaaaaatcaggaaggcgacccacatgtgaaagggcgcattcgtcagcagcaacgggcgatggcccgtcgtcggatgatggtcgatgtgcccaaagcggatgtcatcgtgactaacccgacacactacgcggtggctttgcaatacaacgaatcaaaaatgagtgcgcctaaggtgttggcgaaaggggcgggtgccgtcgcgctgcgtatccgtgagttaggtgctgaacatcgtattccgctattagaagcgccgccactggcgagggcattattccggcacagtgaggtcggtcaacatattcctgccaccctttatgcagcagtcgccgaggtgcttgcctgggtttatcagctgaaacgctggaagcgggaaggcgggcttatcccgaaaaaacctgaacatctgccggtgccggaagcactggattttgcaacagagagtgagacaaagagtgagacagactaa

SEQ ID NO: 41840 - DNA, 621 bp, Yersinia pestis
atgaccttagactggtggttaacctatctgctgacaacattgatcctcagtctttctcccggctcgggggccattaacacaatgagcactgccatcagccatggtacccgtggggttgttgcttccattggcgggttacaactgggtctggcggtgcatatcgtcttggttggcgtcggtcttggtgccctggtctctcaatccttactggcatttgaaatattaaagtggctcggtgcggcttacttaatttggcttggtattcaacaatggcgtgcagccgggtcgcttgacctgcatgcactggcaaacagtatgcccaggcgtaagctgtttaaacgtgcggtgtttgttaacctgaccaatccaaaaagcattgtttttctggccgcgttatttccacaatttgtactgccacagcaaccgcaggtggcacagtatttgattttgggcagcaccagtgtgattgtcgatattatcgtgatgattggttatgccactttggctacacgtattgcccgttggattaaatcgccacagcaaatgaaactcttgaaccgaatatttggcggcctatttatgttgattggtgcattattagccacagcgcgcaaagtataa

SEQ ID NO: 41841 - DNA, 1833 bp, Yersinia pestis
gtgtcgaccgcagcagtgataaacagggaattactggcagtgcaggtattgcgagatacttttggttatcagcaatttcggccagggcagcaggagatcatcaacgcgacattgtcaggccaggattgtctggttgtgatgccaactggcggcggtaagtccttgtgttatcagatccctgccttggtgaccgatgggctgacattggtggtttcaccgcttatctctctgatgaaagatcaggttgaccaactgttggcctatggcgtgggcgcgggttgtctaaactcatcgcagacccgtgaacagcaactggccgttatggatggttgccgcagtgggcagattaaattgctgtatatcgcgccagaacggttggtgatggagagttttcttgatcaactgtatcaatggcgacccgccttgctggcagtggatgaggctcactgtatttcccaatgggggcatgatttccgcccggaataccgtgctcttggtcagttaaagcagcgtttccctgatctaccggttattgcattgaccgctacggctgatgaagcgacgcgtggcgatattgtgcgcctgttgaatctggatcaacctctgattcagatcagtagttttgatcgcccgaatatccgctataccttagttgagaagtttaaacctctcgatcaactgtggcgttttgtacaagaccagcgcggcaagagcggcattatttactgtaatagccgagcgaaagtggaagatacgaccgcccgtttgcaaagccgtggcttgagtgttgccgcctatcacgccgggctggataacgagcgccgtgctcaggtgcaagaggctttccagcgcgatgacttacaagtggtggtcgccaccgtagcgtttggaatggggattaacaaaccgaacgtccgctttgtcgtgcattttgatatcccacgcaccatcgaatcctactatcaggaaacggggcgcgccgggcgtgatggcttaccggctgaggccgtgttgttgtacgatccggcagatatggcgtggttacgccgttgtcttgaagagaaacctgcgggtgctcagcaagatatcgaacggcataaactcaatgcgatgggggcatttgccgaagcgcaaacctgtcgccgtttggtgctgctcaactattttggtgaaggtaaacagcagccatgcggtaactgcgatatttgtctggatccgccaaagcgctacgatggtctggcagatgcgcaaaaggcgctctcttgcgtctatcgggtagggcaacgctttggcttagggtacatcgttgaggtgctgcgtggggcgaataaccagcgtattcgtgagatgggccatgacaagctttcggtgtacggcattggccgtgagcaaacccatgaacactgggtcagcgtcttgcgccagttgatccatttggggctgctcagccagaatattgcccagttctctgccttgcaactgactgaagcggcgcgcccggtcttacgcgcagagctgccattacaactggcggtaccgcgtattcagagcctgaaagtgcgtagcagtgccaatcagaaatcctatggtggcaattatgatcgcaagttgttcgctaagctgcgcaaactgcgtaaatcaattgctgatgaaggcaatatcccgccttatgtggtgtttaacgatgcgaccttgctggagatggctgagcagatgccgattactgccagcgagctattgagcgtgaatggtgtcggtcagcgtaaactagaacgttttggtgcaccatttatggccctgatccgtgatcatgtggataacaacgatgactaa

SEQ ID NO: 41842 - DNA, 303 bp, Yersinia pestis
atgcagctcaccccaagagaagttgaaaagctcatgatctacacgctgtctgatgtggcgtttaagcgcaaagcgcgtggcttgaaactcaattatccggaagctgtttctatcattactgtgactgcaatggaaggagccagagatggcaaatccgtagaagatgtgatgaaggaagccagtaaagtgctgaccaaagatgatgtgatggatggggtggcagatttgatcccgaatgttcaggttgaggcgatttttaccgatggcagccgtctggtcacggtacacgaccctattaagtag

SEQ ID NO: 41843 - DNA, 1719 bp, Yersinia pestis
atgcctcaaatttctcggcaagaatacgcgggtctatttggcccaacaactggcgataaaatccgtttgggtgataccaatctgtttatcgaaatcgaaaaagacttgcgtggatatggtgaagagtcggtttacggtggtgggaaatcgctgcgtgacgggatgggggccaacaataatctgacccgcgataatggtgtgcttgacctggtgattaccaacgtcacgattgtcgatgctcgcttaggggtgattaaagctgacgtcggtatccgcgatggcaaaatcgccggtatcggtaagagcggtaaccccggtgttatggatggggttacgcagggtatggtggtcggtgtgagcaccgatgctatctctggtgagcatttgattcttactgccgccggtatcgatagccatattcatctcatctccccgcaacaggcctatcatgcgctgtccaacggtgttgcaacattctttggtggggggattggtccaacggatggcactaacgggacaaccgtaacaccagggccgtggaatatccgtcaaatgctgcgttcgatagaggggttacctgtcaacgttggtattttggggaaaggtaattcatacgggcgcggcccgttgctggaacaggctattgccggtgttgtgggctataaagttcatgaagactggggcgcgacggcgaatgctttgcgtcatgcgctgcggatggcggatgaggtggatattcaggtttcggttcataccgatagcctgaatgaatgtggttatgtagaagatactatcgatgcgttcgaaggccgcacgatccacacgttccacaccgaaggggcgggtgggggccatgcgccggatattattcgggtggccagccaaactaacgtactgccaagttcaaccaaccccaccctgccgtatggtgttaacagccaggctgagctgtttgacatgattatggtgtgtcacaaccttaacccgaacgtacctgctgacgtctcctttgccgaaagccgtgtgcgcccagaaacgattgctgctgaaaacgttctgcacgatatgggcgttatctccatgttctccagtgactcacaagccatggggcgagtgggggagaactggttgcgtattttgcaaaccgcggatgcgatgaaagcggctcggggcaaattgccggaagatgcggcgggtaacgataatttccgcgtgctgcgctatgtggcaaaaatcaccattaaccccgcgattacacagggggttagccatgttatcggatcggttgaagtgggcaaaatggccgatctggtgctatgggatcctcgcttctttggtgcgaaaccgaagatggttatcaaggggggcatgattaactgggccgcgatgggcgatccaaatgcgtcactgccaacaccacagccagtgttctaccgcccaatgtttggcgcgatgggcaaaacgctacaagacacttgtgtcactttcgtttctcaggctgcacttgatgatggtgtgaaagagaaagcggggctggatcgccaagtgatagcggttaaaaactgccgcacgatctccaaacgtgatctggtgcgtaatgaccaaacaccaaacattgaagtggatcctgaaacctttgcagtaaaagtggatggggtacatgccacctgtgagccaattgcaactgcgtcgatgaatcagcgctatttctttggctaa

SEQ ID NO: 41844 - DNA, 687 bp, Yersinia pestis
atgaacgcatcagatctcattcgtatcatgcaatttggtgattccgtactgccggtcggggcctttacgttttccaatggcgtggaatctgccattcaaaccggcatcgttcatgatgtagcaacattgaaaggcttcgttttgacagcgttgaagcaggcggccagttgtgacggcatgggcgttgttgtggctcatcgtgctgttgtggcagatgaccgtgacggtattatccgtgctgattgggcggttaataatcgtaagttaaatgaagaaagccgcctgatggcaacccgcatgggtaaaaagctggcagaaatgtcgatccatgtggtggagcacccattgatcagctggtggttggaacaaatcaaaaatggcaacacggcgggcacctatccggtgactcaagcggtggttatggcagcacaagggatcgggcaacgggaagtggttgtgatgcatcaatacggtgtggcgatgaccattttaagtgcggctatgcgcttgatgcgcgttacgcatttcgatacacagcatatcttatttgaactgaaccatgacattgagaaattctgcgatattgccgaaatcggcgatatcaaccagatgtcttcttatgtcccgattgtggatgttttggccgccgtacatgtgaaagcccatgttcgcctctttagtaactga

SEQ ID NO: 41845 - DNA, 678 bp, Yersinia pestis
atggccattaccaattccctgacggaaagtgattacggcacgaccgggaccagttccactaccggcagcagtagtcaagatctgcaaaaccgcttcctgacgttattagtggcgcagttgaaaaaccaagaccctactaacccaatggaaaacaacgagttgaccacacagttggcgcaaatcaacaccgtgagtggcattgaaaagctgaatacgaccctcggtgctattaccggtcaaattgacagcagccaatctctgtacgccaccagcctgattggtcgaggcgttatggtccctggtaccaatatatttacgggcagcaccgatggcacggtcagcaccacgccttttggcctcgaattgcaacgacctgcggataaagtgaccgccaccattagcgatagcaatggtcaggtggtacggaccattgagatcggtggtttaaacgcaggtgttcactcctttacctgggatggctcactggacgcgggcggtaatgcgccagatggtgcttataccgtagccattactgccagcaatggtggggaatcactggtcgcaacgccgttgaactacgccattgtcaacggtgtaacccgcggcgcggatggctccaaactggacttgggtctggcaggaaccatcacgctggatgaagtgcgccagattttataa

SEQ ID NO: 41846 - DNA, 663 bp, Yersinia pestis
gtgaccgataaaagcacagcacgtaaaaaaataacccgtattggtattggtggtccggtaggttcggggaaaacggccattatcgaagtcataaccccgatcctgattaaacgaggcattaagccactgattatcaccaatgacatcgtgacgaccgaggatgccaaacaggtaaaacggacgctgaaaggtattctggacgaagagaagatccttggggtagaaactggcgcttgcccgcataccgcagtgcgcgaagacccgagcatgaacattgctgcggtagaagagatggaagagcgcttccctgaaagcgacctgattatgattgaaagcggcggggataacctgacactgacattcagtcctgcactggcagacttctacatctatgttattgatgtggctgaaggtgaaaaaattcctcgtaaaaatggccccggcttggttcaggcagacattttagtgatcaataaaattgacctggcaccttatgtcggtgccagcctggatgtcatggagagtgataccaaagtcgtgcgcggcaatcgcccttatattctgaccaattgcaaaactggccagggcattgaagaactggtcgatatgattatgcgagatttcctgtttacccatgtacagccggaaggagaacaggcatga

SEQ ID NO: 41847 - DNA, 525 bp, Yersinia pestis
gtgacaacaattgtaagtgtacgccgtgatggtcatgtcgttattggtggcgatggccaagtcactttgggcaataccgtgatgaaaggtaatgccaaaaaagtccgccgtctttataacaacaaggttattgctggctttgcgggggggactgctgatgcctttactctgttcgagttatttgaacgcaagctggaaatgcatcaaggccacctgacgaaagcggctgttgaactagccaaagactggcgcaccgaccgtatgctgcgcaagcttgaagcgttactggcggttgccgatgagaccgcttcgctgatcattactggtaacggtgacgtggttcaacctgaagatgatctgattgccattggctccggtgggccttatgcccaatcggcagcacgtgcgttgttagaaaatactgaattaggtgcgcgggatatcgttgagaaatcactgagtattgcgggggatatttgtatctacaccaaccgcttccaaaccattgaagaattaacatactaa

SEQ ID NO: 41848 - DNA, 2109 bp, Yersinia pestis
ttgtacctgtttgaaagcctgaatctgctgattcaacgttacctgccagaggagcagattaagcgcctcaaacaggcatatcttgtcgcacgtgatgctcacgaggggcagacacgctccagcggtgagccttatatcactcacccggttgctgtggcctgtattctcgcggagatgcggctcgactacgaaaccttaatggcggcgctattacatgacgtcattgaagatacacctgctacatatcaagatatggaacagctgtttgggaaaagcgtagccgagttagtcgagggtgtatctaaactcgataaactgaacttccgtgacaagaaagaagcccaggcggaaaacttccgcaaaatgatcatggcaatggtgcaagacatccgcgtcattttgatcaaactggctgaccgtacacacaatatgcgcacactgggctctttgcgcccggataaacgtcggcgcattgctcgcgaaacccttgagatatacagcccactagcccaccggctgggtattcatcatttaaaaaccgagctggaagagctgggttttgaagcactctatcccaatcgttaccgcgtcattaaagaagtggtaaaagccgcgcgcggtaaccgcaaagagatgattcagaagatcctcgcggagattgaagggcgcttgaccgaggctggcattccttgccgggtcagtggccgtgagaagcatctgtattccatctactgcaagatgcacctgaaagaacagcgcttccattccatcatggatatctatgcttttcgggttatcgtcaaagaagtcgatacttgctaccgcgtgttggggcaggctcatagcctgtataaaccccgccctgggcgcgtaaaagactatatcgctatccctaaagctaacggctaccaatcattacatacgtcattaatcggtccccatggcgtaccggtagaagtacaaatccgtactgaagatatggaccagatggccgaaatgggggttgctgcacactgggcttataaagaacaaggtgagtccggtaccacggctcaaatccgtgctcagcggtggatgcaaagcttgctggagttacaacaaagcgcgggtagctcatttgaatttattgaaagcgtgaaatctgatttattccctgatgagatctacgttttcaccccggaagggcgcattgtggaattaccggctggtgccacaccggtcgattttgcctatgttgtgcataccgatatcggccatgcctgcgtaggtgcccgcgttgatcgtcagccgtacccgctctctcagccactgagtagtggccagacggttgagattattaccgctccaggagccagaccaaatgctgcctggctgaattttgtcgtcagttcaaaagcgcgagccaaaatacgtcaattactgaaaaatcttaaacgtgatgaatcggtcagccttggtcgccggttactgaatcatgcattaggaaatgggcgtaaactctctgatatttctgaagaaaatatcaaacacgagttggatagaatgaaactggctacggtagatgacttgctggcagaaattggtttaggtaatgccatgagcgtagtggtggctaaaaacctattgggcgatccatcaacactgggcacctctgcttctggtacccgcaagttaccgatcaaaggtgccgatggcgtacttatcacgtttgccaagtgctgccgtccaatccctggtgaccctattatcgcccatatcagcccaggtaaagggttggttattcatcacgaatcttgtcggaatatccgtggttaccagaaagagcctgagaaatttatggctgtagaatgggaccaagagactgaacaagagtttattgccgaaattaaagtcgatatgtttaaccaacaaggtgcgcttgccaatctgaccgccgcgattaacgccgccgaatccaatattcagagtttgaatacagaagaaaaagatggccgggtatacagcgcctttattcgcctgaccactcggaaccgggtccatctggctaacattatgcgtaaaatccgtatcatgccagatgtggttaaagttagccgtaatcgcaattaa

SEQ ID NO: 41849 - DNA, 2163 bp, Yersinia pestis
atggacgtttctgatctgctcgacagcctgaatgaaaaacaacgtgacgccgtggccgcgccgcgcggcaacttgttggtactggccggtgcaggcagtggcaaaacgcgggtgctggttcaccgtatcgcctggctgttgtcggtagagaatgcctcgccgtattcgattatctcggtaacctttaccaataaagcggcggctgaaatgcgccaccgtattgaacatctgattggcaccagccaaggcgggatgtggatcgggactttccacggtttggcgcaccgtctgctgcgtgctcaccatctggatgccaatctgccacaagattttcaaatcctggatagcgatgaccaactgcggttattgaaacgcctggtcaaagcactcaatttggatgagaaacaatggcccccgcgtcaggcgatgtggtacatcaacggcaaaaaagacgaagggctgcgcccgcaacatattgagagctacggtaatccggttgaggccacctggctacgtatctatcaggcttatcaggaagcgtgcgaccgcgcgggtctggttgattttgccgagctgttgctacgagcgcacgagctgtggctgaacaaaccacatattcttaatcattatcgtgaacgctttaccaacattttggtggatgagtttcaggataccaacaacatccaatatgcctggatccgcttgttggccggtgaacgttccaatgtgatgatcgtcggcgacgatgaccagtcaatctatggttggcgcggcgcgcaggtcgagaatatccaacgtttcttgaaggatttccccggtgcggagaccatccgcctggagcagaattaccgctcgaccagcatcattctggctgccgccaatgccctgattgccaacaatgacggccgcatgggtaaaaatctgtggaccgatggcgcggagggcgaacctatctccctctattgtgcgtttaacgagttagatgaagcccgttttgtggtcaatcgtatcaaagcctggcaggacaacggcggtgcgctgaatgattgtgccattttgtaccgtagcaacgcccaatcgcgcgtattagaagaagcgttactgcaaacggcaaccccgtaccgtatttatggggggcagcgcttcttcgaccgccaggaaattaaagactcactggcttatctgcgcctgatctccaatcgtaatgacgacgccgcgtttgaacgggtggtgaatacacccactcgggggattggcgatcgcacattggatgtggtgcgtcaaaccgcccgtgaccgccagttaacgctatggcaatcaacccgtgccatgttgcaggaaaaagtgctggcagggcgtgccgcgtccgcattacaacgctttgtcgagctgatcgattcactggcgcgcgaaacggctgatatgccgctacacgtgcaaactgatcgcgttattcgtgattctggcttgtggtcgatgtacgaacaggaaaaaggcgagaaaggtcaggcacgtatcgagaaccttgaagagctggttacggcgacccgtcaatacagctatcaggatgaagatcaggatctgatgccgctacaggccttcttatcccatgcggcactggaagccggagatggccaggccgatgcctatcaggatgcggtgcaattaatgactctccattcagcgaaaggcttggagtttccacaggtatttattgtgggaatggaagaagggatgttcccgagccaaatgtcattggatgagggggggcgtttggaagaggagcggcgtttggcctacgtggggttaacccgtgcgatgcagaaactgacgttatgttacgccgaaagccgccgcctatacggtaaagaggtcaatcaccgcccttcacgctttatcggcgaactgccgcaggagtgcgtcgaagaggtccggctgcgcgccagtgtttcccgcccggtgaatcaccgccgaatggggactccgatgcacgagaatgacagcggtttctcattgggccagcgagtgcggcaccctaaatttggcgagggtactattgtgaatttggaaggcagtggtgagcacaaccggttgcaggttgccttccccggagaggggattaagtggctggtcgcggcctatgcgcgtctggaacccgtgtaa

SEQ ID NO: 41850 - DNA, 717 bp, Yersinia pestis
atgcatttttatcgtccacttgagcgtatttccgctattaccttcgatttggatgacacgttgtacgacaatcggccagtgatcgcgcggactgaacagcagtctgtggcttttttacaacagtatcatcccaatttagccctattacagccagcggatttccagcgcttacgtgctgaattattggcacaagatcccggtatctaccacgatgtcacgcaatggcgctggcaggcgattgaactgggcttgatgcgccatggcctgagtaaggcagaggcgcaagcgggagcggatgcggcgatggcaaactttgcgctatggcgcagccgtattgatgtgccgcaagccacacacgatacactgagcgcattagcggagcattacccactggtggccatcactaacggcaatgctgatcctaaagcttgcgggttggatcgctattttcaatttgtcttgcgctctgggcctcatggccgcgccaagccattccgcgatatgtatcataaagcggcgaaccatttggatattccgttaaaacatattctgcatgttggcgatgacctaacgacggatgttgccggctcactgcgctgtggtatgcaagcctgttggattaacgataggcaacaaaacctgatgactgcccgtgatagccgtttactgccacatattgaaatttcccagttggcatccctgacagcattgctataa

SEQ ID NO: 41851 - DNA, 912 bp, Yersinia pestis
atgaccgagttcagtgcttcactggctccgcaggtagaggcttttctccgttatctcagtattgagcgtcagcttagtccactgaccgtcaccagttatcgccgtcagttgtctgcgctaatggaaataggcgaacagatgggcttggctcactggcagacgctggatgctgctcaggtccgttcgttggtctcccgcagcaaacgtgcgggtttacatgcttcaagcctggcattacggctctccgcattacgcagttttctcaactggttggtcagccagggcgtgctgccagccaaccccgctaaaggggtcagtacgccacgctcgggccgccacctgccaaaaaatattgatgttgatgaagtcaataaactgctgagtattgatctgaatgatccgctggcggtacgtgaccgggccatgctggaggtgatgtacggcgcggggctgcgtttatctgaattggttggcatgaactgtaaacatgtggatctggcgagcggcgatgtctgggtgatggggaagggcagtaaagagcgcaaggtgccgttaggtaaaacggcggtgacctggttacagcattggctggcgttacgtgagttattcgaaccgcaagatgacgctatttttctggccaataccggcaagcgtatttcagcccgtaatgtgcagaagcgctttgccgaatggggggtgaagcagggggtcagtagccacattcacccacataaattacgtcactcttttgccacgcacatgctggaatccagtggtgatctacgcgcagtacaagagctactgggccatgccaacctgaccaccacgcaaatttatacacatctcgactttcaacatctggcgacagtgtatgatgctgctcatccacgggccaaacgaggcaaatcctga

SEQ ID NO: 41852 - DNA, 864 bp, Yersinia pestis
atgatccgcagcatgaccgcctacgctcgacgtgatattaagggtgaatggggcaacgcagcctgggagctgcgttccgttaaccaacgctatttagaaacgtacattcgcttaccagaacaattccggagtctggaaccggtgatccgcgaacgtattcgcagccgtctgacacggggaaagattgaatgtcatttacgttttgagttggatgccaacgcacaaagctctttgatcctcaatgaaaaactggcgaagcagttagttgaagccggtaattgggtcaagatgcaaagtgatgaaggcgaaattaacccagtagatatcctgcgctggccaggggtaatgtctgctgaggaacaagatttggatgcgattagcaccgagttaatgcaggcgctagataccgccctagacgattttattgtttcccgagaaactgaaggggcagcactgaaaacgcttatcgagcagcgtttagagggggtcagcgctgaagtggttaaagtccgcgcacatatgccaaatatcttgcagtggcaacgtgagcgcttactgaacaaactggaagaagcgcaagttcagttggaaaatactcgtttggagcaggagttagtgctaatggcacagcgtatcgatgtggccgaagagctagatcgtttggaagcgcacgtcaaagaaacatacaacattctgaagaagaaagaagccgttggccgccgccttgattttatgatgcaagaattcaaccgcgagtcgaatacgctggcatcaaaatccatcaatgccgaggtcactaactccgctatcgagttaaaggtgttgattgagcagatgcgcgaacagatccagaacatcgagtaa

SEQ ID NO: 41853 - DNA, 648 bp, Yersinia pestis
atgaaagcctatcagcgcgagtttatcgagtttgcgcttaacaagcaggtgttgaaatttggtgaatttaccctgaagtctgggcgcattagcccttatttcttcaatgccgggttgtttaacaccgggctggatctggcgaaactgggccgcttttatgctgctgcattaatggattgtggcgtcgagttcgatctcctgtttgggcccgcctacaaaggtatccctattgcgacaacaaccgccgtggcattggcggagcatcatgagcgcgacgtgccttactgttttaaccgtaaagaagcgaaaactcacggtgaaggtggcaatcttgtcggtagcccattacaagggcgggtgatgctagtggatgatgtgataaccgccggtaccgctattcgtgaatcaatggagattatcaatgcgcagggcgcgaccctcgcaggtgtgatgatttcactggatcgccaggagcgtgggcgtggtgagatttcggcgattcaggaagttgaacgtgattatcactgtaaggtcattgctatcgtgacgctgaatgatgtgattcgctatctggaagataagccagagatggctgagcatttggtggcagtgcggcagtatcgcgagcaatatggggttaccctttag

SEQ ID NO: 41854 - DNA, 1176 bp, Yersinia pestis
atgaaaacattacgggaatttagagctaaggtatcggtacccatttttcttgccattttggtggcaattaacgggtatctgattttaagcccgctactctatcgggcgattgcacattcaagcgatgcaataaataacttcaatacttggaaggaggcgttaagttttctggaattattcgaaatcccgcaatttatgatcggtctggtcttgatgttgatggcatatgcactatcaatgaaaacccgtacagcatggtttttatcggtattgctgctatttactcttgttgccatcaatatttttatcgcgaaaaaatatgatagcctgacgatttactccatcgtgattatcttagcactgctcttttattggcggcggtttgattattacagtcttggcagcggtacattctttgctgttgtgagtatcgcttcattaatcgtctatagcatgttgggtacgctctatatgggtgatgaatttgcccccgtagtgactgatttatctacagcattctatttcgcgatagtgtgtatgtcgacggtggggttcggggatattatcccgcataccactgtggcgagaatgtttactcttacggtgattattgctggtataactgtttttgctacctcagtggcttcgattgccggcccgatgatcagtaataatatcaaacgcatagttaaaggtaggatttctcacgtggaacgtaaaaatcattttattattgtcggtaccaactctttggcactgaatgtatataaaggtctgcgtgaccggggtgatgatgtcactgtggtttgtgcggtaggtagccaacatgatttcccttccgatgctgatattatcgagggtgacccttcttctgttgccacgctaaaattagccggtgcggcgaaggcaaaatatattatcgtgttgtgtaacaatgatgctgataacacctttaccattttagcggctaaagaaatttcgggtgaggggacgaaaatactggcattagtcaatgaaactcagaatatagaaaaagttaaaagagtcaatccagacatggtcttctctttgccattgttaggcagtgagttactggtcaggactctgaatggcgataccatcaataatacccttattacggaaatgttctttggtcattgccagaaactggattga

SEQ ID NO: 41855 - DNA, 942 bp, Yersinia pestis
atgttagacaaaattattcgaattgccacacgacaaagcccgctcgccttatggcaagcacattatgttcaacatttattgcaagccaatcaccctggtctgcaaatcgaactggtcccaatggtcacccgtggggatatcattttggatacaccattggccaaagtcggtggtaagggtttatttgtcaaagaattagagctggcgctgctggacggcagagctgatattgccgtgcattcgatgaaagatgtgcccattgctttccccgaagggctgggtttagtcacgatttgtgaacgtgaagacccgcgcgatgctttcgtctcgtcacattatgcccatctggatgatctccctgcaggcagtgttgtcggtacctccagcctgcgccgccagtgtcagctacgcgaacggcgaccagacctgattatccgcgatctacggggcaacgtcggtacccgccttgccaaactggataatggtgactatcaggctattattctggctgtcgcgggtctcaagcgcctcggtctggaaaaccgaattcgctatgccatgtcagcggaggagtccctcccggctgtcggccaaggtgccgtaggtatcgaatgccgtctggatgatgaccatacccgccagttgctggctccgttgaaccatcggcacaccgaattacgggtctgtgcggagcgggcaatgaatattcgccttgaagggggttgccaagtcccgatcggtagctacgctgaactggaaggtgatactttatggctacgggcgctggtgggagcacctgatggcagccaaatgatccggggtgaacgccgtggtccggcggcagaggctgagcagatgggcattgaacttgccgatgagttgctatcacgcggcgcacgagaaatcctggcggcggtttatctggataatcctgcgcgatga

SEQ ID NO: 41856 - DNA, 1362 bp, Yersinia pestis
gtgagcacatttattacgtcgttggagaaggtcatattacccttcgccattagaattggcaggcagcaacacgttaatgccatcaagaacgggtttatccggctgatgccattaaccctgactggggccatgtttgttctaattaataatgttttcttaagtttcggtgaagggtcgttcttcttttcaatgggtgtgcgattagacggcgataccattaccatgctaaatggttggaaagccatcggtggtaacgtttataacggaacgctcgggataatgtcgttaatgacgccattctttatcagtatggcactggccgaagagaagaaggtggatccactctctgccgccttactggccatcgcagcctttatgaccgtgaccccgttcagtgttggcgaggcctatgcggttggtgccaattggctcgggggggccaatatcatctcgggtatcatcatcggtctggtggtggctgaagtattcactttcattgtccgacgtaattggattatccgtctgccagatagtgtacccacttcggtttcccgttctttctcggcattgattcctggctttatcattctttccatcatgggcctgatttcatacactctggcgctatatggtactaatttccatcagatcattatcgattccatctccgccccgctgtcgaaaatgggcagtgtcgtggggtgggtgtatgtgatgttctcctctctgctgtggttcttcggtgtacatggtgccatggccttgtctgcgctggaaagtggcatcatgatgccgttcgcgttggaaaacgtggcaacctatacccaatatggttcggttgaggccgcactggctgcgggtaaagagttccatatgtgggcgaaaccgtttgtcgattcctacatcttcttgggcggaaccggtgcaacgttggggcttattattgccatctttattgcttctcgccgtgaagattatcggcaggttgcgaagctggctgctccggcgagtattttccagatcaacgaaccaatcctgtttggcttaccggtcattatgaacccactcatgtttattccgtttatcatggttcagccgatattagccattatcacgtcagtagcttattacagtggccttattcctccgatcaccaatattgctccgtggactatgcccgccgggctaggtgcattctttaacaccaatggtagcattgctgcattattattaagtttgttcaacttgggcgtggcaacactggtttatctcccgttcgtgattattgccaataaagcacagggcgagatcgaccgtactgtcgaaagcgaagacgatattgctaacagcctgaaattctaa

SEQ ID NO: 41857 - DNA, 348 bp, Yersinia pestis
atgtttgatttaagtagcatcgttgataacgaacaaaccagtgatgcgctggaagatgtggtcatggggcttatcatcaacgcgggccaagcccgtagcctggcctataacgcactgaaacaggccaaagccggtgattttgcacaagcagatgaactgatggcgcagtcccggagcgccttgaatgacgcccacttggtgcagacacaattgattgaagccgatcagggcgaagggaaaaccaaagttaccctggtgctggtacatgctcaggatcatttgatgaatgccatgttagcgcgagaattgattactgagcttatcgagctgcatcaaaaaattcagtga

SEQ ID NO: 41858 - DNA, 318 bp, Yersinia pestis
atggctgagtggaacggcgagtatgtcagcccttacgctgaacacggcaagaaaagcaagcaggtcaaaaaaatcacggtatccattccgttgaaagtgttaaaaatcctcaccgatgagcggacccgccgtcaggtgaataacctgcgccatgctaccaacagtgaattgttgtgtgaggcctttttgcatgcatttactggccagccgctaccgaatgacgaagacctgcgtaaagaacgcagtgatgagatcccggaagccgcgaaaattttaatgcgtgaattgggtgttgaccctgacacctgggaatattga

SEQ ID NO: 41859 - DNA, 669 bp, Yersinia pestis
atggatgagtggtatgggcaggtggccccaagagagaaattactgaagtatggtgctgcggtactgactgatgctgaactactcgctatttttttgcgtacgggtattcctgggatgcatgtgatgaagatggctgagtatttaattgagacatttggctcactgcatgggttgatatctgcagattatcaaacgttatgtgcccataaagggattggtgcatccaaatatagtcagattcaggctatcggtgagctggcctgtcgttgtttttcatctcatctgatgcgggaaagtgttctgcttaaccccggtatcacacaaaaatttctgcaaaatatactgtctcaccgtgaacgagagatttttttagtcgtatttttggataaccagcatcgtgttattcgccatgaagagatgtttactggtaccatcagcagcgtagaggtccatccgagagaaattgtgcgtgaagcgctgaaggttaatgccgccgcgctgattttggcgcataatcatccctctggtaaggctgaaccgagccaagctgaccgtttgataacgacgcaggtgataaaagcctgttcattattagatattcgggtgctcgatcatttagtagttggccggggtgaatgtgtctcatttgctgaacgaggatggctttag

SEQ ID NO: 41860 - DNA, 237 bp, Yersinia pestis
atgtcccgagtctgccaagttactggcaagcgcccgatgagcggtaacaaccgttctcacgcaatgaacgcgaccaaacgccgttttctgccgaacctgcactctcaccgtttttgggttgagggcgagaagcgctttgtaactctgcgtgtatctgctaaaggtatgcgtgttattgataaaaagggtattgaaacggtcttggccgaaattcgtgcccgcggtgagaagtattaa

SEQ ID NO: 41861 - DNA, 168 bp, Yersinia pestis
atggctaaaggtgttcgcgagaagattaagctggtttcttctgctggtactggtcacttctataccactacgaagaacaagcgtactaagccggaaaaattggaattgaagaaatttgatccagttgtccgtcaacacgtactctataaagaagctaaaattaagtaa

SEQ ID NO: 41862 - DNA, 810 bp, Yersinia pestis
gtgcctgaattaccagaagttgaaaccagccgacgcgggatcgaaccttatcttgtcggccagacaatcctttatgctgtggtcagaaatgcccgtttacgctggccggtatccgatgaaattctaacacttagcgatcaacccgtactgagtgtccaacgccgggcgaagtatttactgctagagctgcctaaaggctggatcatcatacatttaggtatgtcaggtagcctgcgcgtattatctgaagagactgcagctgaaaagcacgatcatgtcgatttggtggtcagtaacggaaaaatattgcgttataccgacccacgacgttttggtgcctggttgtgggcgaaagaccttgagaccagtaatgtattagcccatttagggccagaaccactaagtgatgaatttactgcgcaatatctgttcgataaatcacgtaataaacgcacattgattaaaccgtggttgatggataacaaagtggtcgtcggagtgggtaacatttatgcgagcgaatcactgtttgctgctgggattttgccagatcgtgccgcaggctcattgactgacgctgaatccgtattgctggtagcaacgataaaagccgtgttattgcattcgattgagcagggcggcaccacattacgtgattttctgcagtcggatggtaaaccagggtatttcgcgcaagagttgcaggtctatgggcgtgcgggtgaaccatgtcggcagtgtgggcatcccattgaaatagcgaaacacgggcagcgcagcacgttcttttgccgccactgccagcattga

SEQ ID NO: 41863 - DNA, 741 bp, Yersinia pestis
atggaacccaatactgtcattccaaaatataatgtccgtggctttgaaatctggggttttcgtgacatggctcaggtgctggatcatctactgggcagtgggccggtaaaaacgggcaccttggtggcgatgaatgcggaaaagctattaaaagccgaagatgatactgcactgtgtgaactgatcaagaacgcggagtatctgtacgcagatggcatcagtatggttcgggctatccgccgtaaatatccgcaggccgagctatcacgcgttgcgggtgctgacctctgggaagccctgatgcagcgcgctgggcagcaagggacaccagtatttttggttggcggtaagcctgatgtattggctgaaaccgaggcgaaattgcgtgcccaatggaacgtgaatttagtcggtagccaagatggctatttcacaccggagcagcgtgaagccctgtttgcccgtattgccgccagtggtgcagcaattgtcactgtcgccatggggtctcctaaacaggagatcttcatgcgtgactgccgtaaattttaccctgatgccctgtatatgggggttggcggcacttacgatgttttcaccagccatgtcaaacgtgcccccaaaatttggcagaatatggggctggagtggttataccggttgctggcgcaacccagccgcattcgtcgtcagcttaagctgcttaagtttgttggttattattatagtggtcgtctgtag

SEQ ID NO: 41864 - DNA, 1365 bp, Yersinia pestis
atgacgctggggcaatttggcggtctattttgtatttatttgatagcagtcatttttattctgacactaacctatcaggaatttcggcgggttaagtttaactttaacgttttgttttcaatgctttatctgttgaccttctattttggtttcccactgacttgtatgctggtgtttcagtttggggtggcggtggtgccggttgagtatttgttgtacgccatgctgtctgctacggccttttatggcatttactatgtcacctataaaacacggttacgtcagcctcgtagccagccgcgcacgccaatattcaccatgaaccgggtagaaactaatctgacctgggtgctgctggcactggtcgcggtagggaccgtcggcatcttctttatgcaaaacggtttcttgctgtttaagctggattcctacagcaaaatattctccagtgatgtctctggtgtcgccctgaagcgttttttctacttctttatcccggcaatgctggtggtttatttcctcaaacaggatcggcgggcctggttcttcttccttgccagcacggtggcgtttggcattctaacttatgtcatcgttggtgggacgcgtgccaatatcattatcgcattctcattgttcctgtttatcggtatcgtccgtggatggataaccctgtggatgctagcggcggcaggtgtcttcgggattgtcggtatgttctggctggcccttaaacgttatggcctggatgtgaacggtgcagaggcattttacaccttcctctatttgacgcgggacaccttctcgccctgggaaaacctcgggttattgctacagaactacgacaaaatagatttccaggggctggcaccgattgtccgtgatttttatgtctttattccaagcgcgctgtggccagaacgcccggatttggtactgaataccgccaattactttacctgggacgttttggacaatcactctgggctggctatctcgccaacgctgattggttctctggtggtcatggggggggtattgtttatcccgctgggggccattgttgtggggcttatcatcaaatggttcgattggttgtatgaacaaggcaaggccgagagtaatcgctataaagcggcgatcctgcaaagcttctgttttggggcggtgtttaatatcattgtcttggcacgtgaagggctggattcctttgtctcacgagtggtatttttctgcgttatctttggtgcctgtctggtactggcaaaattgttgtactggttgttcgatacggcgggcttgataaagcgtcaggggattaaatccaaccgattatcaacgcctaacgcgggcaatcaactgtaa

SEQ ID NO: 41865 - DNA, 966 bp, Yersinia pestis
atgcacgtattaatcgttaaaacctcgtcaatgggcgatgttttacataccttacccgcgctgacggatgccatgaatgccatacccggtattcgcttcgattgggtggtagaagaagggttcagccaaatccccagttggcatccggcggtggataaagtgatcccggtggccatccgccgttggcgtaaaaactggtttggtagtgatacccggcaggaacgctgtgattttaagcgtgtggtacaacaacgcagttatgatcgggtcattgatgcccaagggttgattaaaagcgccgcgctgataacccggattgcgaaaggcacgaagcacgggccggattgtaaaagtgcccgtgagccgtttgccagttggttttataactgccgccatgaaattgataccaaacaacatgccgtagaacgtatacgtcaactgtttgctaaaagcctcggctatgataaaccggaaagttatggcgactatgccatcgcacaacgctttttaaatcagttaccggccgatgcaggtcagtacttggttttcctacatgcgacgacccgtgacaacaagcactggcccgagagccattgggtacaattgattgagttagtgcaacccacaggtttaaaaatcaaactaccgtggggcgcagaacatgagcatcagcgcgctttacgattagcggaacatttcccacacgtagaggttctgcctaagctcagtcttcagcaggtcgccgaggttctggcgggtgcaaaagccgtagtctctgtcgatactggcctcagccatctgaccgccgccctggatcgcccaaacattacgctgtttggccccactgaccccggtttaatcggcggctacgggaaaaaccaaattgccgtgatttccgagcaaaaaaagatggatagcctctctgcgcccactattatggcacgattagaaacactcatttcatag

SEQ ID NO: 41866 - DNA, 1386 bp, Yersinia pestis
atgctaaagatttttaatacactgagtcgccaaaaagaggaattcaagcctatccatgccggtaaagtgggtatgtatgtatgcgggatcactatttatgacctgtgtcacattgggcatgggcgcacttttgtcgctttcgatgttgtggcgcgttatttgcgttatttaggttactctctgacgtatgtccgcaatgtcactgacgttgacgataagatcattaaacgtgcgattgagaataatgagacttgtgagcaactgacaacgcggatgctggcagagatgcacaaagattttgacgcattaaatcttgagcgccctgatttggagccgcgtgcgactcaccatatcgctgaaataattgagatgaccgagcgcttaattgctcggggccatgcttatgttgcctctaacggcgatgtgatgtttgcggtcgatagcgatcctgattacggtgtgttatcccgacaggatctggatcaactacaggccggtgcacgggttgaagtggctgatgttaaacgtaatccgatggatttcgtgctgtggaaaatgtccaaaccgggtgagccacgctgggaatcaccttgggggccgggccgccctggttggcatattgaatgttcagcaatgaacggcaaacagttaggcgcgcattttgatattcacggcggcggctctgatttgatgtttccgcaccacgagaacgagatcgctcaatctacctgcgcacacgatggcccgtatgtaaattactggatgcactctggtatggtgatgatcgacaaagagaaaatgtcgaagtccctgaataacttcttcactattcgcgatgtgctggcgtattacgatgccgaaaccgtgcgttatttcttgatgtccggtcattatcgtagccagcttaactacagcgaagagaatctgaagcaggcacgcgcttcactggagcgtttatataccgcgctgcgcggtactgatgctaacgctacgccagcagggggcgctgaatttgaagcccgtttccgcacggcaatggatgatgatttcaatacaccagaagcctattcggtgctgtttgacatcgcccgcgaagtcaaccgcctgaaaaacgaagatatggccgctgccaatggtctggccgctgagttacgtaaattggctcaggtgctgggcttattagaacaggacccagaactgtttttacaaggcggtgcgcaggctgatgacgacgaagtagcaaaaatcgaagccctgattaagcaacgtaatgatgcccgcagcagcaaaaattgggcgttggcagatgccgcacgtgatcaattgaatgaactgggtattgtgctggaagatggcccgcaaggcacgacatggcgccgcaagtaa

SEQ ID NO: 41867 - DNA, 2727 bp, Yersinia pestis
atggtggatgcagaaccaacccgtccgaaccccgatagcctgttagccgtggcgaatgaaaaacctcgtggccggttaaaagtcttttttggggcctgcgccggggtaggtaaaacctacgccatgctgcaagaggcgcaacgcttgcgcgctcaagggttagatgtgctggtcggggtggtggaaacgcacgggcgcagtgaaaccgccgccttacttgaagggctaaccgccctccccctgaaacgcatccaccaccgtaaccgccagatacgtgaatttgatttagatgctgcgctggcccgccgtcccgcgctgatcctcatggatgaactggcgcacagtaatgccaatggctcccgccatcccaaacgctggcaagatgtcgaagagctattggatgcaggcattgatgtgctgaccaccgttaatgtgcagcatttagaaagcctgaatgacgtggtcggcggtgtgaccggtattcgggtgcgtgaaaccgtgcccgaccatatgttcgacgaagccagcgaagtggttttagtcgatttaccccccgatgatctgcgccaacgcctcaatgaaggcaaagtgtatatccccggccaagctgagcgcgccatcgaacattttttccgtaaagggaatttaatcgccctacgtgagttggcgctacgccgtacggccgatcgggttgatgatcaaatgcgcgccttccgcgatacccaaggacgtgaacgggtttggcatactcgcgatgccattttgctgtgtatcggccaccacgcgggtaatgaaaagttagtgcgtaccgccgcccggttggccgcccgcttaggctgcatctggcatgcagtctatgttgaaaccccccggttgcacggcctgccagaggctaaacggcgcgctatcctgcgcacccttaaactggcacaagagttaggcgcggaaaccgctaccttatcggaccccagtgaagaacaggcggtattgcgctacgcccgtgaacacaatctggggaaaatcattattggccgccgcaccgagcaacattggaaactgcgaggcagttttgccgatcgcttaggtaagctggggccagatctggatttggtgattattgcactggatgccgatccgccaaccaatgtcgctaaagaaccagactcgcgccccttcaccgaaaaatggcgtatgcagctacggggatgtgtcgccgctatcgccctatgtgcgctgatcaccgtgctatcgttgtggttgatcccccgtttcgatcaagccaatctggtgatggtttacttgttgggcgtggtgattattgccctgttttatggccgctggccttcagtgctggcggcggtgattaatgtcgccagcttcgatctgttttttgtccaaccgcactggtcattagccgttaccgatgtgcaatatttgctgactttcggtgtgatgctgattgtcggtatcgtggtggggaatctgaccgctggggtgcgctatcaggctaaaattgcccgttatcgggaacaacgggccagacatctgtatgaaatgtctcgcagtttaagccgcgctctgacaccggaggatattgccaaaaccagccgccattttctttccagcagttttcaggccaaaaccagcctgctactgccacaggaagagggccatttacagccaataatgcccgatgacgggggcatcctgtccgttgatgatgccattgcccattggagttttaatcagggtgcccctgcaggagcgggcaccgataccctgccgggcgtgccctaccaactgctgccgttgacagcggctcaacagacctacggcgtgttggcgattgaacccgctaacttacgccaactgatggtgccggagcagcaacggctgttgcaaacatttaccagcctgattgccaatgcattggaaaggctacatctggcccgcagtgctgaactggcaaaactggatgctgaacgggagcaattgcgtaattcgctgctggcggcattgtcccatgatttgcgtaccccgctcaccgtgttattcggtcaggcagaaattctgacgctggatctggccgccgaaggttcgcgccatgccccgcaggctaaccaaatccgccagcaggtcttgagcaccacccggttggtgaacaatctgctggatatggcgcgtattcagtctggtggttttaatctacgtaaagagtggcaatcgctggaagagattattggcagcgccctgtatatgctggaaaccaccttaagtcagcatcagatacgcgttgaattgccggatgaaatggtgttgatcaattgcgacgcaagcttgctggagcgggtctttatcaacctcctggaaaatgcccataaatatgcaggtcacgccgccttgttgggtatccgggcggaagtgcaaggcgagtggttaaatgtggacgtgtgggataatggccccggagtcaccatcggtcaggaaaatcttatttttgataagttttcccgcgggaataaagagtctgccattccgggtgttggcttgggtttagccatttgtcgtgccattattgatgtccacggcgggcgtatctgggtggagaagcgtcaagagggcggagccagcttccgttttgttttgccactggaaaaagtgccggaaattgatgccgacaatattgataccaacaatattgatactgaaaataatgatatatcctga

SEQ ID NO: 41868 - DNA, 603 bp, Yersinia pestis
atgtcctacctacggccagcgctggttttactgatattactgacactgatcaccgggatagcttatcctctgctcaccaccgggttagcgcacttgatgttttcacagcaagccagtggttcactggcgcgactgggcgataacgttgttggctccactttaattggtcaaaactttactcaaccgggttattttactggccgcccatcagccaccgcagataggccttataatccaatggcttcaggtggcagtaatttggcaagcagcaacccggcactgggccaggctatcggcgaacgagttaaattgcagcgtcaggctaatcccacccaattgggtccagtaccggtggatttagtcaccgcctccggcagtggtctggatccccatatttcactggcagcggcttattatcaggcaccgcgtattgccagtatccgtcagatgccgctgtctgatgtccagcaattgattgataacagtatgcaaaaagcgatacccagtttctttggcgagcccgtcgtcaatgtgctgaatttaaatatggcgctggatagccacagccacgtaaaagtccccgccaacccggcaaaaccgtaa

SEQ ID NO: 41869 - DNA, 2067 bp, Yersinia pestis
atgactcacaaacaacgcgcgatttttgagcctgcactggttcgcactgcgcttctcgatgcagtgaaaaagttggatccgcgcgtccagtggcgcaatcccgtcatgttcgtggtgtatttgggcagttggctgaccaccctgatctggctggacatattaagtgggcacaccacgggcagcgccatgtttaccggcagtatcgctttatggctatggtttaccgtgctgtttgccaacatggccgaagccttggccgaggggcgtagcaaagcgcaggccgccagtctacgcggggtgaaaaaaaccagttgggctaaaaaactgtccgaggcccgtgttgatgcaccacaagaaaaagtctctgccgacagtttgcgcaaaggcgacctggtgttgatcgaagccggtgacacggtgccgtgtgacggcgaagtgctggaaggcggtgcgtcggtcgatgaaagtgccattactggcgaatctgcgcccgttatccgtgaatccggtggcgacttctcgtcagttaccggcggtaccagagtattgtccgattggctggtggttgaatgtcgcgttaaccccggcgagaccttccttgatcggatgattgccatggtcgagggcgcaaaacggcgcaaaactcccaacgaagtggcgctgaccatattgttggtggcactgactatcgtctttttactggcaacagcaaccctgtatccgttctctgttttcagcgtggaggccagccaagccggtagcccggtgaccatcaccgtgctagtcgctttattggtttgcctgatcccaaccacgatcggcgggttgttgtcagccatcggggtggccgggatgagccgcatgttgggggctaacgtgatcgccacgagtggccgggcggtggaagctgccggtgatgtcgatgtgctgctgctggataaaaccggcaccattaccctcggtaaccgccaggcctccgagtttttacccgctcccggtgtcaccgagcaacaactggcggatgccgctcagctttcctcgctggcagatgaaacgccagaagggcgcagtatcgtcgtgctggctaaacaacgttttaatttacgtgaacgtgatctgcatagcctgaatgccacctttattcccttctcagcacaaacgcggatgagcggtgtcaatgtacaggagcggatgatccgcaaaggcgcggtagacgctatccgccgccatgtggaatccaatcagggccacttcccacccgccgtggatgatttggtcgccagtgtcgcccggaccggcggtaccccattggtggttgccgagggatcacgcgtactgggcgtggtggcgttaaaagatatcgtgaaagggggcattaaagaacggtttgccgaactgcgcaaaatgggcattaaaactgtgatgatcaccggtgacaatcgcctaaccgcagcggcaattgccgctgaagctggcgtagatgattttctggccgaagcgacacccgaggccaagctggcactgattcgccaatatcaagccgaagggcggctggtggcgatgaccggcgatggcaccaacgatgcccccgcactggcacaggctgatgtcgcggtagcgatgaactccggcacacaggcggccaaagaggccggtaacatggtggatctagactcgaacccaaccaagttgatcgaagtggtgcatatcggtaagcaaatgctgatgacccgtggttccctgaccaccttcagtatcgccaacgacgtggcaaaatatttcgccatcattccggctgcctttgccgccacgtatccgcaactcaatgcgttgaacatcatgcagttgcattcaccgtcttccgctattttgtcggcggtcatttttaatgcattggtcatcgtgtttctgatcccgctggccctaaaaggtgtcagttataaagcgatgagtgcggccgccctcttacgccgtaatctgtggatttacggtttgggtggcttactggtgccgtttgtcggtatcaagttgatcgacctgctgttaaccgccctgaatatgggctag

SEQ ID NO: 41870 - DNA, 1212 bp, Yersinia pestis
atgtccctaccttgtaacaagcaccccttttatcagcaattagaacaacaactcgacacgactcgtaccgaagggttgtataaaaacgaacgcgttattacttccgcacagcaagcgaatatcgctgttgctgatggcagccgggtgattaacttttgcgccaataactatctagggctggcaaatcatccaaaacttattgcagccgctaaagccggcatggattcccatgggtttggcatggcttcagtccgctttatctgtggtacccaagacatacataaagagctcgaacataagctcgccagtttcctcgggatggaagacgctatcctgtactcctcttgctttgatgctaacggcggcctatttgaaaccctgttagggcctgaagatgccattatttccgatgcgttgaatcatgcctcaatcattgatggcgtacggttatgtaaagccaagcgttatcgttatgccaacaatgatatgacagagctggaagcgcagctaaaacaagcgaaagcggagggggctcgccatatcatgattgccaccgatggcgtgttctccatggatggtgtgattgctaacttaaaaagggtgtgtgaccttgctgatgaatatcaggcgctggttatggtcgatgattcacatgcggtgggggtgattggtgcgaatgggcgggggactcatgaatactgcgaagtgatggatcgcgttgatatcatcactggtaccttgggcaaagcactcggcggtgcatctggcggttatactgccgggcgcaaagagttggtcgagtggctgcgccagcgttcacggccttatctattttcaaactcactggctccagcgattgtcgccgcgtctattgaagtcttgtcactgctggaagagggaggggcattgcgtgatcgtctatgggcgaatgcgcgtttattccgtgagaaaatgagcgcggctggtttcactttggcgggtgctgatcatgccattattcctgtcatgttgggtgaggctaaactggcgcaggattttgccaatgccttgctgaaagaaggcatttatgtcactggcttcttcttccctgtcgtgccgaagggccaggcccgtattcgtacccagatgtctgcaggccataccactgagcaagttgaacgtgccatcgaggcatttgtgcgtattggtaagcaacttaacgttattgcgtaa

SEQ ID NO: 41871 - DNA, 1026 bp, Yersinia pestis
atgaaagcactttctaaactgaaagcagaagaaggcatttggatgaccgatgtgccacagccagagctgggtcacaacgatatcatgatcaaaattcgcaaaacggctatctgtggtactgacgtacatatttataattgggatgaatggtcacaaaaaaccatccccgtacccatggtcgttggccatgaatatgtcggtgaagtggtggccattgggcaggaagttaaagggtttaatattggtgaccgggtgtctggtgaaggccatattacctgtggtcactgccgtaactgccgtggtggtcgtacccacctttgtcgtaatacggtgggtgttggcgtgaatcgccctggttcgtttgccgaatatttggtgatccctgcttttaacgcgttcaagatcccagacaatatttctgatgagcttgcggctatttttgaccccttcggcaatgcagttcataccgcgttatcttttgatttagtcggcgaggatgtgttggtctccggggctggcccaattggtattatggccgccgcagtctgtaagcatgtgggtgctcgtcatgttgtcatcgctgatgtgaatgaatatcgcctggatctggcccgtaaaatgggcgtgacccgtgccgttaacgtcagcaaagagaacctaaatgacgttatgacggaattgggcatgaccgaagggtttgatgtgggcttggagatgtcaggtgctcccccggctttccgttcattacttaattcaatgaatcatggtggtcgtatagcgatgctgggaataccgccgtctgatatgtcgatcgactggaatcaggttatctttaaggggctgtttataaaggggatttatggccgtgagatgttcgaaacctggtacaaaatggccgcgttgattcaatctggtttggacttaactccgatcattacccaccgtttccctattgatgaattccagcaagggtttgacgccatgcgttcgggtaaatcaggcaaagtggtattaagctgggattag

SEQ ID NO: 41872 - DNA, 1131 bp, Yersinia pestis
gtgaaagtgttgactgtttttggcacccgtcctgaagcgataaagatggctcctctggtgcatgccttggctcaggatgacgcctttgaatcgagagtctgcgtaacggcccagcatcgtgagatgctggatcaggtattgcgtttatttgagattcaaccagattatgatttagacatcatgaggccaggacagggattgacggaaataacctgccgcattctggaagggctaaagccggttctcgaagagtttaagccggatgttatcttggtgcatggcgataccacaaccacactgtcggccagtctggccgggttctatcaccgcatacctgtcggccatgtcgaggctgggctgcggaccggggatctctattctccatggccggaggaagctaaccgtcaactgactgggcatcttgccatgtatcattttgcgccgaccgagaattctcgacagaatttgctacgtgaatgggtgccggagaaccgtatttttgtcacgggtaatacggtgattgatgcgttgttctgggtccgtgatcgggtgatgaatacccctgatttgcgagcaaacttggcacaacgttacgccttccttgataccaataagaagatgattctggttactggccatcgtcgtgaaagctttggtggtggttttgagcggatttgcagtgcgttagcggaaattgcccggaaacatcccgaggtgcaggttgtttatcccgtgcatcttaaccccaacgtcagcgagccggtaaaccgtatcttgaaggggattgataatattattctgatcgatccgcaagactacctgccatttgtttacctaatgaatcatgcgtatctgatcctgactgactcagggggtattcaggaagaagcgccgtcattgggtaaacctgtcttggtgatgcgtgacaccaccgagcgcccggaagccgtagattctggcactgtgctgctggtggggacaaatattaataaaattgttgatgcagtaacccgcttgctgactgatgagacggcttatcatcaaatgacccgggcacacaatccttacggtgacgggtatgcctgtcaacgcatccttaaagctttaaagaatcatcaggtgacgctatga

SEQ ID NO: 41873 - DNA, 993 bp, Yersinia pestis
atgagcctgaccggaactgaaaagagcgccattatgctaatgacgttgggtgaagaccacgccgcagaggttttcaagcacctctcctcccgtgaggtgcagcaactcagtaccaccatggccagtatgcgtcaggtttctcatcagcaattggtcgatgtcttggcggagtttgaagatgatgcagagcaatatgctgcactgagtgttaacgccagcgactatctgcgtagcgtattgataaaagccctgggagaagagcgcgcctccagtttgttggaagacattctcgaatctcgcgaaaccaccagtgggatggaaaccctcaactttatggaaccgcagatggcggcggatctgatccgcgacgagcatccacagattatcgccaccattctggttcatctaaaacgtgctcaggccgccgatattctggccctgttcgatgagcgcctgcgtaacgatgtcatgctgcgtatcgccacctttggcggtgtccagcctgccgcgctggctgaattgaccgaagtgttaaataacctgcttgatggccaaaatctcaaacgcagcaaaatgggcgggatccgtacagccgcagagattatcaacctgatgaaaacacaacaggaagaaaccgttatggatgcggtacgtgaatacgatggtgagttggcgcagaaaattatcgatgaaatgttcctgttcgagaatttggtcagtgttgatgaccgtagcattcagcgtttactgcaagagatcgacaacgaatcgttgctgattgcgttgaaaggggccgaccaggccttgcgcgagcgcttcctcagcaatatgtccctgcgggcagcagaaattctgcgcgacgatctggctacccgtggaccggtgcggatgtcactggtcgaaaacgaacagaaatccatcttgcttatcgtgcgtcgtttggccgaaagcggcgaaattgtgattggcggcggcgaggatatctatgtctga

SEQ ID NO: 41874 - DNA, 1062 bp, Yersinia pestis
atgtcgactgataaaacagggtctaccaataatgaaccgtctgtggataacgaattagatatccgtggtctgtgtcgtactctatggcgtggcaaggtatggattatcggtatggccattattttcgctgcgattgcactgggagtctcctatctggtgaaacagcagtggagtgcgacagccattactgacaaaccaaccgtcaacaatttgggggggtattattcgcaacagcagtttttacgtaatcttgatatccgtctcaatagcgggcttgtcagtgaacagccaggcatctccgatgaagcttacggtgagttcattactcagttagcggcttacgatacccgtcgtgatttctggctacaaagcgattactacaagcaacggcttgagggagacgctaaggcggatgcggcattactcgatgagctagtgaataacattgttttcacggcgcgtgatgataaaaaaatcccgaatgacagcattaaattgacggcagaaacggccagtgatgcgaataagctactgcgtggttacattgattttgccagtcaacgtgcgtcaagccacctgaatgatgaaattcaaggcgcttgggcagcgcggactcaatcaatgaaagcgcaggttaaacgccaggaagcggtagctcaagcagtctttgatcgtgaagtggcggcggttaagcaagcattgaaagtggctgggcaacaaggtattaccagtagccagacagatacgccagccgagcaattggcagattccaagatgttcatgctaggtaagccgatgcttgaagcccgtttagaaacattactggctactggcccaagttttgatattgattatgatcaaaaccgtgccatgctggcaacattgaacgttggtccgacactagatgataaattccagacttaccgctacttacgtacaccagaagacccggttacccgtgatagcccacgtcgtgtgttcctgctgattatgtggggcgctatcggggcattagtcggtgcgggtgtggtattggttcgccgctccagtaaggcactgtga

SEQ ID NO: 41875 - DNA, 435 bp, Yersinia pestis
atgttgcaagaaattatgcaattcattagccagcatccaattttgagtctggcttgggtgttgttgttcggtgctgtagttttcaccagcttcaaaaattctctttctaaagttaaagaggtcacccgtggtgaagcgacgcgtctaattaataaagaagatgcggttgtggttgatatccgcacacgtgaagattatcgcaagggccatatcgctaactcaattaacctgatcccgagtgacattaaaaatggtaatttgggtgagttggaaaagcataaaacacagcctattattgtggtctgtgcaatgggcacaacgtcccgtgcctcggcagatatgctgagcaaagcgggttttgagcgggtattcaccctgaaagagggtatttccggctggagtggtgagaacttaccactggcgcgcggtaaataa

SEQ ID NO: 41876 - DNA, 1098 bp, Yersinia pestis
gtgaacctactcactatgagtactgaattaatttatatctttctgttttctatggcatttctatttgttgctcgcaaagttgccataaaaattggacttgtcgataaacccaactaccgtaagcgccatcaaggattaatccctctggtggggggaatatcggtattcgcgggggtctgttttgcttttctgattactaatcagcaaattccccattttcgtttatatcttgcatgtgccgggttattggtcttcgttggtgctttagatgatcgttttgatatcagcgtaaaaattcgcgcttttgttcaagcactggtcggcatcgcgatgatggcagtcgcggggctatatttacgtagtctggggcatgccttcggtccatgggaaatggtattagggccatttggttatgtggtcaccctgtttgcggtttgggcggccatcaatgcgttcaacatggttgatggaatagatggcttgctgggtggcctatcctgtgtttccttcggggccatggggattttgttgtaccaaagtgggcagatgtcattggcgttatggtgtttcgccatgatagccaccattattccctatatcttactgaatctcgggttactgggtcgccgctataaagtcttcatgggcgatgctggcagtactttgattggtttcaccgcgatctggatcctgttacaggcgactcagggtaatgctcatccgatcaaccctgtgacggcactatggattatcgccattccgttgatggacatgattgccatcatgtatcgtcgtttacgcaaaggcatgagtcctttctctccagatcgccaacatattcatcatttaatcatgcgggccggttttacctcccggcaagcttttgtcctcatcacactggctgccgcgttgttagccatgattggtgttatcggcgaacggctgacatttatacccgaatgggtcatgttggcattgttcttgcttgcatttctattgtatggctactgcattaaacgggcatggcgggtggcgcgttttatcaaacgtttcaagcgtcggatgcggcgggcatcgaaaaataagcatgaatcttaa

SEQ ID NO: 41877 - DNA, 639 bp, Yersinia pestis
atgatgaacttcaagaacgttttccgctggcatcttcccttccttttactgttgggattattcagtttgcgtgccgccgcaaccgatacactattgattctcggcgacagtttaagcgccggttaccgcctgcctattgcacaggcatggccttcgctattggataaaaaatggcaagccacgccttcattaccgaaggtggtcaatgccagtatcagtggagataccgccgcgcaagggctagcgcgcttacccgctctactcaaacaacatcagccacgctgggtgctgattgaactgggcgccaatgacgcgctgcgcgggtttccgacgcaggacattcaacgggatctgagcgaaattatcaatcagataaccgcagcgaaagcccagccattattgatgcaaatccgtattccccctaactatggccgccgttatactgatgctttcaccgctatctatccacaactggcgcaacagttcgacatccccctactccctttttttatggaacaggttgccgttaagccagagtggatgcaggatgatggtttacaccctaacggcgatgcccaaccgtttatcgcggattggatggcgcaacaactcaagccgttagttgttgatccgaaataa

SEQ ID NO: 41878 - DNA, 249 bp, Yersinia pestis
atggcgaagattgagatgtataccaaagcaacatgcccgttctgtcaccgtgctaaagcactgctgaacgccaagggtgctgctttccatgaaatcgcaatagataatgatccggccaaacgcgaagagatgattgctcgtagtgggcggacgacggtgcctcagatatttattgatgggcagcatatcggtggctgtgatgatttacacgccctggatgcgcgcggtgggctagacccactgctttaa

SEQ ID NO: 41879 - DNA, 1260 bp, Yersinia pestis
atgaatcttaccgaattaaagaatacgccggtttctgatctgataacacttggcgaaaatatggggctggaaaacctggcccggatgcgtaaacaagatattattttctctattctaaagcagcatgccaaaagtggagaagatatcttcggtgacggtgtattggagatattgcaggatggatttggtttcctccgctctgcagacagctcctacctcgccggtcctgacgacatctatgtatccccaagccaaattcgccgtttcaacctccgcactggtgataccgttgccggtaagattcgtccgcctaaagaaggcgagcgttattttgcattgttgaaagttaatgaagttaactatgacaagccggaaaacgcccgtaataaaatcctattcgaaaacttaacgccgttacatgccaactctcgtctgcgcatggaacgtggtaatggttcgactgaagatttaaccgcccgtgtactggatttggcatcgccaattggtcgtggccaacgtggtctgattgtggccccaccaaaagccggtaaaactatgctgttgcagaacatcgcgaccagcattgcttacaatcaccctgattgtgttttgatggtattgctgattgacgagcgtccagaagaagtaaccgagatgcaacgtctggttaaaggtgaagttattgcttctacttttgatgaaccagcatcccgtcacgttcaagtcgctgaaatggttatcgagaaagcaaaacgtctggttgagcataaaaaagacgttattatcttgctggactctattacccgtttagcccgtgcttacaacaccgttgtacctgcttcaggcaaagtattgaccggtggtgttgatgcgaacgcgttacatcgccctaaacgcttctttggtgccgcacgtaatgttgaagagggcggaagcctgaccatcattgcaaccgcgctggttgataccggttctaaaatggatgaagttatctacgaagaatttaaaggtaccggtaacatggaattgcatctgtcccgtaaaattgcggagaaacgtgtattcccagccattgacttcaaccgctctggtacccgtaaagaagagttgctgactacgactgatgagctacaaaaaatgtggatcttgcgccgaattcttcatccaatgggtgaaattgatgcaatggaattcctcatcagtaagctggcgactgcgaaaactaacgatcagttctttgataatatgagacgctcgtaa

SEQ ID NO: 41880 - DNA, 876 bp, Yersinia pestis
atgaaacataaaatcagtttctgtcccggtgtgggtagcgcagcgcatattattcaacattccgagttgcttctcacttcagtctatattgagcacccgttgctcattatggttaatcgtgggtataaaattatccgttgggaaaaccaggaatgcgttatcctgccgggcgaaattgcagttataaatagcgggcaaactattgatattattaatgggctatctaatgatgacctgttcttcagtcaacaacttcattgtgacccgagtttgatcgcggcctttgctcatcaccctacttcagcagatttgggggttattcccggcgtgatggcaatccgtaatttagcacctgaattcattaatacgtttggcaatatatttaactcaatatcagaaaatagtgatattccaacggtaatcatcaagcaccgtatgcttgagttattactttggctggcgcagcgtgatgttaaatttatattaaatgacggtaacggcttgagtgaaaaagtgcgccgctgcttggccagcgatccacacaagatatggtccgcttctgaagtagccgaacacatgacaatgagtgaagtggtattacggcgaaagttagcagcagaaaatatactcttacgtgatttaatgatcgatgttcgcatgaccagtgcacttcgcctattacaaggcacggattggccgatctcattgattgccaatcaaatcggttatgaaagttcatcacgttttgccgaacgttttcgtaagcgctttggttttgcaccaaccgctattcgcggccaccatcgcttgcaaccggtagagagtgaatcaccgatacactcagttaatcgttaccttaagccctcatattcctga

SEQ ID NO: 41881 - DNA, 738 bp, Yersinia pestis
gtgaaaattgatttaaatgctgatttgggtgagggctgcgccaatgatcaggcgctgctgcaattggtcagttcggccaacatagcctgcggttttcatgcaggtgatgcgcaaactatgcgtcaatcggtacgctgggcgttggagtatggtgtggctattggtgcacatccgagcttcccggatcgggaaaactttggtcgcactgctatgcagctaccacctgagaccgtctatgctcaagtggtttatcaattgggcgcgcttgccgccatcgtgcaggttgaagggggggttatgcagcacgtaaaaccccatggcatgttgtataaccaagcggcggtcgatccgttattggcggatgccattgctcaggcggttaaggctgtggatccgtcattacgtctggtcgggttagccgggagtgagttgatccgcgccggtacccgtgtggggttagtcacccggcaggaagtgtttgctgatcgccactatcaacccgatggcacgttagttcctcgcagtcagccagatgctctaatagaaagtgacgagttagcgctgtcacaaactctggctatggtgcaacagcatcaggttcaggcctgcgatggcagctgggtacaggtacaagctgatacggtatgtgttcatggcgatggcgtacaggcattagcgtttgcgcgttgtttacgagaccgttttcagcaggaaggcatcagcgtgatagcgcaataa

SEQ ID NO: 41882 - DNA, 2022 bp, Yersinia pestis
atgcgattaaaccccagccaacaagaagccgtcgaatttgtcactggaccctgtctggtgctggccggtgcgggatcgggtaaaacccgagtcattaccaacaagattgcccacctgatccgtcagtgtggttatcagcctaagcatattgctgccgtgaccttcaccaataaagcagcccgcgagatgaaagagcgtgttgctcaaacgctggggcgcaaagaagcgcggggattgatgatcgcgactttccacaccttggggttggaaatcatcaagaaagagtatgtggctctggggatgaagtcgaacttctcactgttcgatgcacaggatcaaatggggttattgaaagatctgacccataagtggctggaagatgacaaaacattgctgcagcaactggtgtcggcgatctccaattggaagaatgatctgctggatccagccgccgctgctgcgacagcacgatccgagcgtgataagttatttgtccattgctacggcttatatgacgcccatttgaaagcctgtaatgtgctggattttgacgaccttatctcgctacccaccctattgttgcaaaaaaatctggaggtccgtgagcggtggcaaaaccgtctgcgttacctgctggttgatgaatatcaggataccaataccagccagtatcaaatggtgaaattgctggtggggaatcgggcgcgttttactgtcgtgggtgatgacgaccaatctatctattcatggcgtggtgctcggccacagaacttggtcctgctaaatgaagatttccctgcgctacgggtgattaagctggaacagaattaccgttcttcggggcgtatcttgaaggcggcgaatattttgattgccaacaacccacatgtttttgaaaagaaacttttttctgaactgagctatggcgatgagttgaaagtgattaccgccaataacgaagatcatgaagcggagcgggtggtcggcgagcttattgcacatcactttgttaaaaagacccaatatagcgattacgccattttgtatcgtgggaatcaccaatcgcggttgtttgaaaaattgctgatgcaaaaccgtattccttatcgaatttcgggtggcgattcatttttctctcgtccagagattaaggatttgttggcttacctacgggtattgaccaatcaggatgatgacagtgcattcttacgaattgtgaatacaccaaagcgtgagattggtgcggccaccgtccaaaaattgggtgaatgggctaatttacgcaataagagcctgtttcgggccagttttgatttagggttaggcgagcacctgaagggccgtggcctggagtcattgcaacgttttactcactggatggatgggattattcgtttggttgagcgtgaacccgtggcagcagtccgggatttgatccacggtattgattacgaaagttggttattcgaaactgcgcccagcccaaaagccgctgaaatgcgtatgaaaaacgttaatttattattcagttggatgaccgaaatgctggaagggtcggaactggatgaaccgatgacgctgactcaggtggtaacgcgttttaccctgcgtgacatgatggagcgaggggagagtgatgaagaactggatcaagtgcaattaatgacgttgcatgcctctaaagggctggagttcccttatgtattcttagtggggatggaagaggggttgctgccgcatcaaagcagcattgatgaagataatgtggatgaagaacggcggttggcttatgtggggatcacccgcgcccagcgtgaactgttcttcaccctgtgtaaagaacggcggcaatacggcgagttgattcggccagaacctagccgttttctgatggagttgccgcaggacgatttaaactgggaaaacgaacgtaaagccgtcagcccggaagagcgtatgcaaaaaggccagagtcatctggccaatcttcgtgctcagttagcgaatgcgaagaaaccgtag

SEQ ID NO: 41883 - DNA, 228 bp, Yersinia pestis
atgcatcttatcccccaacgatcctacaaaatcattggtttttctcctgaaatcagcccagcttaccggcaaaaactcttgtcattgggtatgctgcctggctcctcgtttaatgttgttcgccttgcgccgttaggtgatcccattcagatagaaacccgtcgggtcagcctggtggtacgcaaaaaagacttagacctgctcaccttggacctgcaaccccaataa

SEQ ID NO: 41884 - DNA, 2376 bp, Yersinia pestis
atgaatgaaccactgagccgcattattgcaagcgaactgcaggcccggccggagcaagttatctccgctatccgcctgcttgatgaaggtaataccgtgccctttatttcacggtatcgtaaggaagttaccggcgggttagatgatatccaactgcgtcagttggaaagccgtctggggtatctgcgtgaattagaagatcgccgccaaaccattcttaaatcaattgaagatcaaggaaaactcaccgaccagctggccggggcgatcaacgccaccctaagtaagaccgagctggaagatctgtatcttccttataaaccgaagcgccgcactcgcggacaaattgccattgaagccgggttagaacccctggcagagcgtttatggcaggatccacaacaagaccctgaacacaccgcgctggcctatgttgatgccgataaaggcgtcgctgatactaaagccgcgttggatggtgctcgctatattttgatggagcggtttgccgaagatgccaccctgctggcgaaagtgcgtcagtatctgtggaaaaacgcccatctggtgtcaaaagtcgtggaaggtaaagagcaggaaggcgctaaattccgcgattacttcgatcaccacgaacctatcgcacaagtcccttctcaccgcgcattggccatgttccgtggccgcaatgagggggtactgcaactggccttggatcctgatccgcaatttgacgaaccgccgcgtgaaagtcagggtgaacagatcattatcaaccatcttgatctgcgcttgaataatgcgccggcagacggctggcgtaaggcggtggtcaactggacctggcgtatcaaggtgctgttgcatctggaaaccgagctgatgagcaccttgcgtgaacgggctgaagatgaggctattaatgtctttgcccgtaatatgcaagatttactgatggccgcgccagcaggtatgcgcgcgaccatgggcctcgatcccggcctgcgtactggcgtgaaagtcgcggtggtggatgcaacaggcaagctggtcgctttcgataccatctacccacacaccggccaggcagcaaaagccgccgccgttgtcgccgccctgtgcatcaaacaccaggttgaactggtggctatcggtaacggtactgcctcacgggaaaccgagcgcttctttgtggagctacagcaacagtacccggccgtcaccgcccaaaaagtcattgtcagtgaggccggtgcctcggtctattcagcctctgaattggcctcgcaagagtttcctgatctggatgtctccatccgtggcgcggtttccattgcccgccgtctgcaagatccgttggctgaactggtaaaaatcgatccgaaatctatcggtgttggtcagtatcagcacgatgtcagccaaagccaattggcgaaaaagctggatgcggtggtggaagactgcgtaaacgccgttggcgtggatttaaacacggcttcggtgccgttactgacacgtgttgccggtttgacgcgcatgatggcacagaacatcgtgaactggcgtgatgagaatggccgcttccgcaaccgtgagcaattactgaaagtcagccgcctcgggccgaaagccttcgaacagtgtgcaggcttcttgcgtattaaccacggcgataaccccttagacgcctcgacagttcacccagaagcctatccggtagttgagcgtattttagcggccaccgagcaggcgttgcaggacttaatgggcaatgccaatgcgctgcgcaaccttaatgctcgcgattttactactgagcgttttggcgtaccaacggtaaccgatattctgcgagagctggaaaagccaggccgtgacccgcgctctgaatttaaaacagccaccttcgcggaaggggtggaaacactgaatgacctgacaccgggcatgatccttgaaggcgcggtcactaacgtgacaaattttggtgcttttgtggatatcggcgttcatcaggatggtttggtgcatatctcttcactggccgataagtttgtcgatgatccacataaagtggtgaaagccggcgatatcgtcaaagtcaaagtgatggaagtggatctgcaacgtaagcgcatcgccctgaccatgcgccttgatgagcagccaggtgaaactcactcccgccgatccaacaatggcacgggtagcgagcgcaccaataatgacaaccgcggggtaaatcgcccacataacgacgcgaaaggtcataatgcgcctaaccgtgctccggccaaagggcgatcagatagcagctcggcgggtaacagcgccatgagcgatgcgctggcggcggcctttaaaaagcgttag

SEQ ID NO: 41885 - DNA, 1353 bp, Yersinia pestis
atgaagtggtggcgcttttctccacgtagttcattcgcccgaaccttattactgatcgtgaccttgctgtttgtcagtttggtcactacgtatctggtggtgctgaatttcgctatcttacctagcttgcaacagttcaataaagtgttggcgtatgaagtccgtatgctgatgactgatcggctgcaattggaagatggcacactacttgaagtcccgcccgcgttccggcgtgagatttaccgtgagttgggtatttcgctttataccaacgcggcggcagaggaaagtggcctacgttgggcacagcattataaatttctcagtgatcaaatggcccagcagttgggcgggccaaccgatgtccgggtcgaggtcaataaaaactcacctgtagtttggctcaaaacctggctgtcgcctgatatctgggtgcgcgtccccctcacggagattcaccaaggcgatttctcgccgctgttccgttataccttggccattatgctactggcggtgggtggggcctggttatttatccgtattcagaatcggcctttggtggaactggaacatgcggctttacaggtcggtaaggggaatattccgccaccgttgcgggaatacggtgcttctgaagttcgctcggtgacacgggcatttaaccaaatggccgccggggtcaaattgttgtctgatgaccggaccttgttgatggcgggcgtgagccatgatttacgtactccgttgacgcgtattcgcttggcaacggaaatgatgagtgaagacgacgcttacctgtctgaatcgatcaataaagacattgaagagtgcaatgcgattattgagcaatttatcgactatctgcgcaccgggcaggagatgccgaccgaaccgagcgatcttaattctgtattaggtgaagtgattgcggcagaaagtggttatgagcgggtgattgagacggatttagctgaaggtgaagtgttggtggatattcatccattatcgattaaacgcgcgctaaccaatatggtggtgaatgcggcccgttacggtaatggctggataaaagtgagcagtggtaaggagttgcagcgggcttggttccaggttgaagatgatggccccggtataaaacccgaggatttgaagcacttgctccagcctttcgtgcgcggtgatagtgcccgcagcaccagcggtactgggctaggcctggcaattgttcagcgaatcattgatgcgcacgcggggtcattggagattggtaccagtaagcgaggcgggttacggatccgcgcatatattccattgccattggatgtgaagcccaagccaccagcggtggcttga

SEQ ID NO: 41886 - DNA, 1620 bp, Yersinia pestis
atgagtgttaaaggaattaccccgcaggagctcgccgcctatggcatccataacgtcagcgagattgtttacaacccaagctatgatttactgtttgaagaagagactaaacccacgttggaaggatacgagcgtggcacactgacgactaccggcgcaatagcggtagataccggtatttttaccgggcgttcacccaaagataaatatattgtccgcgatgctatcactcaggataccgtgtggtgggccgatcagggcaaaggtaaaaatgataataagcctctgagccaagagatctggaaccatttgaaaggtctggtgacggaacaactctctggcaaacgcctctttgttgtcgatacattctgcggtgctaatgcggatacccgcctgcaagtccgctttatcacggaagtcgcttggcaggcacacttcgtcaaaaatatgtttatccgtccatcagatgaagaactggctcggtttgaacctgactttatcgtgatgaacggtgccaaatgcactaacccacaatggaaagagcagggcctgaattcagaaaactttgtcgcctttaatctgacagaacgtatgcagttgattggtggcacgtggtatggcggcgaaatgaagaaagggatgttctcaatgatgaactacctgctgccactgaaaggcattgcttcaatgcattgttcagctaacgtcggcgaaaaaggcgatgttgccatcttcttcggtctgtcgggtaccggtaaaaccactttatctaccgatccaaaacgcaagttgatcggtgatgatgaacatggctgggatgatgatggcgtctttaacttcgagggggggtgctacgctaaaaccatcaagttatctgaagaagcagagccagatatttaccacgccattaaacgcgacgccttgctggaaaacgtggtggtgctagcagacggtaccgttgattttaatgacggttctaaaactgaaaacacccgtgtctcttatccgatttaccacattgataacattgttaaaccggtgtccaaagcaggccatgcgaccaaggttatcttcctgactgccgatgcctttggtgtgctccccccagtatctcgtctgaccgcaaaccagactcaatatcacttcctctctggctttactgccaaactggcagggacagagcgtggcgtcacggagccaacaccaaccttctctgcttgctttggtgcggccttcctgtcgctgcacccaacgcagtacgctgaagtgctggttaagcgtatgcaagcggttggcgcacaagcctatctggtcaataccggttggaacgggacaggtaagcgtatttccatcaaggatacccgcgccattattgacgcaatcctaaacggggagattgataaggcagaaacctttacgctgccaatctttgatctggcagtccctatggcgttacccggtgtgaatcccgatatcctcgatcctcgcgacacctacgccgataaagcgcaatggcaagagaaagccgaagatttggcgaaacgctttgcgactaactttgataaatacacggatacccctgcgggggccgcgttggttagcgcggggccaaagatctaa

SEQ ID NO: 41887 - DNA, 882 bp, Yersinia pestis
atgtctaatcacgaccaattacaccgctatctgtttgctaatcatgctgtgcgcggtgaactggtttcagttaatgaaacctaccaacaggtattagctaaccatgattacccaccagcggtacagaaactgttgggtgaaatgttggtcgcgaccagcctgctgacggccaccctgaaatttgatggcgatattaccgtgcaattacagggcggtgatggccccttaacactggcggtcattaacggtaataatcggcaggaaatgcgcggtgttgctcgcgttaaaggcgaaatcagcgatgacagcacactgcaagagatggtcggtaacggctatctggtgatcaccattacacctgcacaaggcgaacgctatcaaggggttgtggcattagaaggtgaaactatcgcggcctgcctggaaaattacttcatgcagtcagagcagttaccgacccgcctgtttatccgcaccgggcatgtcgccgataaagcggcggcaggtggcatgctcctgcaagtactgccggcgcaggaacgtaatgaagatgaatttgaccatctggcacagctgacagcgaccattaaagctgaagagttattcacactgccagccaatgaagtgctgtatcgcctgtatcatcaggaggaggtgacgctatatgagccacaaaatgtcagcttccgctgtacctgctcccgccaacgttgtgccgatgccttagtgacgctagctgacgatgacgtcaccgaaatgctcgagcaagatggcaatattgatatgcattgtgaatattgcggtaaccattatctgtttgatgcagttgatattgctacattaaaaaatggcaacagcgcctcttctgaacaaattcattaa

SEQ ID NO: 41888 - DNA, 408 bp, Yersinia pestis
atgaaggataaaatctccccagcggaatcagtacgtctggataaatggttatgggccgcacggttttataaaaccagagcgatcgcacgtgacatggtggatggcggtaaagtccactataacggccagcgaagcaagcccagcaagctggttgaactccatgctgaaatccgtctgcggcaagggaatgatgagcgcacggtgcgtgtcttggcgttacatagtcaacgccggggggcagaggaagcccaaacattgtatgaagaaaccgaggcgagcattgccaaccgcgagaaagtcgcacaggcacgtaaactgaatgccctgacgatgccgcatccagatcggcggccggataaaaaagaacgtcgcaatctgatcaaatttaaacaaggcgagcctgagtaa

SEQ ID NO: 41889 - DNA, 1020 bp, Yersinia pestis
atgaacaccaaccctgcttcaatggctgttatcggtgccggatcttacggcaccgcattagctatcacactggcgcgtaatggccatcaagtcgtgttatggggccatgaccctaaacatattcaacagctgcaacaagaccgctgtaaccgcgctttcctacctgatgctgctttccccgatacgttgcgattggaaaccgacttagcatgtgcgttggctgccagccgcgatgtgttggtcgtcgtgcccagccatgtctttggtgctgttttacatcagttgaagcctcatctacgtaaagatgcacgtatcgtctgggcaaccaaagggctagaagctgaaaccggccgtctgctacaggatgtggcccgcgaagtcttgggcgaggctatcccgcttgccgtgatttctggtccaacgtttgccaaagaattggccgcgggtttgcctacggcgattgcgttggcatcgaccgatgtgcaatttagcgaagatctgcaacagttattgcactgtggaaaaagctttcgagtttacagtaatcctgattttatcggggtacagcttggtggcgcagtgaaaaacgtgattgccatcggtgcaggtatgtccgatggcatcggttttggtgcgaatgcccgtaccgctctaataacccgcgggttagcggagatgacgcgcttagggacggcattaggtgccgatccttccacctttatgggcatggcagggttaggcgatttggtgctaacctgcacagataaccaatcccgtaaccgccgatttggcattatgctgggtcaggggttgggggtgaaggaggcgcaggacaacattggtcaagtggtagaaggttaccgtaataccaaggaagttctggcattagcacagcgtcatggcgtcgaaatgccaataactgaacaaatttatcaagtgttgtattgtcataagaatgctcgtgaggcggctctgacgttgttggggcggaccaaaaaagatgaaaaaatcggcatttga

SEQ ID NO: 41890 - DNA, 822 bp, Yersinia pestis
atgtcgtcagaagagttagaacaggtctggagcaacataaaatcagaagcaagggcactggctgaatgtgaaccgatgctggctagcttttttcatgcaacactcttgaagcatgagaatttgggcagtgcgctgagttatattctcgcgaataagttggctaatcctatcatgccagcgattgctatccgtgaagtggttgaagaagcttatcgttcagatgcgcatatgatcgtttccgctgcccgcgatattctggccgtccggttacgcgatccagccgttgataaatactccacaccgttactgtatctcaaaggttttcatgctttgcaggcttatcgtattggccattggttgtgggcgcaggatcgtaaagcgctggcgatttatctgcaaaatcaagtctctgtcgcatttggtgtggatatccaccctgcggcaaccattggttgtggcatcatgctggaccacgctaccggtatcgttattggtgaaacggctgtggttgagaatgacgtgtctattctgcaatctgtcacgcttggggggacgggcaaaaccagtggcgaccgccatccaaaaatccgtgaaggtgtcatgattggcgcaggcgcgaaaattctcggcaatatcgaggtgggccgtggtgcgaagattggtgccggttcagttgtactacaatcggtacccgctcacacgacggctgccggtgtacctgcccgtatcgttggtaaaccagagagtgataaaccctcgttggatatggatcagcatttcaatggcagcattcagggctttgaatatggcgatggtatttaa

SEQ ID NO: 41891 - DNA, 489 bp, Yersinia pestis
atgcttaacattgttttatttgaacccgaaattccgccaaataccggcaatattatccggttatgtgcgaataccggctgccagcttcatctgattaaacctttgggttttacttgggacgataaacgtttacgccgtgcgggccttgattaccatgagtttgccgacatcaaacatcaccatgattatcaagccttcctggacagtgaaaaactcgatagcacacaaccggctcgcttatttgcgctgacgaccaaggggacgccggctcacagtgcggtgagctatcaggcgaatgattacctgttatttggcccagaaacccgtggcttaccggcctatattctggatgcgttacccgctcagcagaaaatcagaatccccatgcaagccgatagccggagcatgaatctatcgaatgccgtttcagtcgtggtgtatgaggcctggcgtcaactgggctatccaggtgcattactgaaagagtga

SEQ ID NO: 41892 - DNA, 531 bp, Yersinia pestis
atgaaaaaaattactttagctatcgcgttattctcggcatctacaacggttgccatgtctgccagtaataatacgattacgttccaaggggaagtcacagcacaaacctgttctgttaccgtaaacggccttgaagcaaatccagttgtcttgttgcctacagtatcaagtagcgatttagacgcttccggccaaactaaaggcaaaacaacctttacgctaggtgtgtctggctgtacatcaggatcagatgatcttgatatcaaaactgttttcatcggtagcctggttactgctactggtaatttacaaaatacaggtaccgcagggaacgttgaacttcaattattgaaggatgccacgacaacaacgggtatcgacctgaatagtggtttggcacaagacggtatcgtgttgctagcaggtgatacatctgcggagcatgattttgctgttcagtattatgccactgggcaatcaacaccagggtctgtcattgcatctgtacagtatgccgtttcttacttgtaa

SEQ ID NO: 41893 - DNA, 2886 bp, Yersinia pestis
atgttgcaaaccacactgctcgccttacaaggactttcttgtatgaattgtgctcaacgcgttaaagccgcgttggaaagccgtgaggatgttcaccatgctgaagtgaatgttcactacgctaaagtgactggtgaagccgacactcatgcactcattgaaacgatcaaacagaccggttatcaggctacagaagcccaaacgccggacgttgaattacacctatcaggattgagctgcgggcattgcactgagaccgtccgtaaagcgctggaagcggtttcgggggttatttctgccgatgtaaccctcgagagtgccaacgtgtacggcaaggccgatatacagacattgattgccgcagtggaacaggctggctatcacgccacacagcaaggtatcgactccccaaaaactgagccgctgacacactcagcccaatctcagccggaatctctggcagcggccccgaatacagttccggcaacaaacgtggctttagccacaagtacggtttctgatacaaataccgttttacctacaaataccgctttacctacaaatacaacgtcgacaacttcaacagccgatacggcgtcagccaccagcacggcaccggtgatcaatccgctgccagtgaccgaatcagtggcccagccggcagcctcagaaggggagagtgttcagctattactgacggggatgagctgtgccagttgtgtctctaaagtacaaaatgcattgcaacgtgttgatggggttcaggtggcccgcgttaatctggctgagcgcagtgcattggtcacagggacccaaaataacgaagccttaatcgctgcggttaaaaatgccggttacggcgcggaaattattgaagacgaaggggagcgacgcgagcggcaacagcaaatgtcgcaagccagtatgaagcgcttccaatggcaagcggcattaggtctgttgttaggtatcccattgatggcctgggggctgtttggcggtagcatgacgctgacgccagaaacccaaacgccctggcttatcatcgggattatcacgttgctggtaatgatatttgcgggtggtcacttctaccgtaatgcgtgggtcagcctgaaaaatggcagagcgaccatggataccttggtcgctctggggacaggtgcggcctggatctattccatcaccgtcaatatctggccagatgttttccctatggaggctcgtcacctttattacgaagccagtgccatgatcattggtttgattaaccttggtcatgcgatggaacaacgtgccagacagcgctcatctaatgcgctcgaacgcctgttagatttggccccaccaacggcaaagttagtgaccgatgacggcgagaaggtgatcccgctggctgatgtccaactggggatgatcctacgcctgactactggcgatcgcgtaccggttgacggcgagattgtgcagggcgaagtgtggatggatgaagcgatgctgactggtgagccgatcccacaacagaaatcagtcggtgatattgtccacgcggggacacaagtacaagatggaaccgtacaatttcgggctagcgctatcggtagccaaacgaccttggcgcggattatcaaactagtccgtcaggcacaaagcagtaaaccggaaatcggcaaattggcagaccgtatctctgcggtattcgtcccaacggtggtggtcattgccattgtcgctggcctgatttggtatttcttcggcccacaaccccagttggtctataccctggtggtggccaccacggtgttaattatcgcctgcccttgtgctttgggcttagcgacaccgatgtcgattatctctggcgtcggccgggccgctgaatttggtgtattggttcgagatgcagatgcattgcagcaagccagtaacctcgatacgttagtgttcgataaaaccggcacactgactgaggggcacccgcaggtagtggcaatccatacctttaatggtgtcagtgagcaacaggctttgggctgggcggcagcattggaaacgggatcaaatcacccgctggcgcgcgctatcttacaacgtgctgaagggctgacattggccaccgccagccaatttcgtacattgcgcggtttgggggtcagtggtgaagttgacggcattccactgctccttggcaataatcggctactggaagagcaacagattgatacccgcgagctgcaatcattgatacagcaacaagcggaaagtggcgcaacaccggttattctgaccgccaatggtaagcccgccgcactgttatcgatccgtgatccattgcgcgaagacagtatcggcgcattacagcggctgcatcaattgggctatagtctggtgatgttgaccggtgacaaccctattaccgccaatgccattgcgaaagaagccggtattgatcgtgtgatcgcgggcgttctgccagatggcaaagccgatgctatcaagcaactgcaagcggccgggcataaagtggcgatgattggtgatggcattaacgatgctcctgcattagcacaagcggatgtcgggattgccatggggggcggcagtgatatcgcgattgaaaccgcggcgattacccttatgcgtcacagtttgtacggtgttgtcgatgcggtagaactttccaaagcaacattacgtaacatgaagcaaaacctgttgggcgcgttcttctacaatgcgctgggcattcccattgccgcagggattttatatcccttcaccggtacattgctcagcccggtcgtcgccggagcggcaatggcgttgtcgtccattacggtcgtcagtaacgctaaccgtttactgcgctttaagcctaaacagtaa

SEQ ID NO: 41894 - DNA, 699 bp, Yersinia pestis
atgcataaaatcctattagttgatgatgaccgtgaactgacgtcgctgttgaaagaattgttggaaatggagggtttcaatgttgtggtcgcctatgatggcgaacaagcgttaagccagctagatagctctatcgacttgttattgcttgatattatgatgccgcgtaaaaacggtatcgaaaccttgaaagaattacgccaacaccatcagaccccggtgattatgctgactgcccgtggtagtgagttggatcgggtgcttggcctggaattaggggccgatgattatctggcaaaaccgtttaatgatcgcgagctggttgctcgtatccgcgcgattttacgccgctccaattggagtgaacagcaacaaaatgccgagcaaggcgcgcctacactggaagttgattgcctgcaattgaatccgggtcgtcaggaagccagttttgaaggccaaccactggaattaaccggcactgagttcaccctgctctatctgctggctcagcaccttggccaagtggtgtcgcgggagcatcttagccaagaggttctggggaaacgattgaccccctttgaccgcgcgattgatatgcacatctcgaacttacgccgtaagttaccagaccgcaaagacgggctaccgtggtttaaaacgttgcgtggccgcggctacttgatggtatcagaaacatga

SEQ ID NO: 41895 - DNA, 810 bp, Yersinia pestis
atggacaaactcttacgccgtatcgcaaaattcttgggcattattacacccaccacctatgcttacccggctttggatatcacgctacctggcgagcgccacctacatttagttggcagcattcatatgggaacggcagggatgtttcccctcccccacacgctactgaataaattgaatcaggctgacgctctcattgttgaagcggatatcaccgacgcaacctcttcttttggccatagcacggttactgaacctttagtcgacagattatctgaggaatattatccgcaactccagcgacgctgtgaagaactggggagtgacccactggcgatgacctatctcccggcatggcaagtcgcgttaatgttgcaggcacatcaggctcaacgtttggggttgcgtggggaatatggcattgattatcaactactgaaagccgcaggggcgcaggagaaagagattattgaactggaaggggctgaaatgcagcttgatttactcaaaaccttaccggataacggcatctctttactgcacgacacccttctccattggcataccaatgcccgcctgctacaaaccatgattggctggtggctagagcaccagcctgaaaagtatcaggcaactctcgccccgactttcagccacgatatgtatgatgtactgatgcttcagcgcaataaacgttggcagcaacagctcgaacaactcgcccccggacgttatgtcgttgctgtaggtgcattacatttgtacggtgaagggaatcttccagagctgttacgagccgacaatcaataa

SEQ ID NO: 41896 - DNA, 489 bp, Yersinia pestis
atgcgtaaagttacaacattagttatggcgtcaatgttcgttcttggttcttcagccgcctttgctgccgacaacactaaagtcactgagggttaccacggtgacggtaagatgatgatgaacaagaaaggcgaccgcggtcaccataacatgtttgatggcatcaacctcactgaacagcagcgtcagcaaatgcgtgacttgatgcgccagtctcaccaaagtcagccgcgccttgatcttgaagatcgcgaggcaatgcacaaattgattactgccgataaattcgacgaagctgctgtaagagcgcaggctgagaaaatgtctcagaaccagattgagcgccatgtcgaaatggccaaagttcgtaaccaaatgtataacttgctcacaccagagcaaaaggaagcattgaacaaaaagcatcaggaacgtattgagaaattgcagcaaaaaccagcagcacaaccttcttctgcccagaagtaa

SEQ ID NO: 41897 - DNA, 762 bp, Yersinia pestis
atgagtaccattgatattaaaaaattgaccaagcagtttaagggtcaacaggtgctgcacggtatcgatcttgaagtgaatagtggtgaagtggtggcgattattggccctagcgggtcaggaaaaaccactttattacgttgtatcaatctactggagatccccgattcagggataattcgggtaggcaatattgagattaatggcagcatccacatcagcaagcagcaacgtcaggtccgtgccttgcggcaacaagtggggtttgtctttcagggtttcaatttgttcccccatcgcacggtgctggaaaatatcattgaagggcccgtgattgttaagggtgaagtgcggggttcggcagaaaagcgcggccgtgagttgctggcaaaggtaggattaagtggtaaagaggatacctatccgcgccgtttatctggtgggcaacaacaacgggtcgcaatagcgcgtgcgttggcaatgcagcctcaggttatcctgtttgatgaacctacctctgcattggatcccgagctggtgggtgaagtactcagtaccatacgtgcgttagccgaagagaaacgcacaatggttattgtgacccatgaaatgagctttgcccgcgatgtggcagacagggctatttttatggaccacgggcagattgttgagcaaggcccggcgaaagcactgttttcccacccgcagcatgaccgtaccaaacagttccttgataaattcctgaataacccagactgctga

SEQ ID NO: 41898 - DNA, 1215 bp, Yersinia pestis
atgaccgatcgttctgataccggatgtcagcagcccgttaatgtttcagtcaaacgtacatctttctctattttgggtgctatcagcgtatctcacctactcaacgatatgatccagtcgctgatcctggcgatttatcctttattacaagctgagttctcattgagttttgctcaaataggattgatcacgctaacttaccaattgacggcttcgttactacaaccgctgattggcttatatacggataaacacccccagccatactcattacccatcggtatggggttcacgctgtctggcatattactgctggcagtagccacaaccttcccggtggtattattagcggcagcattggtcggtactggctcttctgtattccacccagaatcatcacgagtcgcccgtatggcatccggtgggcgccatggtttggctcaatctgtgtttcaggtgggggggaattttggcagcgcactcggtccgttactggccgccatcattattgccccttacggtaaaggcaatgtgggctggttttcgctcgcagccctactggcaattgtcgtgctgttgcaggtgagtaaatggtacaaactgcagcaacgtgcttcgtatggcaaagtgttaaaaatctcatcagccaaaacactaccaaaaaataaaattatcagtacgttagccatcctgatggtgctgatattctctaaatacttctatttgaccagcattagtagctattacaccttttatttaatacataagtttggcgtttcggtacaaagtgcccagatacacctatttgttttcttatttgcggttgccgccggcaccattattggtgggcctcttggtgataagattggtagaaaatatgttatttggggttctatactcggtgttgccccttttacccttgctttaccctacgcgtctttgtattggacgggtattttaaccgtatttattggtgttattctcgcttccgccttttcagcaatactggtgtatgctcaagagcttatcccagggaaagtcggcatggtatcgggtttattcttcggtttcgctttcggtatggggggaataggtgcagcagtactggggtatgttgctgatttaaccagtattgaactggtttatcaaatatgtgcgttcttgccattactgggaatattcacggccttactgcctaatttggacgataagtaa

SEQ ID NO: 41899 - DNA, 1692 bp, Yersinia pestis
atgcaccattcaacacccttaatcaccactattgtaggaggcctggttctcgccttcctctttggcacactggctcaccgcctgcgcatctcaccactggtggggtaccttgcagctggggtgctggccgggccattcacgccggggttcgttgctgatacatcattagcacctgaactggctgaaattggtgttattttgttgatgtttggtgttggacttcacttctcgcttaaagatcttctcgctgtaaaatcaatcgccatacccggcgcaatcgcccagattgccgttgcaacgctgttggggatgggattatcacatttcttaggttgggatctgatcaccgggctggtctttggtctgtgcctatcaaccgccagtaccgtggtcttgctgcgggccctggaagaacggcaattgattgatagccaacgagggcaaatcgcgattggctggttgattgtcgaagatttggccatggtattgacgctggtactcctccctgcttttgcgggcgtgatggggaacgaaacgaccaacctgaaccaattatttactgagttagcgattactatcggtaaagttatcgcctttattactctgatgattgtcgtaggccgccgcctggtgccatggatattggctaaaaccgccagtaccggctcacgagagctgtttaccttagccgtgctggttttggccttagggattgcctacggtgccgtagagctgtttgatgtctcctttgctctgggcgcattcttcgcggggatggttttgaatgagtcggagctcagccaccgagcggcacaagataccttaccgctacgtgatgcgtttgcggtgctgttcttcgtctctgtcggtatgctgttcgacccaatgattctggtcaatgaacctttggccgttatcgcctcgctggccattatcatctttggtaaatccgctatcgctttcgccctagtacggctatttggtcactcaaaacggaccgccctaaccatttcggtcagtttggcacaaatcggcgagttcgcctttattttggctgggttgggtatttctctcggtttactgtctgggcatggccgtaacttggtactggcgagtgcgatcctgtctattatgcttaacccgctactcttcaccttacttgatcgttatttggctaagacagagaccatggaggatttgatcctggaagaggccgtcgaggaagagaaacagatccccgttgatttatgtaaccatgtccttttggttggctacggccgtgttggcagcttattaggtgccaagttgcatgccgaagggatcccactggtggttatcgaaaactcacggcccagagtcgaagccttgcgggaacaaggtattaacgcggtcttcggcaacgcggccaacgccgatgttatggcgctgggtcgcctggattgtgcccgttggttattgctgaccatacccaatggctacgaagcaggggaaattgtcgcatcggccagaattaagcgccccgatctagagataatcgcccgtgcacattacgatgacgaagtcgtttatatctctgaccgtggtgccaaccaagtggtcatgggcgagcgtgaaattgccaacagtatgctcaatatgctgaaaatagaaacactgactgaagaagataaaatgccggtttgcccgatttaa

SEQ ID NO: 41900 - DNA, 1305 bp, Yersinia pestis
atgaaatttcctggtaagcgcaagtccaaacactactttccagtcaatgcccgcgatccactattgcaatcggtgcaggctgaaaatgaagtgagtacctcttatatcgttggtattgaccagacactggttgatattgaggcaaaagtcgatgaagacttcattacgcgttatggccttagccaagggcattccttggtgatcgaagatgatgtggctgagcgcctttaccaagaattaacccataatgatctgattacccatgaatttgccggtgggactatcggcaatactttgcataattattccgtgttggctgatgaccgctctgttttgcttggcactatgtgcagcaatattaaaatcggcagttatgcctatcgctatttatgtaatacctccagccgtaccgatctgaattatttgcaggcggttgacggggcgattggtcgctgttttaccttgatcacggaaaatggtgaacggacttttgctattagccctggtcaaatgaatcaattacgtccggaaagtattcctgaagaggtcatagcaggagcctctgcattagtgctaacggcctatttggtgcgctgtaagccaggggaacccatgccggatgccaccatgcaagcgattcactatgcaaaaaaacatgatgtcccggtagtgatgacgctagggacaaaatatgtcattgcagataatccgcagtggtggcgtgaattccttaatgaacatgtctctattttggcgatgaacgaagatgaggcttatgagctaacaggattgaacgatccgctgatggcctcagatatggcattggaatgggtagatttagtgttatgtaccgcaggccccagcgggctttatatggcgggatataccgaagaggcctataaacggcagactcagcacccattattacctggggctattgctgagtttaatctttatgaattcagtcgggcgatgcgtaaagcgcattgtgtggatccgttccgtatctattcacatattgcgccttatatgggcgggccggaaaaaataatgaataccaatggtgcaggggatggcgcattgtccgcggtcctgcatgatattactgccaatggttatcaccgtaataatgttcctaactccagtaagcatgtacgcagttacctgagttattcctcgctggcacaggtgtgtaaatatgctaatcgggtgagttatcaggtattgaatcagcattcgccccgtttaacccgcggtttgcccgaacgggaagatagcctcgaggagtcttattgggaacggtaa

SEQ ID NO: 41901 - DNA, 1524 bp, Yersinia pestis
gggctgaggaaattagcgcaggctaaacaaggagagatagatgttattaatcaatctattgccaagttaaaaacggaagaaatgggcctcttaatgcagcaacagcgtgttaatgccgatctggagacagcaaaaatcacagagccgcagcgagttgagaatgcacgtttaaccgcagaagcagcagaaaaggccgcgcgcgatcgcaggatcagtgaagagatagcggcaacagaagcaaagcgccagcgaatggagaatgagcggctagcagagcaggagcggcagcgagttgaaggcaccaaacagcaagtatcggaagcatcatgtgctcaacaggcctcagcctggcaaaatcgtttcacgttaccggcgcttcagccgtcaggatcagctcaatacagctttgcagcgtcgggaatgagtgctgttggggaagccgccgaattacacaattcatttctggcggcacaggagcaactcagtgcgatagcgaccatttcggcatcaggttcggtggcggcgatgattgctctggggatctaccagactaaagtgggagaaagctccgaacggccaccgggttggaatgttagtccgaaatttgtaggcagtatctcgctgagtgcaatggggttacctgcgacagaatcattggcatcacagggtgaaatggctctgccagtgcgaatgcggatcattgacgctaaagattggataggttgcacggagatatatgcggtaaaaacgggcgtggcaggtgtattgccgaaggtcaaagttggtgcagcgcagtacgatgaatcaaccggcgtttatactttcactaccgacagcacgccgccccgcacgctgatttttaccccggcacagccaccgggagcggaaacccgcccgatattagccccaccgggcagcacgccggccaccctgcagcacacgggtgaaatgatcataaaaccggtaataacaccgactatacttccactaccgcagttatatgcgcgtgatttccacgattacattatctggttcccggcagattccgggctggagccagtgtatgtttaccttaatagtccttatggtaaaacaactgctaaaggtaaatatagtggtcgtgactttaatccagataaagctggtggtccgattaaaaatctggactggaaagaaataaaaattaggggagagggtgtggatgaggtaaaactacatacaaggcgttttggtgaattagaggataataaattaatgatcgagaggttggagaaaattctcacaaacaaactcaccgctaccgatattgataagcgcttctatactcatgaaatcagagagctagaacgatatcgtatgctaggaataccggatgatgtcaatgataaatctgtttggaatgatgctcatacagcaactctggaagattttaaaattaatgaaaaaactcagccattatatacttcagaagctgaagatgcatatatcaaagcagagttaaaaaattcgttagggagtaaataa

SEQ ID NO: 41902 - DNA, 849 bp, Yersinia pestis
atgttcgtcccatttcttattatgtttcgtgaagggctggaggcggcactgattgtcagtctgattgccagttacctcaagcgtactcaacgcggtcagtggatgggcgcagtctgggttggtgtggtggtggcagcggtgctttgtctcgctatcggtatctttatcaatgaaaccaccggtgagtttccacagaaacagcaagagctgttcgaagggattatcgctgtagtcgcggtttgcatattaacttatatggttttctggatgcgcaaagtctccaagtccgtcaaagttcacttggaaggggcaattgataatgcgcttaactctgggcgcggccaaggttgggcattagtggctatggtcttctttgctgtggcccgagagggtcttgaatctgttttcttcttgttagctgccttccaacaggatgtcggtatcggggcacctattggcgcgatactcgggttggtctgcgctattttggtcggaatggccatctattggggcggcgttaaattacatttagccaaatttttcaaatggaccagcctgtttattctgttcgttgccgcagggcttgccgccggtgctatcagagcctttcacgaagctggcttatggaaccatttccaagatattgcttttgatctgaccgatgtgctctctactcactcattattggggacgttccttgaagggatgtttggctatcaggaagcaccaacggtgagcgaagtgtctgtctactttatctatcttattccggcgttgattctgtttttccttccaccacgttccactgcgggttcggctatcgctgcggcgcggaaaattaatccataa

SEQ ID NO: 41903 - DNA, 1305 bp, Yersinia pestis
atgagagacaaaaccggcccgaaattcgggccgtatcaaccggatgatgaggcggtgtcgccgtcacgtcggcgtttaattttagggatgggcatggtgagtggtgctctggtattgggcggggcgaaaactgcccaagccgcagattgtcgatcacctgatgtcgctggaacccaagatgagcgttggcaaaaacagccgttttatggtcaacatcaagcgggggtgttaacgcctcaacaagcggcaatgatgttggtggcttttgatgtactggctaccgataaaacgtcattaattcggttattcaaattactgaccgaacggctggcctttctaacaactggcgggcgggcaccatcagtgaatgccaaactgccgccactagattcggggatcatgggacctgaaatttatcctgataatctgaccgttactgtttctgtcggtaatgcattatttgatgagcgttttggtttacaggggcagaaaccgctgcgactacagcgaatgacccgctttcctaatgactctttggatgcggggctatgtcatggtgatgtgatgttgcaaatttgtgctaataccaatgaaacggtgatccatgcgctgcgcgatattattaagcacacacccgatctactcagtgtccgctggaagcgtgaggggtttatttctgcccatgctgctcgcagtaaaggtcaggatacgcccattaatttattgggttttaaagacgggacagcgaatccaaaaatcagtaataaaccgctgatcaataatgtggtctgggtatcaaataatgcaggcgagcctgcatgggcggtagggggaagctatcaggtggtgcggataatccgtttcaaagtggagttctgggatcgcacaccgttgcaagaacagcaaaccatttttggccgtgataagaacagtggcgcacctttgggaatgcaacatgagcatgatgaacccaattacgccaaagatcctgaagggaaggtcatcccgatggatgcccatattcggttagccaatccacggacaattgaaacgcagcgtaacctaatgttgcgccgtggctacagctactcattgggggtctcaaactccgggcaactggatatggggttactgtttgtttgctatcagtcggatttggcgcaagcgttcttaacggtacaagaacgcctaaatggtgaagcgttggaagagtatgtcaaaccaattggtggggggtatttctttaccttacccggtgttgcagatgctaatcactatttggcacaaagcctgctcgaagcttaa

SEQ ID NO: 41904 - DNA, 2556 bp, Yersinia pestis
gtgaagttcgtaaagtattttttaatccttgcggtgtgttgcattttactgggagcagcctcgatatttggcctgtacaaatatattgagccgcagctacccgatgttgccacgctgaaagacatccggctgcaaacacctatgcaggtgtatagcgccgaaggcgaattgatcgctcaattcggcgaaaaacgtcgtatcccattgacgttgaatcaaataccaccagaaatggtgcatgcgtttatcgccacagaagacagccgtttttacgatcatcacggtgtcgaccctgtggggatcctgcgtgcagtctctatcgccatgttgtctggtcgcgcctcccaaggggcgagtaccattacccagcaattggcgaggaacttctttttaagccctgaacggactttgatgcgaaaaatcaaggaagcatttctggctatccgcatcgaacagatgctgaccaaagatgaaatccttgagctgtatctgaacaaaatttatctcggttaccgcgcctatggtgtcggtgctgcggcccaagtctatttcggcaaagaagtccatgaattgaccctcagccaaatagcgatgatcgccgggttacctaaagcgccttctacgtttaacccgctctactcacatgacagagccgtggcacggcgtaatgtggtgctgctacgtatgctggatgaaaaatacatcactcaggcgcaatacgatcaagcccgcagtgaagagttggtggctaactaccatgtaccgcaaatcgccttttcagcgccctatctggctgaaatggtgcgtcaggagatgattaaacgttacggtgaaaatgcgtataccgacggttatcaggtctataccacgattaccagaaagctacagttggcggcagttgattcattacgcgccaacgtgctggcttatgatatgcgccatggctatcgcggcccgtccaatgtgttatggaaggtgggcgaaagtgcctggagccgtgaacagattatcgattcactgaaagcattgccggtgtatggcccgctgttacctgcagtagtcaccgaggcggatgccgcacaagctacggcaatgctggctgatggcagcaacgtgaccttgccgatggtcggtatacggtgggcgcgtccgtttaaatcggataacgcccaaggtccggtccccaaaaaagcgactgatgtcgttcagcctggtcagcaaatttgggtcagaaaggtcgatgataactggtggctggctcaagtgccggacgtcaattctgcgctggtgtctatcgatcccaataacggtgcaattaaagcgctagtaggcggttttgattttaaccaaagcaaatttaaccgggcaacgcaggcactgcgtcaggttggctcgaatattaagccattcctgtataccgccgcgatggacaaaggcctgacgctggccactatcctcaatgacctgccaatcacccgttgggattctggcgcaggcaccgactggcggccaaaaaactcacctcccacttacgatggccctatccgtttgcgtcagggtttaggccaatcgaaaaacgtggtcatggtgcgggcaatgcgggccatgggggtggattacgcggctgagtatttgcagcgctttggtttccctgcgcagaatatcgtgcattcagaatcactggctctgggttctgcctcctttacaccattacagctagtccgtggctatgccgtgctagcaaatggcggttacctggttgatccgtacttcatcactaaaatcactgatgatgtcggtaatgttctgtttgaaacaaagccgaaggttgtctgtgataactgtaacttgccggtcatttacggtgatacccaacgttcagttgtactttctgacgacaatattgagaacgttgcaacctcgcagaaccagaatgccagtaacgtgccaatgccagagctggaacaggtgacaccggcacaaacgacgctaaatagcgaacagcaatatgcgccacacgtgataagcaccccgctggcgttcttgatgcgtgatgcattgaattctaatattttcggggaacctggctggatgggtacgggctggcgtgcgggtcgtgacctgaaacgtaaggatatcggcggtaaaacgggtacgacaaacagctcgaaggatgcctggttctccggctacggcccagataccgtgacatccgtctggattggctttgatgaccatcgccgtaatttgggccgcagcacggcatcaggggcgataccagaccaaatttccggagcagaaggcggggcgaagacggcccagccagcatggaatgactttatgaaggtggcgcttgagggcttgccagagaagcaggttccaccaccaccgggtatcgtcagtgtcgtgattgataagcaaacaggcaagttatctaatggcgggccgggcagccgctcagagtactttatcgacgggacacaacccactgagcatacggtacatgaagttggtaccacattgatggataacggccagactcacgaactgttctga

SEQ ID NO: 41905 - DNA, 942 bp, Yersinia pestis
atggatacgttcttttattctgtctcgacatggaggtcgataaagatgtactcacaatattggcaggtagggctagatattcaaatggaggccatccgagcgttggccgtgatacgacgtcgtaatggctggcaactgcgctactggtggcataaaatcttaccttctggcgttttgcgggaaggcatattacatcagcctgatattcttagcgaacaactcaaattattacgtaaacagctgcctcgacatatttcattacgtattgctttgcccgcacagcgcatattgcagcacaccattcatgtgccggataggcgtctgcgtgaacccgaacgtgatggttttattaaagccagtgccagcagactatttccggttaacagccaggctttggcactggattactgccgcgaaacggttgcgagtagcgaattattgataaccgcagcgcgtcagtcagaggtgcagcaatggcaagcctgcttggaacaggcgggtttatcctcacaagtgattgatattgcgccatgcgctttacgttatatggcaaccgcgaccggtttatctgggccatattggctggttcaccggttggcaaatgaatggctgtgggtatcgtccagtgacatgccatttcattccggggtggtggctatcgagacagagtgcagaacgcaggaaaatgatattcgcttgctgtcggccctattggctcagctcaacatgcgcggtgctggcgaagatggcgcgcctttgccggtgtattacagcagtgtagtaaaggagtcgttgccggaaaacacacggtcttggtcgccgctaacggcttttgcgcactatcaacccccattacccgcgttaccggcagcttttactttggccggggggctggcggtacgtgcggcagactctttatctgctgcgggtgcgggatactga

SEQ ID NO: 41906 - DNA, 984 bp, Yersinia pestis
atggttaagaaaattggtgtcctaacaagtggtggtgatgcacccggtatgaatgctgctattcgcggggttgttcgtgccgctttgtcagcagggttagacgttttcggtattgaagatggctatcttggcttatatgaaaatcgtatgaagaagctggatcgctatagcgtgtcagatatgattaaccgtggcggtactttcctcggatctgctcgtttcccagaattccgcgatccggaagtgcgtaaagttgccctcaagaatatgcatgagcgtggcattgatggcttggttgttatcggtggtgatggttcttatgctggtgcggacctgctgacaaaagaagggggaattcactgtgttggtttaccgggcactatcgataacgatgtggcgggtactgactacaccatcggttttttcaccgcactggaaacggtagtggaagccattgaccgcttacgcgatacctcttcttcccaccaacgtatctctatcgtggaagtgatgggccgctattgcggtgatttaacgttggcagccgcgattgccggtggttgtgagtttattgcgatccctgaagttgaatttaaacgtgatgatctggttgctgaaatcaaagcgggcatcgcgaaaggtaaaaagcacgcgattgttgctattactgaaaagctggatgatatcgattcattggctaagtacattgaaaaagagacgggccgtgaaactcgtggcaccgtgttaggccatatccaacgtggtggtgctccggtggcttatgaccgtattcttgcttcccgtatgggggcttatgctgtcgatttgctgttacaggaccacgattacaaaaaaggtggtttctgcgtcggtgtacagaatgagaagatggtgcatgagttaatttctgtgtgtatcgcgccagagaataagaaaagtaaatttaaagaagattggtacgatacagcgaagaaactgttctaa

SEQ ID NO: 41907 - DNA, 1935 bp, Yersinia pestis
atgtttcaagataacccgctgctggcgcagctaaaacagcaacttcacactcagaccccacgcgttgaaggcgtcgttaaaggtactgagaaaggctttggctttcttgaggtagatgggcagaaaagttactttattccgcctccgcagatgaagaaggtcatgcacggcgatcgcattattgccaccctgcatacggataaggatcgtgaaattgctgaacctgaaacattggttgagccatttttatcccgctttgttggccgggtgcaacgaaaagatgatcgtctgtctatcgtgcccgaccaccctttattacgtgatgctattcaatgccgcccagtacgtgaactgacgcatagcttccaaaacggtgattgggcagtggctgagatgtgccgccacccattaaaaggcgaccgcgcctttcaggctgacctaaccgcgtttattaccaatggtgaagaccacttcgttccttggtgggtaacactggctcgccataaccttgagcgtgaagcccctgctatggtcgaatcggccttaaatgacgccgagcttgagcgtgaagacttaaccgcacttaattttgtcactatcgacagcgccagcactgaagacatggatgatgcgctgtttgtccaagacaatggcgacggttcatggttattgaccattgccattgcagacccaacagcttacgtcgtcgaaaacagtgaattggatttaaccgcccgtaagcgtgcttttaccaattatctgccgggttttaacatcccgatgcttccgcgtgatttgtccgacaacctctgttcactgcgcccaaatgaacgtcgcccagtattggtttgccgtgtgacgatcacagaagaagggacgctaagtaacgatattcgtttctccgctgcttgggttgaatcaaaagccaaactggtttacgacgatgtctctgactggttggaaggaaataatcgctggcagccacaagataccgctattgcagagcagattacgttactgaaacgtatctgtgacgcccgtagcaactggcgtcaacaacatgcgctggtctttaaagaccgcccagactatcgcttcctgttgggtgaaaaaggcgaagtgctggatatcattgttgagcatcgtcgtatcgccaaccgcattgtagaagagtgtatgattgcggcgaacgtctgtgcggcattggcgttacgggaacacctcggttttggtatttataacgtgcataccggttttgacccggcattagtcgaacaagcggctagcgtattgaaagccaatggtgttggtgccgatcctcaagccctgctgacgttacccggtttctgtgagttacgccgtcaccttgatgccctgccaacacagttcctcgacagccgtattcgccgtttccagacatttgctgaaattagtactgtccccggtccgcattttggcttggggcttgaagcctatgccacctggacatctccaatccgtaaatacggcgacatggtcaatcatcgcctgctgaaagcgatgattactggtcaacaagcagaaaaaccacaagaagagatcacggtccaattggctgaacgtcgccgcctgaatcgcatggctgaacgtgatgtcggtgattggttgtatgcccgttatctgcaaccacaagcaggaactgacactcgtttcacggcagagattattgatatcacccgcggtggcttgcgtgtgcgtttactggataacggtgccgttgcctttattcctgcgccgtttattcacgcggtgcgtgatgaagtggtctgcagccaggaaaccggtactgtgcagatcaaaggcgaaacagtttatagccaaagtgacaaaatcgaggtacgtattgcggaagttcgcatggaaacccgtaatgtcattgctcgcccagtagcttaa

SEQ ID NO: 41908 - DNA, 1479 bp, Yersinia pestis
atggctaactatttcaacacattgaacctgcgtcagcagttggcgcaattaggtaagtgtcgctttatggcacgtgacgaatttgccgatgaagccggctacctgaaaggcaaaaaagtggtgattgtcggttgtggcgcacagggcctgaaccaagggttgaacatgcgtgactccggcctggatgtcgcttatgccctgcgtaaagaagcgattgccgagaagcgtgcttcatggcgtaaagcgaccgaaaatggtttcaaagtaggcacttacgaagagttgatcccacaggcggatctggtggttaacctgacgccagacaagcagcactctgccgtggttaaggcggttcagcctctgatgaaagagggcgcagcactgggttactcgcatggtttcaacattgttgaagtgggtgagcaagtgcgtaaagacatcaccgtggtgatggttgcgccgaaatgccctggtaccgaagttcgtgaagagtacaaacgtggttttggtgtgccgacgctgattgcggttcatccagaaaacgaccctaaaggcgaaggcatggcgattgctaaagcctgggccgcggccaccggtggtcaccgtgcgggtgtactggaattttcttttgttgccgaagtgaaatctgacctgatgggcgagcaaactatcctgtgtggtatgttgcaggcgggttcactgttatgtttcgacaagttggtttcagagggtactgatgccgcttacgctgaaaaactgattcaattcggctgggaaaccattaccgaagcgctgaaacaaggcgggatcacgctgatgatggaccgtttgtctaatccagcaaaactgcgtgcgtatgcattatctgaacagttgaaagaaattatggcgccattgttccagaaacacatggacgacattatttctggtgcgttctccagcggcatgatggctgactgggctaacgatgacgttaagttgttgaactggcgtgaagagaccggcagaacggcttttgaaaatgcgccacagtttgaaggcaagatctctgagcaggaatattttgaccacggcgtactgatgatcgcgatggtaaaagcgggagttgagctggcattcgaaaccatggtggattccggcattattgaagagtctgcttactacgaatctctgcacgagctgccgttgattgccaacactatcgcccgtaagcgtctgtatgaaatgaacgtggttatctctgataccgcagaatacggtaactacttgtttgctaatgcagcggtgccgttgctgaaagagaagtttatggattccctgcaagccggtgacttgggtaaaagtatccctggttcggcggtagataacgcacaactgcgtgatgtgaatgaagccattcgcaatcacccgatcgaagccgttggtcataagctgcgtggttacatgacagatatgaagcgtattgctgttgcgggctaa

SEQ ID NO: 41909 - DNA, 744 bp, Yersinia pestis
atgaagataagtattattactgctacatataatagtgagagaacaatttcggataccctatcttctttggagaaacaaacctatctggatgttgagtatattattgttgatggtgcatcaaaggataatacattaactgttattagtcagaattctacgcgagtcactaagattattagtgagtctgatcaaggtatttatgatgctttgaataaagggatagatttggcaacaggtgacattattggttttttacattctgatgatttacttgcctatccaggggccctatctgatattgtagaaacctttgaaaaacagcaatgtgatgctgtatatggtgacttacagtatgtcgcaaaaaatgatttaaataaggtaatcagatgttggaaaagtggtttttttaaccatgaaaaaatgaagtatggttggatgcctccccatcctactttttatatgaaacgagatctttatataaggtttggaggttttgacttaagttataaaatatcagccgactatgattctcttacgcgttatataatcaattataaaattaaaattgcttatttacctaaggtaattattaaaatgagagttggggggataagtaatcggtcattgggaagtatgttgttaaaatctaaagaagatatacaaataatgaaactccgtgggctattctggcctatgtcgtttttatgcaaaaacttatctaaacttcctcagtttttaaagtga

SEQ ID NO: 41910 - DNA, 1047 bp, Yersinia pestis
atgctgttaaccgatttgggcaacgttattctcccacgagctcgttctgccatggaggagttgactcggatcccggcactgttgcgtcggttacaacaacgcgacgatgagggtattgaagaccttgaacccacatggttattcaatgaacggcggctacagattttcctctcgctctatcgccagcagcacgcgttgcatgtcgctcaggcactggatatcacccagtcggcggtaagcgccgcgttgaaggttttggagaagggggcgggtatgtatctgttccatcgaacaccaaaagggatgttgccgacccctgccggtcatgaaattgcgccctgtatcagccgggcattgaatgcgctccaccatattccggaagagatcaccgcacatagaggggatttgaccggctcggtacgtgttggcgctctgccattaagccgtgcacgcctgctaccacaggcaatgatcaagctgatttctcgccaccctggcataaaaatagtcactaatgagagtggatttaccgccctgatagctgaactgcgcgccggtgatatagatttcattatcggtgcactgcgcaatgagaaaatgcttttagatatccatagcgaaatattatttgaagaagagctgattttattggcgcgacccaaccatcccctgtctgatcgcagggtaaaaaaccaagaactaaaagatattcaatgggttttaccccgaaatcacgccccatcacgccacctgctggaagtcgcattctgcaaaatgggactcgcatcgccccagccagtagtcgaaagcggtgatcccgccgtggtacgtgcgctattgcttggttctgatatggtggcggcagtttcctcccatcaacttgattttgaagtttcagaagggatcctcataccgctgcaggtcaaccttacaggtacgcgacgcgagataggcctgatgactcgccagaaagccttgaattcacccgctaccgatgccctgatcaattgtgttcgcgaagttattcaatcgagtaacgataaatag

SEQ ID NO: 41911 - DNA, 1851 bp, Yersinia pestis
atgcctaagtaccgttcccataccaccactcatggccgcaatatggccggcgcccgcgcactgtggcgcgcaaccggtatgaccgatgatgacttcggcaaaccgattattgcagtcgttaactcctttacccaatttgtaccgggccacgtacatttgcgcgatttaggcaagctggttgcggagcaaattgtagcttctggcggtgtggctaaagagttcaacaccattgcggtggatgatggtatcgcgatgggccacggtggcatgctctactctctgccatcgcgtgaattgatcgccgactccgttgagtacatggttaacgcccactgtgcggatgccatggtgtgtatctctaactgtgacaaaattaccccagggatgctgatggcgtctctgcgcctgaatattccggtgatctttgtgtctggtggcccgatggaagccggtaagaccaagctgtcagataaaatcatcaagctggatttgatcgatgccatgattcagggtgcgaatcctaatgtgagcgatgaagagagcgcccagattgagcgttctgcttgcccgacctgtggttcttgctccggtatgtttacggctaactcgatgaactgcctgaatgaagcgctgggtctggcgttgccgggtaacggttcattgttggcaacccacgctgaccgtaagcaactgttcttggatgcgggtaaacacattgttgccttgaccaaacgttattatgaacaagatgacgtcagcgccttgccacgcaacatcgcgaataaagcggcctttgaaaacgccatgatattggatatcgccatgggcggttccacgaataccgtattgcatttgctggcggcggcgcaggaaggtgaaattgatttcagcatgaccgatatcgatcacctgtcccgtaaagtcccacatttgtgcaaagtggccccgagtactcagaaataccacatggaagatgtgcaccgtgcggggggggtcattggtattttaggtgagttggatcgcgctggtttgcttaaccgcgatgtcagtaacgtgttggggctgaatctgacacaaacgctggaagcctatgacgtgatgctgactcaggatgaaggcgtgaagcagatgtacgccgcaggcccagccggtattcgcaccactaaagcgttctcacaggattgccgttatccgtcactggataccgatcgcgaagagggttgtatccgtacccgtgaacatgcctacagccaggatggtggtttagcggtgttgtacggcaatattgcggcagacggctgtattgttaaaactgcgggtgttgataaagacagcctgacgttccgtggcccggcgaaagtatttgagagccaggatgaggcggtagaggcgatcctcggtggtaaagttgtggcgggtgatgtggttgttatccgttatgaagggccaaaaggggggccgggtatgcaggaaatgctctatccgaccacttatctgaaatccatggggttgggcaagagttgtgccttactgaccgatggccgtttctctggcgggacatccggtttgtctatcggccatgtgtctccagaagccgccagtggtgggttgattggtttggtacaagatggcgatttcatcaatatcgatattccgaaccgtggcattgtcttggatgttagcgaagctgaactggctgctcgccgtgaaactgaagaagcgcatggtgatgcggcctggtcaccgaagggccgtgagcgccaggtctcttatgccttacgcgcttacgcgatgttagcaaccagcgctgataaaggcgcggtgcgcgataaaagtaagctgggaggctaa

SEQ ID NO: 41912 - DNA, 927 bp, Yersinia pestis
atgacgaagaaagcggattacatttggtttaacggcgaaatggttccatgggcagaagctaaagttcatgtgatgtctcacgcgttacactacggaacgtcagtcttcgaaggtgtccgttgctacgaatcccataaagggccggtagttttccgtcaccgtgagcatatgcagcgtttgcatgattccgccaaaatttatcgtatgcccgtctcccagtcagtggatgaactgatggaagcttgccgtgccacgctgcgcaaaaataatctgaccagtgcttatattcgcccgttagtctttattggtgatgtcggcatgggcgtgaatccaccggagggttataacactgacgtgatcattgccgctttcccatggggtgcttatctgggtgcagaagccttggagcaaggcattgatgctatggtgtcatcatggaaccgtgttgcacccaataccatcccaacggcggcgaaagcaggcggtaactacctttcatccttgctggtgggcagtgaagcacgtcgccacggctatcaggaagggattgcgctggatgttcatggttacctgtctgaaggtgccggtgagaacctgttcgaagtgaaagatggcatcctgttcacaccaccatttacctcgtctgccctgccgggtatcacccgtgatgccattatcaagctggcgaaagatatggggctggaagtgcgtgagcaagtgttgtcacgtgagtctctgtatctggccgatgaagtgtttatgtccggtactgcagcggaaattaccccagtacgcagcgtggatggtattcaggttggtattggcaagcgcggcccggtcacagccaaaattcaacaagcgttcttcggcttgtttaccggtgaaaccgaggacaaatggggctggctggatcaggttaatccataa

SEQ ID NO: 41913 - DNA, 549 bp, Yersinia pestis
atgcaattgaatataccgacttggcttaccttgttccgtgttgtgctcatcccattcttcgttctggcgttttatttgccgttcgtctgggctccgatggtttgcgccatcatatttgtgtttgccgcggcaaccgattggtttgatggctttttagctcgacgttggaaacagacaacccgttttggtgctttccttgatcctgtagcggataaagttatggtagccgttgcattagtattggttgctgaacattaccactcttggtggattacattaccggctgcaacgatgatcgcccgagaaattatcatttcgtctcttagagaatggatggcagaaattggtaaacgcagcagcgttgcggtgtcatgggtaggtaaggtaaagacgatggcacaaatggggtcacttgttgggttgctttggcgccctgaccacaatgttgaacttgccagtttcgttttactttatattgctgctgtactgacattctggtcaatgttccaatatttgaacgctgcctggagtgatttgctcgaaccttga

SEQ ID NO: 41914 - DNA, 1041 bp, Yersinia pestis
atgagtgaacccatggtattaagcaaacccactgtatccagtaaacctatcgtattcagcggcgcacagccgtccggcgaattgaccattggtaattacatgggtgcgcttcgtcagtgggtacagatgcaggatgattatgattgcatctattgcattgttgacctgcatgcaattacggctcgccaagatccggcactgttgagaaaaagaacattagatacgctggcgctgtatctggcctgcggtattgatccgaagaagagcaccatttttgttcaatcccatgtacctgaacactctcaattgagctgggcgttgaactgctatacctactttggtgaactgagccgcatgacccagttcaaagacaagtcggcgcgctatgcagaaaacatcaatgcgggcttgttcgattacccggtgttgatggcggcagatattttactgtatcaaaccaaccaggtaccggtgggggaagaccaaaagcagcatttggagctgagccgcgatattgcgagtcgtttcaataatctgtatggcgatatttttaaaatccctgagccgtttattcctaaagctggcgcccgcgtcatgtctttacaggatccgaccaagaaaatgtctaaatcggatgacaaccgtaacaatgtgatcgagttactggaagatcctaaatcggtggttaaaaagattaagcgtgccatgacagactctgatgaacctgcgctcattcgttatgatgtagagaaaaaagccggcgtgtctaatttgctggatattctgtctggtgtgaccggtcaatcgatcccagagctggaagcgcagtttactggccagatgtacggtcatttgaaaggagcggtggcagatgccgtttctggcatgttgagcgagctacaagagcgttatcgtacttatcgtgaagatgaggcgttgttgcaagatgtgatgcgtgaaggtgccgccaaggcccgtgcccgcgcacaagtaaccttggctaaagtgtacgaagccatcggttttgtcgcgcagccgtaa

SEQ ID NO: 41915 - DNA, 2547 bp, Yersinia pestis
atgagcaaaataaaaattgccatcattggcaacggcatggtcggccaccgctttatcgaagacttattggataaagcggataaggaccaatttgatataaccgtattttgcgaagaaccccgcattgcttacgatcgcgtgcatctttcctcttacttctctcatcataccgcagaagaactgtcactggttcgcgaaggcttttatgaaaaacagggcgtgaaggtgctggtgggtgaacgcgccatcacgatcaaccgtgctgaaaaagtgattcactccaacagtggccgaagcctgtattacgacaagttggtgatggcaacgggttcttatccgtggatcccacctattaaaggtagcgaagggcaagattgctttgtttaccgcaccattgaagacctgaatgccattgaggcctgtacccgtcgcagcaaacgtggtgccgtcattggcggtggcctattagggctggaagccgcaggggcattaaagagcctcggcgttgaaacccatgtgattgaatttgctcccgtcctaatggctgaacagcttgatccgatgggcggtgaccaactgcgtcagaaaattgaacgcatgggggtcagagttcataccggtaagaatacccaagaaattgtacattccggccaaaatagccgcaaaaccatgttgtttgctgatgggacgcagttggaagttgattttatcgtcttctccaccggtatccgtccgcaggataaactggcgaatcaatgtggtttagccactgcccgccgtggtggtattgctatcaatgattattgccagacatccgatcctgatgtctacgccattggcgagtgtgcgtcatggcaggaacgaactttcgggctggtcgcgccgggttataaaatggcgcaggttgccgcagaccatctgttaggccgtgagaatgctttcctcggtgctgatatgagcgccaaactgaagctgctgggcgtggatgttggcgggattggtgatgcccatggccgtactgaaggtgcacgcagctacgtttatctggatgaaagcaaagaaatttacaagcgtttggtggtcagtgccgataacaaaaccctattgggtgccgtactggttggcgataccaccgattacggtaatctgctgcaactggcgttgaataacatcacattaccggaaaacccagacagcctgatcctgcccgcccatgcaggtaataaacccaccatcggggtggattccctgccagatagcgcccagatttgctcctgctttgatgtgaccaaaggcgacattattcgggcgattggacagggctgccagactgtcgccgcgctaaaatccgcgaccaaagccgggaccggttgtggcggctgtattccgctggtcacccaagtattgaatgccgaattaagtaagcaaggcattgaagttaataatcatttatgtgaacacttcgcctattcacgccaagaactgtatcacttgatccgcgttgaagggattaagacgtttaccgaattacgggaaaaatacggcaagggctacggttgtgaagtctgtaaaccgacggtcggttcactgctggcgtcgtgctggaatgagtatgtgctggagccacagcatacgccgttgcaggataccaatgataacttcctcggtaatattcagaaagatggcacctactcgattattcctcgttcaccaggcggtgaaatcacaccggatggcctgctcgtcgttggtcagatcgccaaagaatataacctgtataccaaactgaccggttcccaacggatagggatgtttggcgcacaaaaagatgacctaccggctatctgggcacggttgattgacgcgggctttgaaacgggtcatgcctacgccaaagcactgcgtatggcaaaaacctgtgttggcagtacctggtgccgcttcggtgtcggggatagcgttggctttggtgtggccttggaacatcgctacaaaggtatccgcgcaccgcacaaaataaaatttggcatctctggttgtacccgtgaatgcgcagaagctcagggcaaagacgtggggatcatcgccactgaaaatggctggaatctgtatgtctgcggcaacggcggcatgaaaccgcgtcacgcggatttactggcagccgatttggatgaagagacgctaatgcgctatctcgaccgctttatgatgttctacatccgcaccgccgataaactacagcgcacctccgtctggctggaaagtttggaaggggggattcgctacctacaattggtgatccttgaggacaaactgggcattaacgatcaactggaagcagagatcgcccgtctgcgcgacaaggtcgcctgcgagtggaaagccactgtcgagaacccagcagcacaagtgcgttttgcccactttattaatagctcattgcgtgacccgaatgtacaagtcgtgcgcgaacgagagcaacaccgcccggcccgcccagatgaacgcatcccggtcagggttctggaactggaggataacgcatga

SEQ ID NO: 41916 - DNA, 1185 bp, Yersinia pestis
atgaacaacagcaatcgcattcggctcacttggatcagttacttgtcttacgcccttactggcgcgttagttattgtcaccgggattgtgatggggaatatcgcagagtatttcaatctgcctattgccagtatgagtaacacatttacttttcttaacgcgggtattttaatttctattttcctcaatgcctggttgatggaaatcatcccgttaaaacgccagttggtctttggtttcattttgatgttgatcgctattgccggattgatggtcggccataatttaatgatcttctcaatcagcatgtttattttcggggtggtcagcgggattaccatgtcgataggcaccttcttggtcacccatatgtacgagggtcgccagcgcggttcacgactgctgtttaccgactcctttttcagtatggcggggatgattttcccaatcgcggcagccatgctgctggcgcgtcacattgaatggtattgggtctacgcctgcatcggcctattgtatgtcgggattttcgtgctgactctgtgctctgagttcccggttcttggtcataaagccacagaccaaagcaagccagtggtgaaagagaaatggggagttggtgtgttgtttctggcgattgctgccctgtgttatatcctcggccaactcggttttatccagtgggtccccgaatatgcaaccaaaaccttcaatatgaatattagccaggcaggccaattggtcagtaacttctggatttcatacatgatagggatgtggatattcagctttatcctgcgcttctttgacctgcaacgtatcgtaaccgtgctggcggccatggcaacactggcgatgtatctgtttgtcagcaccgataaccctgcatacttgagttactacattttggcgttaggttttgtttccagtgccatttataccacgctgattacactcggttcgctgcaaaccaaagtgtcttcacccaagctggtgaacttcattctgacctgcggtaccgtagggaccatgctgacctttgtggtgacgggtccaatcgtcgccaacaacggtgtacatgccgcactggaaacggcaaacggtttgtatttggcggtatttatcttgtgtctggcattaggtttcttcaccaaacaccgtagtcacggccacgtgacccactga

SEQ ID NO: 41917 - DNA, 747 bp, Yersinia pestis
atggctgaatgggttagtggcaaaattactcacatcgagcactggactgacgcgctgtttagtctccaggttaatgcacccgtggatccgtttaccgccgggcagttcgccaaactggcgttggatattaatggtgagcgtgtacagcgtgcctactcttacgtgaatgccccgagcgaccataatctggagttttatctggtcacggtaccggaaggaaaactcagtccacgcctggatcaactatccgtggggggggaagtgatgatcaccaagcaagccgcaggttttttcgtactggaagaaattcccgactgcgataccttgtggatgctggcaaccggtaccgccattggcccttatttgtcgattttacaggaagggcaagatttggagcgtttcaagcatttggtactggtacacgccgcacgctttgcccatgacctcagctacctaccgctgatgcaacagcttgagcaacgctataacggcaagctgcgtatccaaaccgtcgtgagccgcgaagaatcacccggttctttaactgggcgggtaccggcgctgatcgaaaatggtgctttggaagcggcagttggcctaaaaattgatgcgaaagacagccatgtcatgctgtgtggtaacccacaaatggtgcgtgatacccagcaattactgaaagaacagcgcgaaatgcgtaaacatctgcgccgtaaaccggggcatatgaccagcgagcagtattggtga

SEQ ID NO: 41918 - DNA, 1284 bp, Yersinia pestis
atggatatgaaattttgtaaaaaccgttatatcaatacagtcattttaggggcaggcgttgcggggttaggtgcagctctgaaagcccgtgaagtaaatattgaatatgaaatttttgaagcaaaagcatctgcgggtggtttgttagacaattttgtcattgatggatatcgttttgataatgcagttcatcttagttttgctacagaagagaaagtaagagatatttttgatagaacaccttatttctctcattctccagatgctgtaaattttgaaacagataagtggttaaaacatccagtgcagaataacctttaccctcttcctgcaattgagaaagtcacactcattgagtccctgattcatcgtcctgagagtgagcttgctgataactacgaatcttggttaattcaccagtatggtaatgaaattgccaagcgataccctatgcgttatacacggaaatattggcagtgtaatgcgaatgaactatcggttagttggattggtaatcgtctacggcgagctaagctgtcagaaatattatatggcgcattcactgatgatactcctaatgattattatgcaaaagaaatgcgttatcccaaaaaaggagggtttaaatcttttattcaacctcttatagatgagagcattattaactataattatgaggttactgagattgacttatctgggaagactatcaaattctctaatggagtcataatcagttatgaaaatttaataaatacattaccactaccactgtttattgagttttgtggagctaatgtacctacaagtgtcaaaaaatccgcaagtaagttagaggcaacatcattagatctaatatctgttggcttcaacaagtctatcattaaagatttatggttttatatctatgatgaagatatttatgcaagtcgcgcatattctccctctgttaaatcatcggataatgttcctgacggttgcagttcgttacagtttgaaatttataatcccgggagagatagccagtatactgtacaggaattgaaagacaatgttatgtatgcaatgaaaaaaatgggagttgcaaatgatgaagatattgttttcttgcatcacaagcgtctcccatggggtaatgtagtattcaaaaaagatatggaaaagtatagggatattgttcgagaatacatttttgacaatcaagtgaaaagtgtaggacgttttggtgaatgggattatttatggagtaaccagagttttcttagtggatatagttcaatttaa

SEQ ID NO: 41919 - DNA, 849 bp, Yersinia pestis
atgagccaaaccgctagttctaccttaaaaggccaatgtattgcggagtttctcggtactgggctattgatattttttggtgcaggttgtgttgctgctttgaagttggcaggggccagttttgggcagtgggaaatcagtatcatttggggcctgggtgttgctatggccatttatttgacggcagccatttcaggcgcgcatcttaatccggccgtcaccatcgcattgtggttattcgcctgtttcgaacgccgtaaagttctcccttacatcgtggcacaggttgccggcgcattttgtgccgcggcgttagtatacggcctgtattacagcctgttcgtcgattttgaacaaactcaccagatggtgcgtggcagcaccgagagcctccaactggcaggtatcttctctacttacccaaatccacatatttctgtcgttcaagctttcttggttgaaacagtcattaccgccattctgatgtgtctgattctggcactgactgatgatggtaacggcattccacgcggcccgctggcccccctactgatcggtattctgatcgcagttattggtgcttcaatggggccactgaccgggttcgcactcaacccagcacgtgaccttggtccaaaagcattctcttatctggcaggctggggtgatattgccttcactggtgggcgcgatattccttatttcctggtaccgatcttcgggcctatcgtcggtgctttgttgggtgcatttggttatcgggccttaattggccgccacctgccctgtgatgtgtgtacccttgaggatgaagaatccacaacgataaccacagaacgtaaagcataa

SEQ ID NO: 41920 - DNA, 1020 bp, Yersinia pestis
atgggaaacaggagcctgtcaatgacacaacgaccgcgcaaagtaaaatgggttttgccgaaaggcgcgacacaatttggtgcactggcagttattttattgattgatagtctggtcgcaccgcatttcttctctatccatattcaggatggccggctgtttggcagtattattgatattttaaaccgcggcgcccccgttgctttattggcgctgggaatgacattagtcattgcgacgggtggcattgatttatcggtcggtgcggtcatggctatcgctggagcgactgccgcgacgttgaccagtgcgggatacccgttcatgacggtgctagcgctgtcactcgctgtcggggcgctatgtggtttgtggaatggtttcttagtggcggtattacaaatccagccaatagttgccacgctaatgttgatggtcgccgggcgcggaatcgctcagcttattactgaaggccagattgttacttttgatagtggcggtttggcaacgcttggtagcagtacgctgatgtatttacccatgtcagtggttattgcatgtagcatgttaattctggtgtggttgctaacccgtaaaacggcgcttgggttgttcattgagtcagtcggtatcaacttacgatctgctcggaatgcaggtgtgagtacccgtttagtgctgattgccgtttatgtgatttgcggtgtgtgcgctgcggtggcgggtattattgtgaccgctgatattcgtggtgctgatgcgaacaatgcgggcttatggctggagttggacgcgatattggcggtagttatcggtggtgcatcgttgatgggcggacgttttaatctactactttccgttattggcgctttaattattcagggtatgaatactgggattttactttctggttatcagccggagtttaatttggtgcttaaagccattgttgtgctggccgtattagttgtgcaatccccgatgatctcattaagccatctcttccagaggcgaaaataa

SEQ ID NO: 41921 - DNA, 645 bp, Yersinia pestis
atgcgtatcattctgctgggcgctccgggcgcaggtaaaggtactcaggctcaattcatcatggagaaatacggcattccgcaaatctctactggtgacatgttgcgcgccgctgtaaaagcaggttctgagttaggtctgaaagcaaaagaaattatggatgcgggcaagttggtgactgatgagttagttatcgcattagtcaaagaacgtatcacacaggaagattgccgcgatggttttctgttagacgggttcccgcgtaccattcctcaggcagatgccatgaaagaagccggtatcaaagttgattatgtgctggagtttgatgttccagacgagctgattgttgagcgcattgtcggccgtcgggtacatgctgcttcaggccgtgtttatcacgttaaattcaacccacctaaagttgaagataaagatgatgttaccggtgaagagctgactattcgtaaagatgatcaggaagcgactgtccgtaagcgtcttatcgaatatcatcaacaaactgcaccattggtttcttactatcataaagaagcggatgcaggtaatacgcaatattttaaactggacggaacccgtaatgtagcagaagtcagtgctgaactggcgactattctcggttaa

SEQ ID NO: 41922 - DNA, 1539 bp, Yersinia pestis
ttggacgccgcacagtcaccttatctggcttttcgtggcatcggaaaaagtttccccggtgttctggcgctggatgatatcagtttcacctgtcaggcgggccagatccatgcgctgatgggcgagaatggcgcggggaaatcaaccctattaaagatcctcagtggtaactacaccccgacacagggtgaaatccacattaaagggaaagccgttaactttaccaatactacggatgcgttggatgctggtgtggcgatcatttatcaggaactgcatttggtgcctgaaatgacagtggcagaaaacatctatctgggccaattacccaccaagatgggtatggttgatcgaaaattgctgcgttatgaatctcgcatacagctatcacatctggggttggacattgatcccgataccccactgaaatatctctccatcggccaatggcagatggtggaaattgccaaagcattagcccgcaatgcaaaaataatcgcctttgatgaacccaccagttcgctctctgcccgagaaattgagcaactgttccgcgtgatccgcgagttacgggccgaagggcgggtcatcttgtatgtctcccatcgaatggaagaaatttttgccctgagtgatgccattacggtgtttaaagatggccgctatgttcgtacgtttgatgatatgacccaagtgaataatgcgtcactggtgcaagctatggtagggcgtaatttaggggatatctatggttatcagccccgagagataggttctgaacgcttaacgctacaagcggtgaaggccatcggtgtggcctcgccgatcagcttgactgtacaccaaggggaaattgtggggctgtttgggttagtgggggccgggcgtagtgaactgctcaaggggctgtttggtgacaccaaactgaccagtgggaaactcttgcttgatggccaaccactgactatccgttcgccgattgacgctatttctgctgggatcatgttgtgtccagaagatcgaaaagcggatggcatcattcctgttcactcggtacaggacaatatcaatatcagtgcccgccgcaaaacattaaccgcaggctgtctgattaacaaccgctgggaagcggataatgcgttgctgcgtattcagtctctgaatattaaaacgccaggcccccaacaactcattatgaatctatccggggggaatcagcagaaagccattttaggacgctggttgtccgaggacatgaaagtgatcctgttggatgaaccgacccgtggtattgacgtcggggccaaacatgaaatctataacgtgatttatcaactggcgaaacagggcattgcggtgctgtttgcttccagtgatttgccggaagtgcttgggctggcagatcgtattgtggtgatgcgtgagggcgctatctctggtgagctagaccatgaatatgccactgaagagcaagccttaagtctggcaatgttacgcaccccgaatattgccaccaataccgcgtctgcggttgcctga

SEQ ID NO: 41923 - DNA, 987 bp, Yersinia pestis
atggttacactggaagacgtcgcggtattagccggggtatcccgtgctacggtttcccgcgtggtcaacggtgataccaatgtaaaggcccttacacgtgaaaaggttgagcaggctgtcgccgttctcggttataccccgcaccctgccgcacgggcactggcatccagccaaagtaatacgctggggttggtgaccacctcataccgagggggcttttttggtgccttaatggattttgtgcaaacagaaacagaatcccaaggtaaacaactgttggtcactcagggacgagataatgcagataaagaatggttagccattcagcggctgtataacttacgctgcgatgggttaatcctgcatgtgcgctttctcagcgacgaaaggctgcgtcagttagctgcagcaaaccggccttttgtattattggataggttggttcctgatcttgaagctcgctgtgtgacctttgatcaccatcatgccagccaaatggcaacgcaggtgttgattgatgcgggccatcgcgacatcgcctgtatcagcggctcttcacaacgccaatccagtgttttacgcattcagggctttcttgatgccatgcagttggcgggcttagaacccgtggcttgtttggagggcgtttacgatctggaaagtggctacctgcgggctgacgaaatcctcaagcaaccccggctaccgacggctatctattgctgtaatgaagagatggccattggagcattactggcgataaataaacacggtttacaggtgccgcaagatatttcgctgatttgctatgacagtggtgagcgtgctccttttgtctgcccagccttgaccagcgtacactttccaatcgtggaaatggcgcaatatgctacacagttactgattgacccgctgatccctgccgtcaatttcccacccgcgattatcatgcgtgattctgttatgccgccgaaaacagcgtgttaa

SEQ ID NO: 41924 - DNA, 1875 bp, Yersinia pestis
atgaatatgaaaggtcaagaaacccgtggattccagtctgaagtaaaacagctcctccatttgatgattcactcgctttattccaataaagaaatttttctgcgcgagctgatctccaatgcttctgatgctgcagataaactccgtttccgtgccctgtctaaccccgaactctttgaaggggatggcgaactgagagtgcgtttatcttttgataaagagaaacgtactttaaccctgagtgataacggcatcggtatgacccgtgacgaagtcattgataatcttggtactatcgccaaatcagggactaaagcatttcttgaatcaatcggttctgatcaggccaaagacagccaattaatcggtcaatttggtgtgggtttctactcagcatttattgttgccgataaagttaccgtacgtacccgagctgccggtgcccctgccgataccggtgtattctgggaatctgctggtgaaggtgattacaccatcgccgatataactaaagacgagcgtggtactgaaattacgctacatttgcgtgaaggcgaagacgagtatctggatgactggcgtctacgttctgttatcagcaaatactcagatcatattgcactgccggttgaaattcaggttaaaaatgaagaagacggcactgtcacctgggaaaaaatcaacaaagctcaggcgctgtggacccgtggtaaagcagaaatctctgacgacgaatacaaagcattttacaaacatattgcccatgattttaccgatccactcagttggagtcacaaccgcgttgaagggaagcaggaatacaccagcttgctgtatatccccgcgcaggcaccatgggatatgtggaaccgtgatcacaaacatggtttaaaactttatgtgcagcgtgtgtttatcatggatgaagctgagcagtttatgccgaactatctgcggtttgtccgtggtttgatagattcgaacgatctgccgctgaacgtctcccgtgagattttacaagacagtcgtattacacagaatctgcgcagtgcattgactaagcgtgtgctgcaaatgctggaaaaactggctaaagatgatgctgagaaatatcagcaattctggcaacaattcggcatggcattaaaagaaggcccagcggaagatggtagcaataaagagactatcgctaagctattgcgctttgcttcaacgcataccgacagttccgcacagaccgtgtcactggaagactatgtcagccgtatggcagaagggcaggagaaaatttattacatcactgctgacagctatgctgctgcgaagagtagcccgcatctggaactgttccgtaaaaaaggtatcgaggtcctattgttatccgatcgtatcgacgaatggatgatgagctacctgactgagttcgaaggtaaagcgttccaatcggtcagtaaagcagatgactcactgaataaattggctgatgaagaaaatccagagcagcaagaagcagagaaagcactggagcccttcgttgaacgcgtgaaaacgttattgggtgagcgtgttaaagacgtgcgcttgacacatcgcctaacggatacacccgcaatcgtaacgactgatgcggatgaaatgagtacgcagatggctaagctattcgcggccgcgggtcaacaggctccggaagtgaagtacatctttgaactgaacccagatcatggcttggttaagcgtgctgcggaagttacagatgacactcaatttgcacaatgggttgagttattactggatcaggcgctgctcgcggagaggggaacattggaagaccctaaccagtttattcgtcgaatgaatcagttactcacggcttaa

SEQ ID NO: 41925 - DNA, 606 bp, Yersinia pestis
atgcaaaccagtccactcctggagtcattaatggaggcgttgcgttgtttaccgggtgttggcccgaaatcggcgcaacgtatggcatttcagctattacagcgcgatcgtagtggtggaatgcgcctggcgcaggctctgacacgggcaatgtctgaaataggccattgtgcagattgtcgtacatttaccgagcaagagcactgcaccatctgcttgaatccccgccgtcaacaaaatggtcaaatctgtgtggtcgaaagcccggcagatatccatgccattgagcaaactggccagtttggcgggcgttattttgtgctgatggggcatttatcacctatggatggtattggccctggtgatatagggctagatctactggagaaacggctttctactgaggctatcagtgaggtcattttagccacgaatccaaccgttgaaggggatgcaacagccaactatatcggccagatgtgtggccaatatggcatactggccagccgcatcgcccatggcgttcctgttggtggcgagttagaaatggttgatggcaccacgttatctcactcgttagcagggcgtaatcccatcaagtactga

SEQ ID NO: 41926 - DNA, 333 bp, Yersinia pestis
atgtttggtaaaggcggtattggcaatttaatgaaacaagcccagcagatgcaggaaaaaatgcagcagatgcaggaagaagtcgccaaattagaagttaccggtgaatctggcgcgggcttggtaaaagtgacaattaatggggcgcataactgccgccgggttgagatcgaccctagcctgttagttgaagatgataaagagatgctggaagacttgattgctgccgcattaaatgacgctgctcgtcgtattgatgaaacgcaaaaagagaaaatggcctctgtatccaatgggatgcaattgccaccaggctttaagatgccgttctga

SEQ ID NO: 41927 - DNA, 1977 bp, Yersinia pestis
atgagctatcaggtccttgcccgtaagtggcgccctcaaacgttcgccgacgtcgttggtcaggaacatgtcctgaccgcgctggctaatggcctttcattagggcgaattcatcacgcctatttattttcaggtactcgcggtgtgggtaaaacctcgatagccagattgctggctaaaggcctcaactgcgaaaccggtattactgcgaccccttgcggtacctgcgccaattgccaggagattgagcaggggcgttttgttgatctgatcgagatagacgccgcctcccggactaaggttgaggacacccgagagctgttggataatgtccaatatgcccctgcccgtggtcgcttcaaggtctatttgatcgatgaagtgcatatgctatcgcggcacagtttcaacgcgttgctgaaaacacttgaagagccgcctgcacatgtgaaatttctgttggcgaccactgatccacaaaagttacctgttacgatcctttcccgatgtttgcaattccacctaaaagcattggatgttgagcagatccgtgcacaacttgaaaaagtgttgctggctgaacaaatcacgagtgatgccagagccttgcaattactggcccgagcggctgatggcagcatgcgagatgcgctaagcttaaccgatcaggctgtatcaatggggcaagggcaggtcacgacagtaacagttagccaaatgctgggaacgctggatgacgaacagcctcttgccattattgaggcgttggtcagtgctgatggtgcccgggttatggctcagatagaacaggcggcatcgcggggtgtcgactgggaaaacctgttggtggaaagcttaagcctgctgcacaaaattgcgatggtacagttgctgccttcgatgctggataaccactatgcagctattgaaccccgtttacgggaactggcccgcacattaccgcctgctgatattcagctgtattatcaaaccttgctggtaggccgcaaagaactggcttatgcgccggatcgccgtatgggggttgaaatgaccttattacgcgcgctggcttttcatcctaaagccatcattgcggagccccaaatagcgcatgttgccgcgccatctgcaatagccgataacgctgtgcccacctctcagggggggcaacataggcaggaacccgcatcagtaccgccgagttcccatcaagaggctccgccgttaggtgctgtagcgtccagcgtccaacttccggaatcgacagcgcaattgcttcaggcgcgtacgcagttactgcgacagtcggggacgaccacaacaaaaaagaatgagccggcggcgccaggaaaagcgcggccggcaaactcagcactggagcgtttagcttcggtgactgagcgtagccagcagcgcctggcagccaaaacaacggaagagaagaaaccagcgaaaaaagaagcttatcgctggaccgcgaaaaatcaacctgaggtagcggctgaacctatcgctacgcctaaagcgttgcgttctgcgctagaacatgaaaaaacaccagagctttccgctaaattggctgaggaggcgatcgcccgtgatccttgggctgcagaggtcaataagttacagctccctaaattagtccagcagcttgcactgaatgcatttaaacaagaaatagaaccgggtaatatttgcctgcatctgcgttctgctcaacgtcatttgaattcagcgtcagcacaaaaagcgctgagtgatgcattgagtgaattacacggtaacgcggtgacactgagcgttattgaagatgacaatccggcggaacgtaccccgctggaatggcggcaggccatctatgaagaaaagctggcacaagcacgtcagtcaattattgcggataataatattcagacactgcgtcgattcttcgatgccgagctggatgaagacagtatccgaccaatttaa

SEQ ID NO: 41928 - DNA, 864 bp, Yersinia pestis
atggctaccaaaccccaggacgcgaatactacttcacgggaagctataacttctaaggctgactctcctcctcgcccgacagcactgatttttgattcgggtgttggcgggctgtctgtctatcaagagattcggcaactgttgccggatctccactatatatatgcttttgataacgtcgctttcccttatggggaaaagtccggcgaatttattgtcgagcgtgtgctggaaattgtgaccgcggtacagcagcgccaccctttggcaattgttgtcatcgcgtgtaacacggctagcactgtctctctgcctgcgttacgtgaacgcttcgccttccctgttgtcggcgtggtcccagcgattaaaccggcagtaaggttaacgcgtaatggcgttgtgggtttacttgccactcgtgcaaccgtccatgcttcttataccttagatttaattgcgcgttttgccactgattgcaaaatagagttgctgggttcatctgagctggtggaggtagcagaaaccaagttgcatggtggagttgtaccgctcgaggtattaaagaagattctccacccatggttaagcatgcgtgagccaccggatactatagtattgggttgcacccatttccctctattaacagaagagttagcgcaagtgctaccggaaggtacccggatggtcgattcaggcgctgccattgctcgccgaacggcttggcttatctcttctcaagagaatgttatttcttctcaagatgaaaacatcgcttactgcatggctttagacgaggatactgacgctttattacccgttttacagagttatggtttcccgaagctgcaaaaactaccaatttaa

SEQ ID NO: 41929 - DNA, 1176 bp, Yersinia pestis
atgctaaaaatgaataacgcagttcaaaactatgcttggggcagtactgatgccctgacccagctttatggcatacctaacccacaaggaatgccaatggctgaactgtggatgggtgcgcacccgaaaagcagttcccaggttcttgacgcaaatggccagtggcattcattacgtgatgtgattgatcaagatccagataacacgctggggagtgatattttcaagcgctttggtgaactgccattcctgttcaaagtactttgtgcagctcaacctctatcgattcaggttcacccgagcaaagcggcagcagaggtcggttttgctaaagaaaaccaggcaggtatcccactggatgcggctgagcgcaattataaagatgcgaaccataagcctgagctggtttatgccctcaccccttttcaggcaatgaatggttttcgcacactagaagatatccaggcgctgttacaaccactagcagcggcacaccctgatattgccgcgttcttgcgccaacccgatactgagcatttagccagtttatttgccagcttactcagtatgagcggtgagacaaaaacgcgggcactcggtattctgaaagcggcattgaatagccaactcggagagccttgggatacgatccgcagcatttcgtgtttttatcccgatgacagcgggttgttctccccactactgcttaatgccgtgacattgcaaccgggtgaggccatgttcctttatgccgaaacaccacacgcttacctcaatggggttgcattagaggtcatggcaaactcggataatgtgttgagagctgggctaacgccgaagtttattgatattccagagttaatgtccaatctgcaatttatccctaaaccggctaatgccctactcacaacaccaaagcaacagggtaatgaactgatattccctattcctgtcgaggacttcgctttctcactgcataccttggtggttgaaccacacgttctggcacaacacagtgcggcaattattttttgtgttgaaggctgtgcggtgctgaaaaaacaagagcaagaaattacgctgcaccctggtgagtcttgcttcatatcggctaaggaatcacctgtaaccgtgcaaggggtgggttcaattgctcgtgtttataacgcggtgtga

SEQ ID NO: 41930 - DNA, 1119 bp, Yersinia pestis
gtgactacttcattacacactacaaacactgtggcgccagcatcaacaaaaaatgatgatgacactgttttcactacgatccctaaactgcctcccctaaataagcgtccttatatacaacaaggtacgccagaattcatccgcgttgctctggctttattttcggcggggttagcaactttcgccctgctttactgcgtacaacctattttgcccatgttgtcgcaggactttagtacctctcctgcgtccagcagtttgtcactttcgatagccaccgggatgctggcgttgggtttgatgtttaccggccccctttctgatgcgataggccgaaaatcagtcatggtcgtggcgttgctattggccgcggtttgcacaatagtttgctcttttatgaccagttggcatgggattttgctaatgcgcgcattgaccggtctatccttaagcggagttgccgcggtggcaatgacctatttgagtgaagagatccatcctaattttattgcgctatcaatggggttgtatatcagcggtagttctattggtggcatgagtgggcgtttggtggctggggtattaagcgctctcttttcctggcgcgtatcactgctagtactcggattatttgctttagctgctgcttgcttgttttggtttatcctcccagcgtctaaacactttcgtgcaagttcattgcgccccagaacgttgttaatcaattttaaactgcactggcgtgactccggcttacccctactatttgctgaaggttttctcattatggggggggtcgtcaccttatttaattatatcggctatcggttactggatgggccttattatctcagcccgaccatcgtagggctattatccattgtttatttaacgggttcttatagttcacctaaagcgggttcactcagtaatcgctacgggcgaggcctaattttattggcctctatcggtatgatgttggttggtgttgtgatcaccagttttccgtcagtgatcatgatttttattggtatgatgttcgttgcagcaggattctttgccgctcactccgttgtcagtagctgggttggttgcagagcacgtcgtgctaaggcataa

SEQ ID NO: 41931 - DNA, 537 bp, Yersinia pestis
atgagtacagaaaaattattacaggtgctagagagccagattgaagcattgtcagctcaaatagccccgcaagccaatacgccttctcagcaagcacgttttgatctgaatttattcagtaaccacggcaatcgctttcgcgattacttgcaagaagtgcgcaaaaatatgacacagctaaaacaagttgttgaggaaaatcgcttacagcaagtggcatttctggcagataagttagttgcacaaatttcagccctacagagagaactagcaacacagaaaatacgaaaatccaatcctgaaccacgtgagcatcaatcagacccttatcacaaactggctgagcatcaagattatgaacggcggatcctggcgatgatccaagacagagaaagccaactgggtcggcagagtttgttagttgaacagcagaaaatacaaaaagagttagccgctctggaaggccgtttaatgcgttgtcgccaggcactgataagaatagagcgcagtattgagaaaaaagagaacggtttttga

SEQ ID NO: 41932 - DNA, 1401 bp, Yersinia pestis
atgcaacagcacttccattttgatgccattgtgattggctcgggccctggcggtgaaggtgccgcgatggggctggtcaagcaaggggcacgcgttgccgtgattgaacggtataataatgtgggtggcggatgtacccattggggtaccattccttctaaagccttgcgccacgccgttagccgtattatcgagttcaaccaaaaccccctctacagcgacaatgccagaaccataaaatcctctttcgctgatattttaaaccatgcagatcgtgttattaatcagcaaacccgtatgcggcaaggcttttatgatcgcaaccattgccacatgttctcaggtgatgccagcttcattgatgccaatacggttaatgtgcgttacgccgacggtaccagtgataccttgcaggccgataacattgtcattgcaactggctcgcgcccttatcgcccagtcaatgttgattttaaccatgaacgcatttatgacagcgataccattttgcagctcagccatgagccacagcacgtcattatttatggtgcaggggtgattggttgcgaatatgcgtctatcttccgtgggttgagtgtcaaagtcgatttgatcaatacccgtgaccgcctactggctttccttgatcaggaaatgtcagatgcgctctcttatcacttctggaataacggcgtggttatccgccataacgaagaatttgagcagattgaagggacaacggacggcgtgattgtccatttgaaatcaggcaaaaaggtcaaagcagactgcttgttatatgctaatggacgaacaggtaataccagcggtttaggcttggaaaatattggcctggaagccgatagccgtggtttgctgaaagtgaacagcatgtaccaaaccgcgctgtctcatgtctatgctgtcggtgatgtgattggttacccaagtctggcatctgcggcttatgatcaggggcgtattgctgcacaagccatgatcaaaggtgaagccaacgttcacctgattgaagatatcccgacgggcatttacaccattcctgaaatcagttctgtcgggaaaaccgaacaagagctgacggcgatgaaagtgccctacgaagtgggccgggcgcaatttaaacatctggcgcgggcgcaaattgttgggatggataccggtagtttgaaaatcctgttccatcgggaaacgaagcaaattttgggtattcattgctttggtgaacgtgctgctgaaattatccacatcgggcaagctatcatggaacagaaaggagaaggcaatacgctcgagtatttcgttaatactaccttcaactacccaaccatggcagaagcctaccgtgtggccgcactcaatggcttaaatcgcctgttctaa

SEQ ID NO: 41933 - DNA, 3420 bp, Yersinia pestis
gtgtcatcaagagcacgaattgcgttattcgatccatttctattctgtcgccagacgatgtttactctggttattattgttttattgttattttcttcgacctttgtgtttggaatatcggcctttgcgtctggaataaatgttgatgtgcccactcgcagcgaggtacagagccagctcgatttgttatcaaaacaaaaaatattatcgccggcggaaaagttagcacagcaggatttgactcaaacgttagagtaccttgataccattgagcgcactaaacaagaggctaatcaacttaaacaacaactggcacaagctcctgcaaagttacgccaggcaaccgaagggttagaggcgctaaaaagcagttcagctgataccatgaccaaggagtcattggctaattattcgttgcgccaattggaatcacgtcttaatgaaacgctggataatttacaatcggctcaggaagatctctccgcttataacagtcagctaatcgccctgcaaacacagccagaacgtgtgcaaagcgcgatgtatagcgcttctatgcgtttaatgcagatccgtaaccaactcaatgggctgacgccgaatcaagagagccttcgcccgactcaacagcaagaacttctggctgaacaagtgatgttgaacggccagttggatctagagcgtaaaaatctggaggcaaataccaccttacaagatttgctgcaaaaacaacgggattacacgactgcacacattaatcaactggagcgttatgttcagttgctacaggaggttgtcagcggtaaaaggctgattctctccgagaaaacagttaaagaagcgcaagcacagactgatggcagtgatatccaaaatgatccactcatcagccgtgaattggcaattaacaaagagttaagcgaacggctgattaatgccacgaaagaaggcaatacgctggttcagcagaatatccgggtaaaaaactggttagatcgcgctctgcaatctgagcgtaatttaaaagaacaaatcaccgtattgcgtggcagcttattactttcacgaattctctatcaacagcagctcaacttaccggcttccggccttatcaccaatatggggccacgcattgcagacttgcggctggagcaatttgaaattaaccagcagcgcgataagttattccaaggggacgactatatccaaaccctgatggagagcagtaaagagaaggttgacccaaatgtagaagatgcgctggggcagattgttgatatccgccgtgaactactggatcaattaaataagcaactgggtaaccaattgacactggcaatcaatttacagattaaccagcagcagttgctcagtgtcaatgagtcgctgcaacatacattaacgcagcaaatattttgggttagtagtaataagccaatggattggtcttggctgaaagccctgccaggggcgatcaaaaccgaactgagtaacttccaggttaccctgtcattgggggatgcgctggcaggcctgctcaaatcactggtttttctaataccaatgctggttgtggctgtggtgatccgctcccgttaccacatgatcaatacctatttggatcaactggctgctgatatcgggcaattgaaacgcgatagccaaatgcatacgccaaaggctattttgttgactgtgctgaaaatcttaccgaacgtattacttatcttggggatcggctactggtgtttgcgctcagatttcaacctcagtggcttgctctggagcttcttccagcgcctggcattgttctggctggtctttgagctgacctatcgcatgttatcgccggggggaattaccgagcggcactttatgatatcaaccgaccgttgcgcccattatcgccgccagatagtccgcttaggtgccgcgttgcttccggttattttctggtctgttctgggtgaacgaagccctctacggcttgtggatgatgttattgggcagatagtgattgttattgccttggcattattagcactgtttattttcccattctgccgtgatagctggcgtgagaaagactcccatgcggtacgcttagtcattatcactgcaatcactgcgacacctatagtattgatggggttaatggttgcggggtatttctatacaacattgcaattagctggccgttggattgatagcctgtatttactcttcttgtggaacattgtttatctgacggcgatccgtggattaggtgttgctgcacggcgcttggcataccgtcgagctattgcgcggcggcaaagtatggggaaagaaggggccgaaggcagtgaaccgatagaagaacctccattggctctggatcaaattaaccaacaatcattgcgcttgaccacaatggcgctattcctgatttttgctacctgtttttactggatctgggctgatctgataacggttatctcttatctggacagtatctcattgtggcattacaccgccactgtagctggtgcgagtgtaacgcaagcggtgaccttgggtaatatgctagtcgccttgatggcactggtggtcgcctatgttctgacccgaaatttaccgggcttacttgaagtggtggtgctatcgcgcttacaactacgccaaggcacttcttacgccattacgacgattttgacttacctgatcacggctgtgggggggataaccgccttaagttcgctcggggtttcatgggataaattgcaatggctggtggcagcgctctccgtggggctgggctttggtctacaggaaatatttgccaactttgtctcgggcttgattattctctttgagcggcctgtacggattggcgataccattacgattggtacctactcggggactgtcagcagaattcgtatccgtgccaccaccattaccgattttgatcgtaaagaagtcattgtgccgaataaagcatttgtgactgagcgcctgattaactggtcactatcagacacgatcacccgcatcattattaaagtgggggtcgcgtatggttcggatttggaaaaagtaaaagaagttctgctacaggcggctcatgccaattctcgggtaatgacagatccagagcctcaggtattcttccttaactttggttccagcacacttgatcacgagctacgcttgtatgtccgtgaattacgtgaccgcagttatacggtcgatgagctgaatcgggctattgataaattatgccgtgaaaatgacattaatatcgcatttaaccagttagacgtgtatttgcataaaccggatggtaccgaagttcaggaaatcagccgcccgattgaagctacaagcttgcctgctacgcaatcaatgctgggaaagccaaaacctgatttaccctga

SEQ ID NO: 41934 - DNA, 2121 bp, Yersinia pestis
atgaagtggcaacggcttatttatcatcctgaagttaactacgcactacgtcaaacattggtcctttgcctaccggcagcattggggtttgctatcggtgacttacggcttgggttgatgttttccctgatacctgcctgctgcaatattgcttccctggatacaccgcaccaacattttttccggcgtctgattattggcggcgtactttttacactgagcagtttcctgacacaacaactgttgctatggcatatccccttgcctgtgattatgctaggactggcattgatagtgggtgtcagcggtacgattagcccactgaatggccgcctacttcctgctgcattgatcgccgctattttcagtctcagcatggtgggccgcgcccctatctggcaggcacccttgctctgtgccgtggggacgctttggtatggcgtatttaactggttgtggttccggttatgtaaagaccaacctattcgcgagccactgagccagctttatcatttattggccgattattgtgatgctaaatacagccggcttacccagcatcttgaacccgaaaaagcgataccaccgctactcgatagacaacaaggaatgatggataaagttaatcagctttatcaacaatttaacttgttgcacaacaccaccaagaaagagcaaaagcgtttgttgggactgtttcagatggcgctggatttacaagagcacatcactgcagcgctgaatcagccagaagaaatgcaagatctgataaaaaagacgcccatagaagcggtgactcagagtaatgcgcaaattatttcagcccaaatgcgcgccattgctgatgacattctctatcaccgccgcaccgtagaacacttcaccgcgggtgtccctttagccgagctggaaacgatcgcacagcaaaatcccgacaacccggtggcacaattttgttactaccacattagccatatcacccaaatactgagcgaccgccgtccactgtataaccgcgacttgatgtccagtcagttgtcgcaacctttttggcctgctctggtaagttatttgtcgtttaaatccagtgcgctacgagatgccgcccgaataggggtgacactggccgtaggcagttatattggtgtattgatcaacctccccaaaccctattggattttgctcacaataatgttggtgatgcaaaacggttataacgccacgcgagtgcggatccatcaccgtgcgttgggcaccctggtagggctgatactggcggcgggtttgctgcacctacaaatgacagaaatcaccaccctcggcatcatgttactgatcacactgttgtcttatttagtacagcgtaaaaattatggtctggcggtcgtgggtagaacgataaccgccgtgtatatcttgcagttattgaccggggaaggcgctaactttttagtcccacgtttactggataccttgatcggttgtgccttggcacttggcagtgcgttatggctttggcctcagtggcagagcgggttattgcgtaaaaatgcccatcaggcactggaggcttatcagacgatcctgcgtttgctactgacccctcatcctgacattacgcaattagattatgagcgttttaacgtgaacaaggccagtaacaccgttttaagttcactaaatcaggcaatgcaagaaccggggttcaattcaaaatatttggcagatatgcgcctttgggccacccatagcgagttgattgtttgccatatcaatgagatgacaacactgatcagagagaatccattgactgaagtggactcaccatcaaccggtggtcatacactcatgagcactaaactggccgcaagctatttacagctatgtgagatggccatccagttgtgccaacaacggcttgaatcggataatcttgaggacaatgatagcgtcgttcagatacccgatatggctccagatacccaagcctcagagctagaacgtaatttacgcagggttctatcacacttaaacgtgatgcacaccgtttctgccatggcatggcaacagcagccacatcatggcatatggcgcagccggaagttacgggataatacgtaa

SEQ ID NO: 41935 - DNA, 3153 bp, Yersinia pestis
atggctaagttctttatagatcgccctattttcgcttgggtcatcgccatcatcatcatgttggctggtgcccttgcgatcatgaaattaccagtagcgcaatatccgaccattgcgccaccggcaattacaattgccgccaactatcctggcgccgatgcgacaactgtgcagaatacagtgacgcaggttatcgaacagaacatgaacggcatcgataacctgctctatatgtcttccagcagtgactcctccggtaacgttcagttgacgttgacctttaactctggcactgacccggatattgctcaggttcaggtccagaataaactgcaattagccatgccactgctgccacaagaagtgcagcaacagggcgtgagcgttgaaaagtccagtagtagcttcctgatggttgccggttttatttctgaagacggtacgatgcagcaggaagatatcgccgactatgtgggctctaacattaaagaccccatcagccgtacaccaggggtaggtgatgttcagttgttcggttcccaatatgccatgcgcatctggatggacccgcataagctgaataactacaagctgacaccggtcgatgtgattaacgcgataaaaatacagaacaaccaggtcgctgcgggtcaattgggggggacaccaccagtaccaggtcaggaattgaactcatcaatcattgcacaaacccgtttgaccaatgcagaagagttcagccagatattactgaaagtgaataccgacgggtcgcaagttcgcttgaaagatgtggctatcgttaaactgggtgctgaaagctataacatcattgcccgttataacggtaaaccggccgcaggtattggtattaagctggccaccggggcgaacgccttgaacacctctgcggcagtgaaagccgagttggccaaattacagccattcttcccatcggggttgaccgtagtttatccgtatgacaccacaccatttgttaaaatttcgattaacgaagtggttaagacactgatcgaagccattatcttggtgttcttggtaatgtacctgttcctacagaacttccgcgcaaccttgatcccaacgattgcggtgccggtagtgctattgggtacctttgctattttgtccgcctttggctattcgataaacaccttaacgatgttcgggatggtgctggcgatagggctattggtcgatgacgccattgtggtggtggaaaacgtcgaacgcgtgatgcaagaggagggcttaccaccgaaagaagcaaccaaaaaatccatggagcagatccagggggcattggttgggatcgcgttggtattgtctgcggtatttgttccgatggctttcttcggtggcgcaactggggctatttaccgtcagttctccattactatcgtttcggccatggtgctttcggttctggtggcattaattctgacaccagcactgtgtgcgaccatgctaaaaccgatcaagaaaggcgatcatggtccaaaaactggcttctttggctggtttaacaacatgttcgaaaagagtacacaccactataccgacagtgtcgccaatattttgcgcagcacaggccgttatctggttatctatctggctattgtgattggtatggcggtgcttttcatgcgtctaccgtcttcattcctgccagaagaagatcagggggtgttcctaaccatggtgcagttgcctgcgggtgctacgcaagaacgtacccagaaagtactgaaccatgtgacggattactatctcgacaaagaaaaaaacgtggttaactccgtgttcaccgttaacggctttggtttcagtggtcaaggtcagaacaccggtttggcattcgtgagtctgaagaattgggatgagcgtaaaggcgagcaaaataaagttccagccattgtcagccgcgcctctgctgcattctcgaaaattaaagacggtatggtgttcgcctttaacttacccgccattgtggagttaggtacggctaccggtttcgacttccagttaattgatcagggtaacctggggcaccaacaattaacggatgcacgtaaccaactgttgggtatggcagcgcaacatccagatatgctggttggcgtgcgccctaatgggctggaagatacaccacagtttaaagtggaagttgatcaggagaaagctcaagccttgggcgttgctatttctgacatcaataccacgctgggttcagccatgggcggcagctatgtaaacgactttatcgaccgaggtcgtgtgaagaaagtttatgtacaagccgatgcaccattccgtatgttgccggatgatatcgataagtggtatgtccgtaataatatgggtcagatggtgtcatttgcgaccttctccaccgcgaaatgggaatatggctcaccacggctcgagcgttataatgggttgccatcaatggagattctgggtcaggctgcaccgggtaagagtaccggcgaagccatggatctgatgcaagagctggcagctaaattaccaagtggcgtaggctatgattggaccggaatgtcctatcaggaacgtctatcgggtaatcaggccccagcactgtatgccatttcattgattgtggtcttcttgtgcttggccgctctgtatgaaagttggtcaattccattctccgttatgctcgtggtaccgctcggggttgttggtgcattactggcagccacactgcgcgggttggaaaacgacgtttacttccaggtaggcttgctgaccaccattgggctatcggccaagaacgccatcttgattgttgagtttgccaaagacttgatggataaagaaggcaagggcttggtggaatcaacattggaatcggtgcgtatgcgtctgcgcccaatattgatgacctcactggcctttatccttggggtaatgccactggttatcagtagtggtgccggttctggtgcacagaacgcggtaggtaccggcgtaatgggggggatgatcactgcgaccgtactggctatcttctttgttccgctattcttcgttgtggttcgtcgccgcttcagcagaaagactgatgatattgaacatagtcatccagttaacacgccggtgaaataa

SEQ ID NO: 41936 - DNA, 261 bp, Yersinia pestis
atgaagcccaatatccaccctccgtatcggactgtggtatttcacgataccagtgcggatgcttattttactgtaggttcaaccattgccactgagcgaacaatcgaacgcgatggccagacgtacccctacgtcacattagatatctcttcagcctcgcatccgtactacaccggtaagcaaaaagagtttgctaaagaaggcagtaccgcacgcttccaccaacgtttcggtagtttcttaacaaagaaaaccaactaa

SEQ ID NO: 41937 - DNA, 1374 bp, Yersinia pestis
atggcactatggggcggacggtttagtcaggcagcagatcagcgttttaagcaattcaatgattcactgcggtttgattaccggctggcagagcaggatattatcggttctgttgcctggtcgaaagcgctggttactgttggcgtattgaacgctgatgaacagcaacaacttgaacaggcgctgtcagttttactggaagaggtgcaggccaacccacacgctattttggccagtgacgctgaagatatccacagttgggtcgaaaccaaactgatcgataaagtgggtgatttaggcaaaaaattacacactgggcgcagccgtaatgatcaggtagcgaccgatctgaaattgtggtgtaagttccagataaccgaattacagacggcggtacaacaactgcaacaggcgttggtcatgaccgctgaagcgaatcaggatgcggtcatgcctggttatactcacttacagcgtgctcaacccgtgacgtttgcacattggtgtttggcctatgtagaaatgctgtcacgtgatgaaagccgtttacaagataccctgaaacgtctggatgttagcccattaggttgcggtgcgttggcgggcacggcgtatgctatcgatcgtgaacaactggcgggctggttgggctttgcttctgctactcgtaacagcctggacagcgtttctgaccgtgaccatgtgctggagctattatctgacgccagcattggtatggtacatttgtctcgctttgctgaagatttaattttcttcaacagcggtgaagcagcttttgtcgatttatcggatcgcgtgacatcgggttcctccctaatgccacagaagaaaaatccagatgcgctggagctcatccgtggtaaatgtggccgggtgcaaggtgcattaactgggatgacgatgacgctcaaaggcctgcctttggcttataacaaagatatgcaggaagacaaagaagggctgtttgatgcactggatacctggcttgactgcctgcacatggcggcattggtactggatgggattcaggtaaaacgcccgcgttgtaaagaagcggctgaacagggctatgctaacgcgactgaactggctgattatttggtcgctaaaggcgtaccgttccgtgaagcgcaccatattgtgggtgaagcggtggtagaggcaatccgccagggcaaagctctggaggccttagcgctgagtgatttacagcaattcagttccgtaattggtgatgatgtgtacccgattctggcattgcagtcttgcttagataagcgagtggccaaaggcggcgtttcgccgcagcaggttgcatcggccattgccgaggctaaagcgcggctgttttaa

SEQ ID NO: 41938 - DNA, 2715 bp, Yersinia pestis
atgctaattaaattattaaccaaagtttttggtagccgtaacgatcgtactctgcgccgcatgcaaaaagtagttgatgtcatcaaccgcatggaacctgatattgaaaaactgacagacaccgaattgcgcgctaaaacggatgagttccgtgagcgtttagcgaaaggtgaagtgttggaaaacttaattcctgaagcctttgcggtcgttcgtgaagcgagtaagcgtgtgttcggtatgcgtcacttcgacgtgcaactgctgggtgggatggttctgaatgagcgttgtatcgcagaaatgcgtacaggtgaaggtaaaaccttgaccgcaaccctgcctgcttacctgaatgcgttgagtggccgtggcgtgcatgtggttaccgtcaacgactatttggctcaacgtgacgccgaaaataaccgccccttgtttgagtttttggggctgagcattggtatcaatttaccgaatatgactgcgccagccaaacgcgcagcctatgccgctgatatcacttacggtaccaataacgaattcggtttcgactatttacgcgataatatggcgttcagtcctgaagagcgtgtgcagcgtcaacttcactatgcgttagtcgatgaagtcgactccatcctgattgatgaagctcggaccccgctgattatctccggccccgccgaagacagttccgaaatgtatattcgggttaacaaactgattccaaaactgattcgtcaggaaaaagaagactcggacagcttccagggggaaggtcacttctcggtagatgagaaatcacgtcaggttcatttgactgagcgcggtctgattctgattgaacagatgttggttgaagcgggcatcatggatgaaggcgaatcactgtattcgcctgctaacattatgttgatgcaccatgtcacggccgccttgcgtgctcatgtgctgtttacccgtgacgttgactatatcgtgaaagacggtgaagtgattattgttgacgaacatactggtcgtacgatgcaaggtcgccgctggtctgatggtttgcatcaggcggttgaagcgaaggaaggcgtggaaatccagaatgaaaaccagacactggcttctatcactttccagaactatttccgtctctatgaaaaactggctgggatgacgggtaccgcagataccgaagcatttgaattcagctcaatttacaagttagatacgattgtcgttccgactaaccgtcctatgatccgtaaggatttggctgatctggtctatatgaccgagcaggaaaagatcggcgcgattatcgaggatatccgcgaacgtacagcgaacggccagccagtgttggtcgggaccatctcgattgaaaaatccgaggttgtctctgcggagttaaccaaagccggtattgaacacaaagtgttgaacgctaaattccatgccatggaagcagagattgtttctcaggccggtcagccaggggcggtaaccatcgccacaaacatggcgggtcgtggtactgacattgtgctcggtgggagctggcagagcgagattgctgcgctggaagatccaactgaagagcaaattgcggcaattaaagccgcttggcagattcgccatgatgcagtattggcatcgggtggtttacacatcattggtaccgagcgccatgagtcacgccgtatcgataaccagttacgtggccgtgcgggtcgtcagggtgatgcgggttcttcacgcttctacttgtcaatggaagatgccttgatgcgtatttttgcctctgaccgtgtgtctggcatgatgcgtaaattgggtatgaagccaggtgaggcgattgaacatccatgggtgaccaaggccattgctaacgcacaacgtaaagttgaaagccgtaacttcgatattcgtaagcaactacttgaatatgatgacgtagcaaatgatcagcgtcgggctatctacagccagcgtaatgaactgctggatgtgtctgatgtcagcgaaaccatcaatagtattcgcgaagatgtcttcaaaaccaccattgacagctacattccgacccagtcactggaggaaatgtgggatatcgaaggcctggaacagcgcctgaaaaatgattttgacttagatatgccaattgctaaatggctggaagatgagccacaactgcatgaggaaaccttgcgtgaacgtattcttcagcaagctattgagacttatcaacgcaaagaggaagttgttggcattgaaatgatgcgtaacttcgagaaaggcgtgatgctgcaaacgctcgattccttatggaaagagcatttggctgcaatggattacctgcgtcagggtatccacttacgtggctatgcgcagaaagatcctaagcaggaatataagcgtgaatccttcgccatgttcgccgcaatgctggaatcactgaaatatgaagtgattagcgttctgagcaaagtacaagtgcggatgccggaagaggtcgaagcgctggaggtgcaacgccgcgaagaagcagagcgtttggctagacagcagcaactgagccatcagactgacaacagtgcattgatgtcagaagaagaggtaaaagttgctaacagccttgagcgtaaagtggggcgtaatgatccgtgcccatgtggttcgggtaagaaatataaacagtgtcatggccgcttgcagtaa

SEQ ID NO: 41939 - DNA, 522 bp, Yersinia pestis
atgaaaccttggcagccaaaggcattatggcaaatagtgggtggcgcggcattagcagtaagcctgacagggtgtgctcatcaaagcgcggaggctcccgttgcagcacctataagtacagcgacggttgcggcatcggtcgcacaatcaacggtccatgggaccgtgaatattcgtgaacgcgttgcattaccgcctgatgcggtggtaaccgtcacactgtcggatatctcactggctgatgctccatcgcgagttatcgcgcagaaggcggtacgtactgaaggtaaacaggcaccgtttacttactccttaccgtttaatccgtcggatatccagccaaatgcacgcgtcattgtcagtgccgcgatcacccgtaatgggcaattactgtttatcactgataccatccaggaagtcataaaccgtggcgcgggtactcaggccgatctattgctggtccctgtaccttcggtggcgcttgaaatcgttccagcgcctgccgctgccacgatacagtaa

SEQ ID NO: 41940 - DNA, 990 bp, Yersinia pestis
atgaacagcgttgatatcagcgtcattgtccccgtatacaattgcgcaaattatcttacggatctgctcgactcactgcgcagccaaacgggcgtctcgcttgagattattgccgttaacgatggctctaccgatcacagtctcgcactactggaacaggttgctcatattgattcccgattagtgattataaatcagcagaatcaggggctttctgaggcccgcaatgtggggatcgccaaggcgaaaggcaattgggttgcctttgccgatggtgatgattggctggcaccccatgccctgtcaacttggttacagcaggttaaacagcagaagctggatgtcttgattggtaacggctatcaatttagcagtaaccccgagcgaaaaccggtcactcccttattgggtcaacagccttggggagcgacgctcaatggtcaacaatggattatcctcagtgttaaacaaaaagagtggccacattatgcctggttgcaactgattcgccgcgatgtgatcagcactcaccaattacagtttattcgcgatatgcttcatgaagatattctgtggaccacccaattagcactcgtggcccagcgtatcgggttctgtgccacgcccttctatggctaccgtactaatcctgactcaatcactaactctccctcaatgcaggcactcctacgccgcgccaatagctacgttgatattatcaacgcactggttaagattgccgccagcaccaaaccaccggtgcgcgatgccttgctatctcatgccaatcaagaaagtggccatcttttagggttattacgtaaaaaactacctgcctcaccacaacgtaccgcattggcaattcgctttatcacattgggtctgcgccctgcactattccgtggtgtaaccaatctccatgaactctggcgagcaatacgttgctcattcttgatgggttcctatgcccggcaaaagcgcgctgaataa

SEQ ID NO: 41941 - DNA, 396 bp, Yersinia pestis
atggcagagcaacctcgcactcagggccccgctaaaggggtccttgatactgtccatcgcatcgccactatcgtggttggcatagtcgaaacccgtgtccggctggcagtgattgaattggaagaggaaaaggcaacgttggtccagttgctgatgatggcgggtattactctgctattaaccgctttcggtttaatgagtttgttggttttggtcatttgggcgattgatccagcctaccgtttagtggcgttgggtaccacgactgctgtgttactgatactggcactgatcggtgttatctggacactcactaaagtgcgtcattctacgttgctgggttcaacccgtaagcagttggaaactgaccgcgagttactggagaaagaccattga

SEQ ID NO: 41942 - DNA, 375 bp, Yersinia pestis
atggcaacgattaaccagctggttcgcaagccacgcagcatgaaggttgctaaaagcaacgttcctgcgttggaagcatgcccgcagaaacgtggtgtatgtacccgcgtatatacaaccactccgaaaaaacctaactccgcactgcgtaaagtttgccgtgtgcgtttgactaacggttttgaagtcacctcttacattggtggtgaaggtcataacctacaggaacactccgtgatcctgatccgtggcggtcgtgttaaagacttgccaggtgtgcgttaccacaccgttcgcggcgcgcttgactgctcaggtgttaaagaccgtaagcaatcacgttctaagtacggcgtgaagaagccaaaggcttaa

SEQ ID NO: 41943 - DNA, 1641 bp, Yersinia pestis
ttgaataaattacaagatacaggctctctcgcagttgttgaggccattgataagctggaaatgctctatgatgcagcgttagccgctttacgggatgcgatcagcgcatttattcgtgatggttctttgcctaatgcagcggaaagatccaaggggttatttagctacccacagcttagtgtccgatgggatggtaaatttagcgatcatcaccgcacgcgtgcatacgggcgcttttcccgggcagggcaatacagcaccacaatcactcgacccgcactgttcagggaatatctgaccgagcaaatgacgctgcttgaaagtgagtatggcgcggtatttgaagtgacaccgtcacaacaagagatgccttatccgtttgttatcgatggttcagacctgatccttgatcggtcaatgaccgcaggccttgcccagcacttcccgacgacagatctggctaaaatcggtgatggcatcaccgacggaattgaaacgatagcgcttggcacggcatcacttggcagcgcagtaagtgatctaccgttgtctcactttgatgcgctgcgcactgatttttccctcgcacggttaaaacactataccggtacgccagccgaagacattcaaccgtatattctttttaccaattacagccgttatgttgatgaatttgtccgttgggcgggtgagcaaattttggatccaaacagcccctataaagcactctcctgcgcaggcggtagttacatcacggcagagaatgccgatccggaaaaaaccctttctgacctggcgtggaaaaaacatcagatgccagcctatcacctgatagccaaaaatgggcagggcatcacattggttaatattggtgtcggcccctccaatgccaaaacaatttgtgaccacttggcggtattgaggccacatgtttggttgatgattggccactgtggtggcctgcgagaaagccaatccattggtgattatgtgctggcacatgcgtacttgcgtgatgaccatgttctggatgcggtattaccgcccgatattccgatccctagcattgccgagatacaacgcgccttgtacgacgcgaccaaagccgttagtggtatgccaggcgttgaggtaaaacaacgtctgcgcaccgggactgtcgttacctctgatgatcgtaactgggaattacgtttctccgcctcatcgctacgttttagtttaagtcgcgcggtggctgttgatatggaaagcgccactatcgccgctcaaggctatcgcttccgggtgccttacgggaccttgctttgtgtttccgacaagccattacatggcgaaattaaactgccggggcaggccaaccatttttatgagggggctatttctgagcatttgcagattggtattcgggcaatcgatttgatagggggatcgagcgctaaaatccgcgctatggcaacacgttgtcgcatcccccccgacaaatcttttgggtaccgtgtgcgaaactcacttaaacccagtgtattcagtaaatcttcaacgacagactggcatttttcttttgactctcctttaatgtccatgccgaatgctatatttttctccacattcatccatggaaacagcgcatattcttga

SEQ ID NO: 41944 - DNA, 306 bp, Yersinia pestis
atgccacaagataaaacctctgaacatttacgtgctgaacttaaatcattggcagatacgttggaagaagtgttgcagtcttcaaccgataaaccaaaagctgagttggataagctccgtgctaaggcagaaagcgcattgaaagatacccgagttcgtctgagcgaaacgagtgataaaattgcagcccaaaccaaagagatcgcagataaagcggataactacgtacatgacaatccatggactggcgtaggtatcggtgctgctgttggcgtggtgttaggcgttctgttgtctcgccgttaa

SEQ ID NO: 41945 - DNA, 381 bp, Yersinia pestis
atgttgttacgtcgatctctcctgctagctttaccgcttatcacgttttgtggcttcgcgaccgcagcctctgataatgaatgcgatataaaagctaaagaaattcaacagcagatagattatgccaagcagcatggcaatacccgccgcgccgcagggctggaaaccgccttaaaagaagtgaaaactcattgtactgaggaaagtctgcaagccgaacggcagaaaaaaatcagacaaaaacagcacaacgtgacagagcgccaacaagagctaaaagaagctcagcaaaaaggtgacgcgggcaaaattgccaagcaacagaaaaagttagccgaagcacaagccgagctacaacaagcacaatctcagcaacactaa

SEQ ID NO: 41946 - DNA, 390 bp, Yersinia pestis
gtgatcaactttaggggccgttttggccgcccgctctggcactatctggtactgccagtggtcctcttactgctggccgtcatcttattgacaccaatgatcgtacagactgaaagtacgttgaaaattcggccaaaccagcaagggctttcattacctgatggtttttatctgtatcaacatctgaacgggcgtgggattcacatcaaaagtattatcccggaaaatgacagcctagtggtaagcctagagttccccgagcaacagatgcaagcgattgaagttttgcaggatgtcttacccgcgggctatgcgattgtcgccagtgaatcgaaaaaacgtcatcgcctactgcccgtattcagaagtaatcaacaaaacttaggataa

SEQ ID NO: 41947 - DNA, 471 bp, Yersinia pestis
atgccacgtcgtcgtgtaattggccaacgtaaaattttaccagatcctaagttcggatctgaattgctggctaaatttgtaaatatcctgatggtagatggtaaaaaatctactgcagaagcaattgtctataccgcgctggagaccctggctcagcgttctggtaaagattttctggaagctttcgaagtagctctggataacgtgcgcccgactgtcgaagttaagtctcgccgcgttggtggttctacttatcaggtaccagttgaagttcgtccggttcgtcgtaatgccttggcaatgcgttggatcgttgatgctgctcgtaaacgcggtgataaatccatggctttgcgcttggcgaatgaactgtctgacgcagcagagaacaaaggttctgctgttaagaaacgtgaagacgttcaccgtatggccgaagctaacaaggcgttcgcccactaccgctggtaa

SEQ ID NO: 41948 - DNA, 2109 bp, Yersinia pestis
atggctcgtaaaacacccattgagcgctatcgtaatatcggtatcagcgctcacatcgacgccggtaagacaaccactaccgaacgtatcctgttttacaccggtgtaaatcacaaaatcggtgaagttcatgacggcgcagccaccatggactggatggaacaggagcaggagcgtggtattaccattacttctgcagctactacctgcttctggtctggtatggctaaacagttcgaaccacatcacgtcaatatcattgacacccctgggcacgttgacttcactatcgaagtagagcgttccatgcgtgttcttgacggcgcggtaatggtttactgtgcagttggtggtgttcagccacagtctgaaaccgtatggcgtcaggctaataaatataaagttccacgtattgcgttcgttaacaaaatggaccgtatgggtgcgaacttcctgcgcgtagttggtcaactgaaatctcgccttggtgcgaacccagttccactgcagttggcaattggcgcagaagaaaaattcaccggtattatcgatctggtgaaaatgaaagcgatcaactggaacgaagctgatcagggcgtgaccttcgaatatgaagaaatccctgctgatatggctgaactggctgctgaatggcaccagaatctggttgaatctgcggcagaagcgtctgacgagctgatggacaaatacttgggtggcgaagagctgaccgaagaagaaatcaagaaagctttacgtcaacgtgttctgaaaagcgaaattattcttgttacctgtggttctgcgtttaaaaacaaaggcgtacaggcaatgctggatgcggttattgagtacctgcctgcaccaactgacgttgaatcaatcaacggcatcttggatgatggcaaagatactccggctgttcgtcattctgacgacaaagagccgttctctgctctggcgttcaaaatcgctaccgacccattcgtgggtaacctgacgttcttccgcgtgtactctggtattgttaattccggtgataccgttctgaactcagtgaaatcgcaacgtgaacgcttaggtcgtatcgtacagatgcacgctaacaagcgtgaagagatcaaagaagttcacgccggtgatatcgcagccgctatcggtctgaaagatgtgactacgggtgacactttgtgtgacccgaataatccgatcatcttggaacgtatggagttcccagagccggtaatctctgttgctgttgaaccaaaaaccaaagctgaccaagaaaaaatgggtatggctctggggcgtttggcgaaagaagatccatcattccgcgtttggactgacgaagaatctggtcagactatcatcgctggtatgggtgagttgcatttggatatcctggttgaccgtatgcgccgcgaatttaacgtggaagcaaacgtcggtaaacctcaggttgcgtaccgtgaaactatccgcgaaaccgttaaggatgtggaaggtaagcacgctaagcagtcaggcggtcgtggtcagtatggtcatgttgttatcgacatgtctccattgccaccgggtggtgttgggtatgaattcgtcaacgaaatcgttggtggttctattcctaaagaattcattccggccgttgataaaggtattcaagaacagctgaaatctggccctctggcaggttacccagttgttgacgttaaagtgcgtctgcactacggttcttaccatgacgttgactcctcagaattggcatttaaattagctggttctatcgcttttaaagaaggtttcaaacgagctaaaccagttctgcttgagccaatcatgaaggttgaagtcgaaacccctgaagattacatgggtgacgtaatgggcgacctgaaccgtcgtcgcggtatcatcgaaggtatggaagatactgctaccggtaaaactgttcgcgtcaaggttccgttgtctgaaatgttcggttatgctactgacctgcgttctcagactcagggccgtgcttcttactccatggaattcttggagtatgctgaagcaccgagtaacgtcgctaaagccgttatcgaagcccgtggcaaataa

SEQ ID NO: 41949 - DNA, 1185 bp, Yersinia pestis
gtgtctaaagaaaaatttgaacgtaccaaaccccatgtaaacgtcggtactatcggccacgttgaccatggtaaaactaccctgacagcagcaatcaccaccgttctggctaaaacctacggcggtagcgctcgtgctttcgatcaaatcgataacgcaccagaagaaaaagcacgtggtatcaccatcaacacttctcacgttgaatatgatactcctgctcgtcactatgcgcacgttgactgcccaggtcacgccgactatgttaaaaacatgatcaccggtgctgctcaaatggatggtgcaatcctggttgttgctgcaactgatggccctatgccacagactcgtgagcacatcctgttgggtcgtcaggttggcgttccttacatcatcgtattcatgaacaaatgtgacatggttgatgatgaagagctgctggaactggtagaaatggaagttcgtgaacttctgtctgcttacgacttccctggcgatgatctgccagttgttcgtggttcagcgctgaaagcactggaaggcgaagctgagtgggaagctaaaatcatcgaactggctggttacctggattcttatatcccagaaccagaacgtgctatcgacaagccgttcctgctgccaatcgaagacgtattctctatctcaggccgtggtactgtagtaactggtcgtgtagagcgcggtatcgttaaagtcggcgaagaagttgaaatcgtcggtatcaaagatactgttaaatctacttgtactggcgttgaaatgttccgcaaattgctggacgaaggccgtgctggtgagaacgttggtgttctgctgcgtggtatcaaacgtgaagatatcgaacgtggtcaagttctggctaaaccaggttctatcaaaccacacactacctttgaatcagaagtttatattctgagcaaagatgaaggcggccgtcatactccgttcttcaaaggctaccgtcctcagttctacttccgtacaactgacgtaaccggtaccatcgaattgccagaaggcgttgaaatggtgatgccaggtgacaacatcaacatgattgttaccctgattcacccaatcgcaatggacgacggcttgcgtttcgcaatccgtgaaggcggccgtactgtaggcgctggtgttgttgctaaagtaatcgcttaa

SEQ ID NO: 41950 - DNA, 1491 bp, Yersinia pestis
atgcaaaatattataaagattcacccgctggataatgtggccgttgccctgcaagatctggctgcagatgagcggatcgagagcggtgagtttagcgtcaaactggctcagcccgtggttcgtgggcataaattcgcgttaaccgctatcgaactggggcagatgatcgtcaagtatggtttgcctatcggccatgcattgaccttgatccaaccgggcgaacatattcattcacagaacgccaaaactaatctgagcgatttggatgagtatgaatatcagccagagttcagttctctaccgccacaaatggctgatcgtgacgtgcaaatttatcgtcggccaaagggtgacgtggggatccgtaatgaactgtggatcataccaacggttggttgcgttaatgggatcgcccgtcagatccagcaacgtttcctgaaagagacacaggatgctgaagggattgatggtgtttacctgttcagccatccatttggctgctcgcaactggggcaggatcatgaaaatacccgcactatgctacaaaacatggtgcgtcacccgaatgcgggggcggtactggtcattggcttaggctgtgaaaacaatcaggtagatgttttccaaacgacattgggcaaggttgacgaagagcgcgtacgctttatggtttgccagcagcatgatgatgaggttgaagccggtttagagcatttacatgctctgtatcaggtcatgcgtcatgatcgccgggaacccggccagttaagtgaactgaaatttggcctggaatgtgggggttctgatgggctgtccggtattacggccaacccattactgggacgtttctctgactatgtgattaccaacggcggaacatcggtgctgaccgaagtgccggaaatgtttggcgcagaacgtattctgatgagccgctgccgtgatgaagccacgtttgaaaaaacggtcagcatggtcaatgacttcaaacagtactttattgcgcacgaccaaccgatttatgaaaacccatcaccgggtaataaagcgggggggatcaccacgctggaagaaaaatctctcggttgtacgcaaaaagcgggtcagagccaagtggttgatgtgctgaagtatggtgagcgcttacagcgcccaggactgaatttactcagtgcgccgggcaatgatgcggttgcgaccagcgcattagcaggtgcgggctgccatatggtgctgttcagtactggccgtggcacaccatacggaggttttgtaccaacagtgaaactggcaactaacagtgaactggcggcgaaaaagccacattggatcgattttgatgcgggtaagctgatccatggcacctcaatggataccttgctgaacgagtttgttgatctgattgttgagattgctaatggtaaacctgcccgtaatgaagtgaatgacttccgtgaattagccatttttaagagcggtgtaaccttgtaa

SEQ ID NO: 41951 - DNA, 630 bp, Yersinia pestis
atgattggtttagtcggtaaaaaagtgggcatgactcgtatcttcactgaagatggcgtttcaatcccagtaactgttatcgaaattgaagcgaaccgcgtaactcaggtcaaaagcctggagaacgacggataccgtgctgtgcaagtaactaccggtgctaaaaaagctaaccgcgttactaaaccagaagcgggtcatttcgctaaagctggcgtagaagctggccgtggtctgtgggaattccgccttccagaaggtcaagagtttactgctggtcaagaaattagcgtcgaaatttttgcagacgttaagaaagtcgacgttacaggtacgtctaaaggtaaaggttttgccggtactgttaagcgctggaatttccgcacccaagatgctacccatggtaactccttgtctcatcgtgttccgggttctatcggtcaaaaccagactccgggcaaagtgtttaaaggcaagaaaatggcaggccatatgggtgatgaacgtgtaactgttcagagcctggatgtagtacgtgttgacgctgagcgcaacctactgctggtcaagggcgctgttccgggagctaccggtggcaacctgatcgtaaaaccggctgtcaaggcgtaa

SEQ ID NO: 41952 - DNA, 606 bp, Yersinia pestis
atggaattggtaatgaaagacgcgccaggcgcgctgactgtttccgaaactaccttcgggcgtgatttcaatgaagcgcttgtacatcaggttgttgttgcttacgcagcaggtgcccgtcaaggtactcgtgctcagaagacccgtgctgaagtaacaggttccggtaaaaaaccgtggcgtcagaaaggtaccggccgtgcgcgtgcaggttctgtaaagagcccgatctggcgttcaggtggtgtgacctttgctgcaaagcctcaggaccacagtcaaaaagtaaataaaaagatgtaccgcggcgcgctgaaaagcattctgtccgaattggtacgtcaagatcgtctgatcattgtcgaaaagttctctgttgaagcacctaaaactaagttgctggcgcagaaactgaaagatatggctctggaagatgtgctgatcgtaacgggtgaactggacgagaacttgttcttggccgctcgcaacctgtacaaggttgatgttcgcgatgtagccggtattgatccagttagcctgatcgccttcgacaaagtggttatgactgctgatgctgtgaagcaagttgaggagatgctggcatga

SEQ ID NO: 41953 - DNA, 825 bp, Yersinia pestis
atggcaattgttaaatgtaaacctacgtctccgggtcgtcgccacgttgttaaagtggttaaccctgagctgcacaagggtaagccttatgccccgttgcttgagaaattaagcaaaagcggtggccgtaacaacaatggccgtatcactacccgtcatatcggtggtggccacaagcaacattatcgtctggttgacttcaaacgcaacaaagatggtatccctgctgtggttgagcgtctggagtacgatccgaaccgttccgcaaatattgcgttggttctgtacaaagacggcgaacgccgttatatcctggcgccgaaaggcctgaaggctggtgaccagattcaatctggcgttgatgctgcaattaaagcaggtaacaccctgcctatgcgtaacatcccagttggttcaacggttcataacgtagaaatgaaaccaggtaaaggcggccagttggctcgttctgctggtgcatacgttcagatcgttgctcgtgacggttcctacgttactctgcgtctgcgctccggcgaaatgcgcaaggttcaagctgattgccgcgccaccttaggtgaagttggtaatgctgaacacatgctgcgtgtcctgggtaaagcaggtgctagtcgttggcgtggtattcgtcctaccgttcgcggtacggcgatgaacccagtagatcacccgcacggtggtggtgaaggtcgtaactttggtaagcacccggtaaccccgtggggcgttcagaccaaaggtaagaagacccgtagcaacaagcgtactgataagttcatcgtacgtcgccgtagtaaaaaataa

SEQ ID NO: 41954 - DNA, 279 bp, Yersinia pestis
atgccacgttctctcaagaaaggtcccttcattgacctgcacttgctgaagaaggtagagaaagcggtggaaagcggagacaagaagcctattcggacttggtcccgtcgttcaacggtctttccaaatatgatcggtttgaccatcgctgtccataatggtcgtcagcacgttccagtattcgtttccgatgaaatggtcggtcacaaactgggtgaattcgcgccgacccgtacttatcgcggccatgcggccgataaaaaggccaaaaagcgctaa

SEQ ID NO: 41955 - DNA, 333 bp, Yersinia pestis
atggaaactatcgctaaacatcgccacgctcgttcttctgctcagaaggttcgcttggtagcggacctgattcgcggtaagaaagtgtcgcaagctctggaaactctaacctacaccaacaaaaaagctgctggtttggttaagaaggtactagagtctgccattgctaacgcagaacacaacgatggcgctgacatcgatgatctgaaagtcacgaagatcttcgtagacgaaggccctagcatgaagcgcattatgccgcgtgcaaaaggtcgtgcagatcgcatcctgaagcgcaccagccacattactgtggttgtgtccgatcgctga

SEQ ID NO: 41956 - DNA, 1446 bp, Yersinia pestis
atgaaccgtgtacctactttatccggcatagcattatcatccggcatagcattatcgactctgttactgtccagtgcgctattaacgcctaatgcgattgcggctgctacgggcttatatgaccgtgctgcgcatggtgatgtgactcaatttggcggcgcacgtcgtttgactgaagaccaaacccaggctctgcgtgactcgttatccaataaaacagtaaaaaatgtcattttgttgattggagatgggatgggcgattctgaaatcacgtctgcccgtaactatgcgatgggggccggtggtttctttaaaggcattgatgcgctgccgctgaccgggcaatacacgcactatgcactcgataaaaaaacacaaaaaccaaattatgtgactgattctgctgcatcagcgacggcctggtcatctggcgtaaaaacgtataatggtgcgttgggggttgatgtttttggtaaagaccatgttacgttgctggaactggccaaaaaagcaggcaaagcgacgggtaatgtctctaccgctgaactacaagatgccactcctgctgcgcagtttgcccacgtgaccgggcgtaagtgctatggcccggaagaaaccagtgagaaatgcagtaccaatgcattggaaaaagggggccgtggctctattactgagcaaatgattgaagggcgcgctgatgtcacgcttggcggtggtgcagcatcattcagccaggtcgctaaagccggtgagtggaaagaccagtcgttgcgtgatcaggcgttggcccgcggctacgtcattgttgagaaccttgatgacctgaacgcaataaaacacgctaatcaacagaaacctctattgggcttattctcgccaggtaatatgccagtgcgttggcaggggccaaaagcctcttatcatggcaatctggataaaccgccagtggtgtgtgaaaacaatgctgagcggaccagcgacattccaacgttggctgtcatgacagaaaaagccattgacctgctgaaaaccaatgagaatggcttcttcttgcaagttgaaggggcgtcgattgataaacaggatcactccgctaacccatgtggtcagtttggtgaaacggttgatctggatgaagcggtacaaaaagcgctggaattcgcccgtgctgatggcaacactttggtgattgtgacggctgaccatgctcactccagccaaattatcgagcctgaagcgaaggctccgggcctgactcaggcattaacgaccaaagatggcgcggtcatggcgatcagctacggtaactctgaagacgattctcaaggccatactgggtcacaattgcggatagcggcttatggtcctcacgcggctaacgtcgtaggtttaactgaccaaactgatttgttcttcaccatgcgggatgcgatggcacttaaataa

SEQ ID NO: 41957 - DNA, 408 bp, Yersinia pestis
atgcacacccatattaaagtccggggtttccatattgatgtttttcaacatgttaataatgcccgatacttagagtttctcgaagaggcccgttgggaatggctggatgggcaacccgtattccaatggatggttgagcaccaaattgcttttatcgtggtgaatatcaatattagctaccgtcggcctgctgtattaggtgacttgctacgtatcgatagccagttacttaaactaaacggtaaaagtggtgtgatgaagcatacgatcacgcttgaaccaacggctatcccggttgttgatgcggaactgacatttgtctgtattgaccaacgtagccagaaagcattgccgctggaaggtgagttgcgtgaaaaactggaggagctagtcaatcggggagcttga

SEQ ID NO: 41958 - DNA, 519 bp, Yersinia pestis
atgaaaacgttctttattgatcggatggcgaccccacagggcgaactattgcttattgcagacgaagaaaaccagttgcgtgccattgattggactgatcatcacgaccgcctgatgaaattactacgtaaccattacggtgcggatacgttcactttggttgaaaaacgcaaccccggtggattgagcgagagtatgcagcgctattttgcgggtgaattaagcattattgatacccttcccgtcaaaacagcgggtaccgactttcagcgccaagtctggcaagaactacgcaaaataccttgtggggaaactatttcctatggggaactggcaaaacgcattaatcgccccacggcttctcgggcagttggcatggccaatgggctgaatcctatttctattgttgttccttgccatcgggtgattggctcacaaggggcattgactggttatgcgggtggagtggaccgaaaacgttggttattagtacatgagggttatcttttaggttgctaa

SEQ ID NO: 41959 - DNA, 273 bp, Yersinia pestis
gtgaataagtcacaactgatagacaaaattgccgcaggtgctgatatttctaaagcggccgctgggcgtgcgttagatgcaattattacttctgttactgaatccttgaaagaaggggatgatgtggctctggttggttttggtacttttgcagtacgtgagcgttctgcacgtactggccgtaacccgcagacaggtaaagaaattagtattccagccgctaaagtaccgggttttcgtgccggtaaaggcctgaaagatgcagtaaactga

SEQ ID NO: 41960 - DNA, 2355 bp, Yersinia pestis
atgaaccctgagcgttccgaacgcatagaaatccccgtattgcctctgcgcgatgtggtggtttatccgcatatggtgatcccactatttgttggccgggaaaagtcgattcggtgcctggaagctgcgatggaccatgataaaagaatcatgctggttgcgcagaaagaagcttcgaccgacgaacctggtatcaacgatctgttttcggtgggtaccgtagcctcgattttgcaaatgctgaagttgcctgacggcacagtaaaagtgttggttgaaggtttacagcgtgcgcgtatcaccacgctttctgacagtggcgagcattttgctgcccaagcggaataccttgaatcacccgtgatggatgatcgcgagcaagaagtcttggtgcgtaccgcgattaatcagtttgaaggttatatcaaactgaacaaaaaaattccgccggaagtgctggcttcgctgcacagtattgatgatgcggcacgtcttgctgataccatcgctgcacatatgccattgaagttaaatgataaacaagctgttctggaaatgttcgatatcaccgaacgtctggaatacttgatggcgatgatggagtcggaaatcgatctgttacaggtcgaaaagcggatccgtaatcgtgttaaaaaacagatggaaaagagccagcgcgagtactatctgaatgagcaaatgaaagctattcagaaagaactgggcgagatggacgatacgccagacgagcatgaagcgctgaagcgtaaaattgaagcggctaaaatgccgaaagatgcacgtgaaaaaaccgaagcggaactgcaaaaactgaaaatgatgtcgccaatgtctgcggaagcaaccgtggtacgtggttacatcgactggatgttgcaggttccttggaatagccgcagcaaagttaaaaaagatctggttaaagcacaagaagttctggataccgaccactacggtttagagcgtgttaaagatcgtatcttggaatatctcgcagtccagagccgggtcagcaaaattaaagggccaatcctctgcttggttgggcctcctggggtcggtaaaacctctctagggcagtcaattgctaaggcaacgggccgccagtatgtgcgtatggcattgggtggggtgcgtgatgaagctgaaatccgtggtcaccgtcggacgtatattggttctatgccgggtaaattgatccagaagatggcaaaagtgggtgtgaaaaatccactcttcctattggatgagatcgataaaatggcatcggatatgcgcggagatcctgcttctgcgttactggaggtgctggatccagaacaaaacgttgcatttaacgatcactacctggaagtggattacgatctctcggatgtgatgtttgtggcgacctctaactccatgaatattccagccccgttgctggatcgtatggaagttattcgtctgtccggctataccgaagatgagaaactcaatattgctaaacagcatttgctgccaaaacaatttgagcgtaatgccatcaagaaaggtgagttgaccattgatgacagcgccattatgagcatcatccgttactacacccgtgaagctggggtgcgtagtttggaacgtgaaatttctaaactgtgtcgtaaggcggtaaaaaatctgctgatggacaaaacggttaagcacattgaaatcaacggggataacctaaaagatttccttggcgttcagaaggttgactatggtcgtgccgatactgaaaaccgcgtaggtcaggtaacgggtctagcgtggactgaagtgggtggtgacttacttactatcgagaccgcttgtgttccaggtaaaggcaagttgacttataccggctcactgggtgaagtgatgcaagagtcgattcaggcggctctaaccgtagtgcgtgcgcgtgcggataaattgggtatcaatcctgatttctatgaaaaacgcgacatccacgtgcatgtgccggaaggggcgacacctaaagatggcccaagcgcaggtattgcaatgtgcacagcactggtttcttgtctgacgggtaaccccgttcgtgctgatgttgcaatgacgggtgagataaccttacgcggcttagtattgccgattggcggtttgaaagagaaattactggccgctcaccgtggtgggatcaaagtggtgttgattccagatgataacaaacgtgatctggaagagattcctgacaatgttatcgctgatctggagatccacccggttaaacgaattgatgatgttttagccattgcgttggaacacccggcctttggtgcccagccagtagcgccaaaatag

SEQ ID NO: 41961 - DNA, 1527 bp, Yersinia pestis
atgcgtattggtgtaccaagagagcggttggccaatgaagccagggttgcagcaacgccgaaaacggtggaacaattgctgaaattaggcttcaccgtggcaattgaaagtggagcggggcatttagccagctttgacgatgcggcgtaccaagaagcgggtgccatcattacggataccactgatgtgtggcaatccgatcttatcctgaaggtgaatgctccctttgaggatgaaattgcgctgatgcgtgaggggagcacgttggtcagttttatttggcccgctcagaaccctgagttgctgcaaaaactggcagagcgtcaagttactgcattagcgatggattcagtgccgcgtatctcccgtgcgcaatccatggatgccctcagctccatggcaaatattgccggttaccgtgccattgttgaagcggctcatgaatttggccgtttcttcaccgggcagatcaccgcggcgggtaaagttccacctgcgaaggtgatggttattggtgccggagtcgctggtctggcggctatcggtgcggcggggagcctcggggctatcgtgcgtgcttttgacacccgtcctgaagtaaaagaacaagtccagagtatgggcgctgaattccttgagttggattttgaagaggaagcgggcagtggcgatggttacgccaaagtgatgtccgaggcctttatcaaagctgagatggaactgtttgctgcgcaagccgcagaagtagacattatcgtcactaccgcgctgatccctggtagaccagcaccgcgcctgatcaccaaagagatggtggcgtcgatgaagtcgggcagcgtgattgtcgatctggcggctcagacaggcggtaactgtgagttgacggtagctgatgaagtcaccatcacggaaaatggcgtaaaaatcattggctatacagatctgccaagccgcttaccgacgcagtcttcacagctctatggtactaacctcgttaacttattgaagttactttgcaaagagaaaaacggcgagatcgatattgatttcgacgataccgtgattcgcggtgttactgtggttaaaactggcgaagtgacttggccggcaccacctattcaggtttcagctcagccgcaggctgccaaagcggccccaatagcgaaggaagaaacgaagccctcatcaccgtggaccaaatacatcattatggcagttgctattgtgttgtttggttggttggcgaatgtggcaccaccagaattcttatctcactttacggtctttgcactggcgtgtgtagtcggttactacgtggtatggaatgtcagtcatgcgctgcatacaccgctgatgtcagtcactaacgcgatttcgggcattattgtggttggcgcgttgttgcagattggtcatggtggctgggtaagtttcttctcctttattgccgtactgattgctagcatcaacatttttggtggcttcactgtcacccagcgcatgctgaaaatgttccgtaaaaactaa

SEQ ID NO: 41962 - DNA, 1392 bp, Yersinia pestis
ttggaaaagaaactcggtctgactgcgctaacggcgctggttcttagctcaatgctgggagcgggtgtctttagcctgccgcaaaacatggctgaagtcgccagccctgctgctctgctcattggctggagtattactggcatcgggatcattttcctggccttcgccatgttgctactgactcgcctacgccctgatctcgatggcgggatatttacctatgctaaagaaggttttggcgacctcatcggttttttctctgcgtggggttattggctatgtgcggtgatcgctaacgtatcttacttggtgattgtttttgcagcactgagcttttttaccgataaatccggcagcatcatttttggtgaaggtaacacctggcaggcattgttgggggcatcattcctgttatggctggttcacgctttggtactacgaggggtacagactgcggccagtatcaacttggcggcaacactggcaaaactgttacctattggcggctttattattctggccggcatcgcatttagcctcgatacttttagtatcgatttcactggcttagcactacacacgccggtttggcagcaagtaaaagataccatgctgattaccttatgggtctttatcggtgtcgaaggtgcagtggttgtctctgcccgtgcacgcaacaagaaagatgtgggccgtgccacgatgctagccgtaatttcagcccttagcgtctacctgttgattaccttattgtcactcggcgtggtgcctcgggcggaattagcgggtatgcgtaatccgtcaatggcaggcattatggtcgaaatgattggcccatggggagaaatcattatcgccaccgggctgattatttctgtctgtggtgcttatcttagctggacaattatggccgctgaagtaccgatggtggcagctaaacatggcgctttccctaaaatattccgtcaccaaaataaaaacaacgcgccagctcaatccttatggttaaccaacagcgcggtacaagttgcgctggttttgatttggctgacaggcagcaattacaataccttactgacaattgcctcggaaatgattctggtgccctattttctcgtcggtgcattcttatttaaagtggcattaaagcggcaagattggcgtttgattgttgctgccagcggggcttgtttgtacggtttatggctgatttatgctgctggtttagtgtatttactgttgtctgtacttttgtatgccccaggattattggtgtttatttatgctcgtaaggggcatgaagggctgagattgctgaatacggttgagcgggcggcgattttcctcgtgttactcgccactatcccagcgacatggttgatgatgcactag

SEQ ID NO: 41963 - DNA, 1272 bp, Yersinia pestis
atgacagataagcgcaaagacggttcaggaaagctgctgtattgctctttctgcggcaaaagccagcatgaagtgcgtaagctaattgccgggccgtcagtgtatatctgcgatgaatgtgtcgatttgtgtaatgacattattcgcgaagagattaaggaagtttccccgcaccgggatcgcagttcactgccaacaccgcatgaaattcgccaccacctcgatgattatgtcatcgggcaggaacctgcgaaaaaagtgctggcagttgcggtgtataaccactacaagcgtctgcgtaacggtgataccagtaatggtattgaactgggtaaaagtaatattttgctgattggtccgacagggagcggtaaaacgctgttggcggaaacattggctcgcctcctggacgtgccatttactatggcggacgcgactacgctgactgaagctggctatgtgggtgaagatgtcgaaaacatcattcagaagctactacagaagtgtgattacgacgtacagaaagcacaacgtggtatcgtctatatcgatgaaattgataaaatttcacgcaagtctgataatccgtcgatcacccgtgatgtctcaggtgaaggcgtacaacaggctctgctgaaattgatcgaagggactattgctgcggtgccgccacaaggtggtcgtaagcatccacagcaggagtttttgcaggttgatacctccaagattctgtttatttgtggtggtgcttttgccggtttggataaagttattgggcagcgtattaatactggctcaggtatcggctttggcgcagtggtaaaaggccaatcagaaaaggcaacagaaggtgagttgctgagtcaggttgagccagaagacctgatcaaatttggcttaatccctgaatttatcggtcgtttgccggtagtcgccacattgagcgaactgagtgaggacgcactgattcagatccttaaagagccgaaaaatgcactgaccaagcaatatcaggcattattcagccttgaaggtgttgaactcgagttccgtgacgaagcattgactgcgattgccaagaaagcgatggcgcgtaaaacaggtgctcgtgggctgcgctccattgtcgaaggtgctttgctggatacgatgtatgatctgccatcaatggatagcgtagagaaggtggtcgtggatgaatcagttattgctggccaatctgcaccgatgctgatttatggtcagcccgaagcgcaagcttctggtgaataa

SEQ ID NO: 41964 - DNA, 996 bp, Yersinia pestis
atgattcgcttcgctgttattggcaccaattggatcaccgcacgctttgtcgatgctgcccacgaaagtggcaaaatgaaactggtagccgtttactcccgcaagctggaccaggctcagacttttggcgatgattatcacgtcactgactgttttgataatttggaagccttagccgcaagtgatttgattgatgcggtgtatatcgccagcccgaatgccttgcattattctcaagccaaactcttccttagccataaaaagcacgttatttgcgaaaagtcgctagcatcgaatctggcagaggtagagtctctgatcgcttgcgcccaccagcatcaggtggtgctctttgaggcctttaaaacggcttatctccccaactttatacaactacagcaagcgctaccgcgtgtggggaaattacgtaaagcctttattaacttctgccaatattcctctcgttatcagcgctatttgaacggcgaaaatcccaatacctttaatcccgctttttctaatggttcaatcatggatattggctattactgtctggccagcgccctggcgttatggggagaacccaaatcggtgtgggcaagcgcaagtttactcccaagcggtgtcgatgctcacggtacggtcagtctgaattacggtgattttgatgtcattatcatccactcaaaagtcagccaatcggatattcccagtgaaattcagggagaagatggctcgttagtcattgaaagtatttctgaatgcttatccgtggccttcacgccaagaggaagccattcacaagacctgacgcaaccacagcatattaataccatgctgtatgaagcagaggcctttgcccgtttggtggagaataatcgggtggatcacgatggcttacacctgtcattactgacgtcacgcattcaaacagaaatccgccgccagacgggtgttatattcccggcagatactcaataccccgccgcgagttaa

SEQ ID NO: 41965 - DNA, 1188 bp, Yersinia pestis
atgagccaactcgatctgggaacgcaaagccttgagcttgagcgttttcctccacaagaaaattccaatacccttcaggcgtgggaagcggcagatgaatatctgctacaaaacattgatttaagccaaattgatggccgcccggtgctggtgtttaacgatcagtttggtacgctggcctgcgctttacacgcttatcgcccgttcagttccagtgactcttatatgagtcagttggcgacggcgcataatttgcgtctaaaccatttagatgaatctgcggtgacattactgagcagcgtcgatgacttacccgaggcacctaagctggtggtcattaagatcccgaaagccttagcgctactcgaacatcaattacgtgctttgcgtcgcgttgtggcaccagatacggtgatcattgccggtgcaaaatcccgcgatgtgcataactccacgctgcaactgtttgaaaagatcctggggccaaccaaaacgacgctggcttggaaaaaagcgcggctgattcactgcgaggttgctgatattccattggctgacgcgccggaaaccatcgattggccgctgcctaacacggactacattatccataatcacgcgaacgttttctctcgcaataatctggatattggcgcgcgtttctttatggaaatcttgccttatgatgtcaccggcaaaattgcggatttaggttgtgggaatggtgtcgtcgggttaatcgcactggagcaaaacccgctagctgaaatgctgtttgttgatgaatcctatatggcagtggcatccagtgaattgaacatcacggttaaccgcccgcaagacttgtcgcgctgtgaatttatggtgagccatggtttggcgggtgtggagcgtgaaagcctgcaattggtgttatgtaatccaccgttccaccaacaacatgcggtcagtgaccatgtcgcctggcagatgttctgtgatgccaagcgttgtctgaaagcgggtggcgagttgatgatcgtgggtaaccgccatctggattacttccataagctcaagcgtttgtttggcaactgcgaaacactggattcaaaccagaaatttatggtgctgaaatcggttaagcaggcctcctctcgctcagaaggcggcggttccggtagtctcgatatgtcatatagcgatttctaa

SEQ ID NO: 41966 - DNA, 2022 bp, Yersinia pestis
atgttagcttaccctcacctgttcaccccgcttgatcttggctttaccacactgaaaaatcgtatcttaatgggttctatgcatactgggttggaggagttacccgatggcccgcaacgtctggcggcattttatgccgaacgcgcagcaggcggtgtcggcctgattgtgactggcggtattgcccccaatatgaaagggggggtgtatcagggcgcatcggtactgaatgacgccgcgcaaatcccccatcaccaggtggtgacagaggcggttcatcaagctggagggaaaatcgcgctacaaattctccatgcggggcgttacagctaccagaaacacccggtagccccttctgcgttacaagcgcctatcaacccttttgtaccacaagcattgagccatgaagagatcctgcaaactattgctgatttcgcccactgtgcgcaattagccaagcaagccggttacgacggtgtcgaaatcatgggttccgaaggttatctgatcaaccagtttctcaccgcccgtactaatcagcgcgatgatgaatggggcggtgattttacgcaccgaatgcgttttgccgtagaaatcgtgcgtgccgtccgtcaggccacgggacacgactttattctaatttaccgtttatccatgcttgatctggtggaggaaggctccaactgggtagaaatcgagcaattggcacaggccgttgaacaagcaggggcaacggtgatcaataccggtatcggctggcatgaagcccgtattcccaccatcgccacaatggtgccacgggccggattcagttgggtgacccgcaagttgatggggaaagtgaatatcccgctgatcaccactaaccgaattaatgaccccgccgtcgcagaacaagtgctggccgatggctgtgcagatatggtgtcaatggctcggccattcctggctgatgccgcttttgtacaaaaagcggcacagggccgggccgatgaaattaacacctgtattggttgtaatcaggcctgcctggaccagatttttgacggcaaactgacctcatgtttggtcaatccccgtgcttgccgcgaaaccgaaatgcccgaattacccacagacgcaccaaaacggttagcggtagtcggtgccgggcctgcggggttggcttttgcggtaaccgccgcccgtcgcggccatcaggtgacattatttgatgctgccgcagagatcggcggccaatttaatattgccaaacagatccccggcaaagaggaattttacgaaaccctgcgctatttccgccgtcaattagtgctgaacggcgtcaccctacaattgaataccctggtgcaggtaaagcagttggctgagtttgatgaagtgatcctcgcctgtggtattcaaccacgcttaccctgtatcaacgggattgatcacccgaaagtacttacctatctggacgtcttacgcgataaaaaaccagtcggccaacgtgtggcgattatcggtgccggtgggattggttttgatactgcggaatatctcagccagtctggtgatagtccccgtttcgatagcacagccttcagtaccgaatggggtattgatcaagatttagctcatcgggggggcctatcacccgcgggggctaaagtccctccatccccacggcagattttcctgttacaacgtaaagccagcaaagtcggtgaagggctgggtaaaaccaccggttggatccaccgcaccagcttggcgatgcgcggcgtcaagatgcttaacagcgtcagctacgaggccattgatgataaagggttacatatcattcgtgcggaacaagcctgttgtttacctgtcgataccattattatttgtgccggacaggagccacgacgggagcttcatcagcccttactggatatgggaaaaacagtctatttgattggtggtgcagataaggctgttgagctggatgcccgccgtgccattgatcagggtacccgcctagcgctagccatttag

SEQ ID NO: 41967 - DNA, 957 bp, Yersinia pestis
atgagacttaagaaatacattaaaaatatgggaatattgtctttatttgcagccaccgtcatgctaagtggttgcaatatggtattgatgaatcccaaaggcgcaatcggagtcgaacaaaaaacgctgatactgactgctatcggtttgatgttgatcgtcgttattccggttatttttatggcgtttgcttttgcctggaagttccgagcctccaacaaaagtgcaacttacaccccgaactggtcccactccaacaaaattgagcttgttgtttgggctgttccaatcattatcatcgctattttggctacgataacgtggaaaacaacccacgaacttgatccattcaaacctatcgttgtggcgggtaaagatccgatcaccatcgaagtggtctcccttgactggaaatggttatttatctacccagaacaaggcatcgctaccgtaaatgaactggccttccctactggggttccggtgaacttcaaaatcacgtccaactcagtaatgaactcgttctttatccctcagttaggcgggcagatttatgcgatggccgggatgcagaccaaattgcatctgattgccaatgaaccaggtaaatacaacggtatttccggtagcttcagtggccaaggcttctctggtatgaaatttactgcaatcgcaacaccaacgcaggaagacttcaaccaatgggtcgaacaagtgaaaaaatcgccgaacaccctgaatacaactaacgatttcgagaaactggctaagcccagtgaaaataacccggtggaatacttctccagtatcaaaccggcactatttaaaggaatcattggtaagtttatgggcgatatgaacatgccaaaaaatggccatgacatgccaaaaggcatggatatgagccagggcatggaaatgggcgaacacactgctcacgccggagccgaggaataa

SEQ ID NO: 41968 - DNA, 1992 bp, Yersinia pestis
atgttgggaaaattaacacttgatgcggttccattaggcgaaccaatcataatggtgaccgttgccgcaattattattggaggagcggcactggtcgctgctctgacttatttcggcaagtggaaatggctgtggagcgaatggctgacttcggttgaccataaaaaaatcggtatcatgtacattctggttgccatggtcatgctgttgcgtggttttgctgatgccatcatgatgcgtagtcagcaagcgcttgcttctgcgggcgaagcgggtttcctaccacctcaccactatgatcagatcttcaccgcgcacggcgttatcatgattttcttcatggcgatgcctttcgttgtcggcttgatgaatatagttgtaccgctacaaatcggtgcacgtgacgttgccttcccgttcctaaactctctgagcttctggctctttgccgttggggtggtgttaattaacatctctctgggagtcggtgaatttgctcagactggctggctagcttacccaccactatccggtattgaatacagtcctggtgtcggggttgactactggatatggagcctacagatctccggtctggggacattgctaacgggtgtgaacttctttgcgactatcctgaagatgcgtgcacctggcatgtcgatgatgaaaatgccggtcttcacttgggcggcattttgtaccaacatcttgattatcgtttctttcccaatcctgacggttaccgtcgcattactgacgctagatcgttaccttggcacccatttctttaccaatgatatgggtggcaacatgatgatgtacatcaacctgatttgggcctggggccatccggaagtgtacattttggtgttgccggtattcggggtcttctccgaagttaccgcaaccttctcaagaaagcgcctgtttggttacacctctctcgtatgggcaaccatcgcgattaccgtcctgtcgtttattgtttggctacaccacttctttactatggggtccggtgccaacgttaacgccttcttcggtattgccacgatgatcatttccatcccaacaggggtgaaaattttcaattggttgttcactatgtaccaaggccgtattcagattaactccgcaatgctatggactattggcttcatcgtgaccttctctatcggcgggatgaccggggttctgctggccgtgccaggtgcaaactttgtcctgcataacagcctgttcctgattgcgcacttccataacgtcattatcggtggtgtagtatttgggtgctttgctggcctgacgtactggtggcctaaatcattcggctttatgctgaatgagaaatggggtatccgtgcattctggttctggattattggtttcttcgttgcctttatgccgctgtacgtattgggctttatgggaatgacccgtcgtttgagccaagacatcaacccagaattccatacgatgctcatggtagccgctggtggtgcagcactgattgcttgcggtatcttgtgtcaggttatccaagtattcgtcagtatccgtgaccgcgaacaaaaccgcgatctgaccggtgacccatggggtgcccgtacgctggaatggtcgacttcttcccctccgccgttctataacttcgccgtcgttcctaacgttgttgaccgtgatgagttctgggacatgaaagagaaaggcgaggcctataagcgcccagcgaaatacgaagaaatccacatgccgaagaataccggtgcaggtgtgattattgctggcttcagcttgattttcggctttgctatggtctggtatatctggtggctagccattattggcttcgttggcatgatcgttacctggatcgtgaaaagcttcgacgaggatgtagattactatgtgccagcggctgaagtggagcgcatcgaaaatcttcatcatgaacaaatcagcaaagcaggcgtgaatcatgtcaactga

SEQ ID NO: 41969 - DNA, 579 bp, Yersinia pestis
atgattaataagaccctgttgggcctgagtcttggcgcactgatgtttaccgccggtagcgctgtagctgccgattataaaatcgataaagaagggcaacacgcttttatcgaattccggattaaacatttaggttatagctggttatatggcagctttaacgattttgatggttctttcacatttgatgataaaaatcctgcagctgataaagttaatgtagtgatcaacaccaatagcgttgataccaatcatgctgaacgagataaacacctacgcggtaaaagttttttaaatgttgctaaattcccacaggcaacatttgagtcaactgaagtgaagaaaaatggtgatggttattctgttatcggtaacctgacgttaaatggagtgactaaaccggtgacgttggaaagtaaactgacagggcagggtaacgacccatgggggggttatcgtgctggttttgaagccaacggtaacatcaagttgaaagatttcaatattacgacagatttaggaccagcttctcaagaagtcgaattgatcctgtcagtagaaggtgttcaggttaaataa

SEQ ID NO: 41970 - DNA, 837 bp, Yersinia pestis
atgcgtttatttttattattacttagcttgctacttatttccattaccaccgctttcgctctagataaaccggacggaagtaacagcattgaggaccaaacagccctattttttggtaaagatgatcgcactgcggtaacaaacagccgccaatggccatgggaagctattgggcaagttgaaacggccagcggcaacccttgtactgcaacattaatttccccacgattggtattaaccgccggccattgtgtcttgactcctccgggtaatattgaccaagccgtcgcgttgcgattcatttccgataagggccactggaaatatcaaattacggatctgaaaacacgggttgatgccaaattaggccagaaactcaaagccgatggtgatggctggattgtgccacctgccgccgctgcctatgattttgcattaatccaattaacaaatgcagcgcctatccccatcaagccattgcctttatgggaaggtactgcaaatgaactgacaaaagcgcttaaattggttaaccgtaaggtaacgcaagccggttatccactcgacaacctcaatacactttataagcatgaagactgtttagtaaccggttgggcacagcaaggtgttctggctcaccaatgcgatacgctgccaggtgacagcggctcacctctgctgctaaaaaatggcaatagttggtcattgattgccattcaaagttccgcgcccgcagccaaggagcgttatttagctgacaaccgggcattatcagtcactgcgattaataaccgtttgaaaaaattggtcaataagatagccgatacaactcagtaa

SEQ ID NO: 41971 - DNA, 921 bp, Yersinia pestis
atgtcggatacccatgcacctgttgattttaaacaacaacttgccgctcatcagcagcgagtcaatcaggctctgctggatttcattgctcccctgccgtttggcaacagcaatttaatcgaggccatgcgctatggtgcggtaatcgggggtaagcgtctccgcccctatctggtctatgccacagggcaaatgtttggtttgtcactcgccaacttagacgccccggcggcggcaattgaatgtattcatgcctattcattaatacatgatgatctgcccgccatggacgatgatgatttacgccgtgggcagccgacttgccacgttaagtttggcgaggcccacgctattttggccggtgatgcactgcaaacgctggccttttctattttggctgaagcccccatgcccgatgtcgctgataaagatcgcctatcgatgattatcgagttggctcaagccagtggggctgcggggatgtgtgcgggtcaggcgctagatctggaagcagaaactcgccctgttttattaggtgaccttgagcaaatccaccgtcataaaaccggtgcgttgattcgtgcggcagttcgccttggcgcccaggcagccggtgaagctggccgtaaaacattattgtcactcgatcgttacgccgaggccatcggtttagcctttcaagtccaggacgatattttagacgtcattggcgacacagctacaattggtaaacgtcaaggatcagaccaacaactaggcaaaagtacttatccggcgctacttggtctggattgtgcccaaacaaaagcgatggatctttatcaggaggcactagaggccttggatgaattggcaaaacagtcctataacacggattcattgcaggcattagctcgtttcattattgagcgtaataattaa

SEQ ID NO: 41972 - DNA, 2184 bp, Yersinia pestis
atgagtactgtttatcgcgatgccactctgcccattgaggctagaattgacgatttgctcagccagatgacgttggcggagaaagtgggccaactgtgtcaacagccgatgctggactatcagcaacaccgtgacgactatcttgccggggtacgcgctggccgctggggttcacgcattctggctgataccgcctgggcgggcaatgcgccaggagaaaacgtcgatccgtgccagttaaatgaaatccaacgtgccgccgtagagcacagccgcctgggtattccgctgttgtttgcccgtgacgtgatttacgggcaggcgacggtgctgccgatacccctggcgcaggcggcttcctggaaccccgagctggtacagcaggcctaccgcgttatcgcccgcgaggcggcttcgttaggtatccactggaccttcgccccgatgctggatattgcgcgcgatccgcgctgggggcgaaccatcgaaaccagtggggaagatccctggctcaccgcgcagttcgccgccgctgtcgtcaaaggatttcaaggggacgatctcagcgccgccgatagcctgatggcttgtgccaagcactttgtcggctatgccgccgtggaggggggccgcgactacgataccaccgagctgtccgacaacacgctgcacaatgtgcatctgccgccattccaagcggcgatagaggcaggcgttggctcggtgatgaccggtttttgcgatttcggcggtacaccggtcactgcacatggtgaactgatacgcggttggctgaaacagcagcagaactttgacggcctggtgatcagcgattggggttcgattgcggatctgactcactttggtattgctcaagatgcactgagagcagcagaattggcgctgcaggccggtgtcgatatggccatgacccatgaggcctatgaagataagctggatcaactggtgttacaggggcggatcaaggaagcgttgctggatgacgcagtgcgtcgggtgctacgcgccaagttccgctgtggcctgtttgagcgcccttatgttgatgaagagtggcataagcgcgagctgcgccgtcctgagcatctggctctggcacagcggttggcagagcagtcgatcgtactgctgaaaaaccggcaggcgctgctgccaatctccagaacatccgtaccgctgacgctggcggtgatcggcccacacgcccattcgcagcgccagcatcttggctcctggtgtctggacggcgacgccgaccaagtgatgtcgatctatcaatccctctgcgctatcgcaggggaggttaaggtgatcaccgagcagagttgttttagcgatgagatgatcgaatgtgcccatcgggccgatatcgttattctctgtaccggcgagagccaccgccgcactggtgaagcgcgcaatatcgccgaacttcagctaccgccgggacaggaagagttgatcgctgcggtcgggcgcaccggtaaaccgctggtggtaatccagtgcactggccgtccgttgccatcaccagcaaccgaacagtacgccgatgcgctgttatatggctggcagtgcggtagtgaagcgggtaaggcgatcgctcgcattattttcggcgaacaggttccctgtggcaaattgccgatgacggtgccacgtagtaccggtcagatcccgatttattatggccgcaagccactgggcaaaatgcgcgactatcgtgaatatcagccctataaagatctggcggatacaccgctgtatccctttggttttggcctgagttatacccgatttacctatagcgatttgcagttgagccatgaatcactcgaactgggagcatcgctacgggtgacaatgaccgtcaccaacgatggtgcagtggctggggatgaggttgtacagtgctatattcgccagtacgtcgccagcaccacgcggccacagcgtgaactgaaaggtttccaacgtatcagcctgcagccgggggaattgggcgaggtcagcttcacgctgggagtgcgcgagctggcattttacggccaacatcgccgctatgcgcaggagccgtcgcgtatcagcgtatttgtcggtggcgactcaacgacgccacatcaggcggattttacgctgtttgaaaatctttacactgtttga

SEQ ID NO: 41973 - DNA, 303 bp, Yersinia pestis
atgagttatattcttcaggttgatttcccttataccggcccttggggcaatgaaatgacgaaagcaatggaaggtcttgcacgatcaattgccgaagagccgggccttatttggaagatctggactgtaaatgaaacaactaacgaggcgggaggaatctatttattcagcgatatttctgcggcgaaagcttatttggcgatgcatactgcgcgtctgaagagtttcggtattccccatgtaaatgggaagatatttttggtaaacgaagccctatcacagctcgatcgcgcgcccatttaa

SEQ ID NO: 41974 - DNA, 1839 bp, Yersinia pestis
atggagcaaaacccgcagtcacagctgaagctacttgtcacccgaggtaaggagcaaggctatctgacctatgctgaggtcaatgaccatctgccggaagatatcgtcgattccgatcagatcgaagacatcatccagatgattaatgacatgggcatacaggtactagaagaagcacctgatgctgatgatttgatgctggccgaaaacaccacggataccgatgatgatgcggctgaagctgctgcacaggtgctttccagtgttgaatcagaaatcgggcgaaccaccgacccggtgcgtatgtatatgcgcgaaatgggtaccgttgagctgttgacacgcgaaggcgagattgatattgccaaacgtatcgaagacggtatcaatcaggttcagtgttctgttgctgaataccctgaagcgatcacttatctgttggaacaatatgatcgtgttgaagcgggcgaatctcgtttatctgacctgatcactggctttgttgatccaaacgccgaagaagatattgccccaacagcgacccacgttggttctgaattatccactgaagagatggatgacgaagatgaagacgaggatgaagacgacgacgcagaagacgataacagcatcgatccagagttggcgcgccagaaattcagcgatttgcgtgagcagtatgaaaacgcgcgtatggaaatcaagaaaaatggccgcaatcacgcgaatgctgccgctgaaattctgaagctttctgaggtgttcaagcagttccgtctagtgccgaagcagttcgattatctggtcaataacatgcgtgccatgatggatcgcgttcgtactcaagaacgtatcatcatgaagctgtgtgttgagcagtgcaaaatgccgaagaaaaatttcgttacgttgttttccagcaatgaaaccagcgacacctggtttaatgcggcagtggcgatgggtaaaccttggtctgaaaaactgaaagatgtctcggaagatgttcaacgcagcttgcagaaactgcgccagatcgaagaagaaaccggtctgaccatcgagcaagtaaaagacatcaaccgccgtatgtctatcggtgaagcgaaagcgcgtcgtgccaagaaagaaatggttgaggctaacctgcgtttggttatctctattgccaaaaaatacaccaaccgtggtttgcagttccttgatttgatccaggaaggcaacattggtctgatgaaagcagtagataagttcgaataccgtcgcggttataagttctcaacttacgcaacctggtggattcgtcaggctattactcgttcgattgcagaccaggcgcgcactatccgtattccagtgcatatgattgagaccattaacaaactcaaccgtatctcacgccaaatgttgcaagagatgggccgtgagccaacgccagaagagttggcggaacggatgttgatgccggaagataagatccgtaaagtgctgaagatagctaaagagcctatctccatggaaaccccgattggtgatgacgaagattcacatctgggtgatttcattgaagataccactctggagctaccgctggactctgcaacttctgagagcctgcgctctgccacgcacgatgtgttagctggcctaacagcccgtgaagcgaaagttctgcgtatgcgtttcggtatcgatatgaacactgaccacacgttggaagaagtgggcaaacagttcgacgtcacccgtgaacgtattcgtcagatcgaggcgaaggcattacgtaaactgcgtcacccaagccgttctgaagtgctgcgtagcttcctcgacgattaa

SEQ ID NO: 41975 - DNA, 1749 bp, Yersinia pestis
atggctggacgaattccacgtgtatttatcaatgacttgctagctcgcactgacatcatcgatcttatcgatgctagggtaaagctgaagaagcaaggcaaaaattaccatgcgtgctgtccgttccatcatgagaaaacaccctcattcactgttaacggcgaaaaacagttttatcactgttttggctgcggcgctcatggcaatgctgttgattttttgatgaattacgatcgactcgagtttgtcgaaagtatcgaagaattagccaccatgcacgggctggaagtgccttacgaggcaggcagcggcaccactcagatcgaacgacaccaacgacaaagtctttatcaattgatggaaagcctaagcgcattctatcagcagtcactcaaaggccagaatgccaaacaggctcgtgaatatcttaaacatcgcggtttgagtgaagaaatcatccaacattttgctatcggttttgcgccccctggttgggacaatgccttaaaacgttttggtcgtgatggcgagagccgtacagcactgaacgatgccgggatgctggtaactaatgataccgggcggacttacgatcgttttcgtgagcgcgtcatgttccctattcgcgataaacgcgggcgggtcatcgcttttggcgggcgaattctgggtgatggagtgccgaagtacctcaactccccagaaacagaaatttttcataaaggccgccagttatatggcttgtatgaagcacaagtcaatcatccaaacccaacccgcctactcgttgtggaagggtatatggatgtggtggcactcgcacaatttggtattgattatgctgttgcctcattgggaacagcgacaaccgctgagcatattcagctgttattccgcgccaccgataacgtaatttgttgttatgacggtgatcgcgctggtagagatgccgcctggcgagcattagaaacggcactgccctatctaaatgacggacgtcagctacgctttatgtttttgcccgatggcgaagaccctgacaccttggttcgtaaagaagggaaagacgcatttgaacaacggatggaggcggcacagccactctcaaccttcttgtttgaaacgttaatgccacaggtagatttgagcagccctgatgggcgcgccaaactgagcacactggcattacctttaatcagccaagtacctggtgaagcgctgcgcttgtacctacgtcagcaattagggaataagttaggtctgcttgatgacagccagctcgataagctgatgccaaaacagattgataatgcaaatacctaccagccgccccagctaaaacgcacaaccatgcgtatacttatagggctattggtacaaaacccacaattggctacacttattccctcattacaggggctcgaacaagccaaattggcgggtttaccgttatttattgagttggttgaaacctgtctggcccaaccggggctgacaaccgggcagttgctggaactgtaccgtgataataaattcagccaacaacttgaaactcttgcaacatggaaccacatgattgtagaggatatggtcgaaccgacttttgtcgacacgctagcgagcctgtatgactccattttggagcaacgtcaggaaacgctaatagcgcgggaccgtacacatggattaaacgccgaagaacgtaaagagctttggtctttgaatctggcactagccagaaaaaaatga

SEQ ID NO: 41976 - DNA, 216 bp, Yersinia pestis
atgccggtaattaaagtacgtgaaaacgagccgttcgacgtagctcttcgtcgtttcaaacgttcctgcgaaaaagcaggtgttttagctgaagttcgtcgtcgtgagttctatgaaaaaccgactactgaacgtaaacgtgctaaagcttctgctgtaaaacgtcacgcgaagaaattggctcgcgaaaacgcacgccgcactcgtctgtattaa

SEQ ID NO: 41977 - DNA, 1014 bp, Yersinia pestis
atgcgagtattgggtatagaaacgtcctgcgatgaaaccggaattgcagtctatgacgataaagccggtctgttagctaaccaattgtacagtcaggtaaaattacacgctgactacggtggtgtcgtacctgaactggcctcccgtgatcacgtgcgtaagaccgtacccctgattcaggcggcgttgaaagaagccaatttgagcgccaaagatatcgatgcggtggcttatacagcaggccctggtttggtgggggcgttgttagtgggggcgaccattggtcgggcattagctttcgcatggggagtccctgcggtaccggttcatcatatggaaggccatttgttggcaccaatgctggaagaaaatgcaccagagttcccgtttgttgcgctgctggtatccggcggccatacccaattgattagtgtgaccggtattggtgaatatttgctgttgggcgaatctgttgatgatgcggcaggcgaggcctttgataagacagcaaaactactagggctggattaccccggtgggccaatgttgtcgcgtatggctcaacaaggtactgtggggcgttttacctttccgcgcccaatgactgatcgccctgggctggattttagtttttccggcctgaaaacgttcgcggcgaatactattcgtgctaatggtgatgatgaccaaacccgtgccgatatcgcccgagcattcgaagatgcggtggttgatacgttggcgatcaagtctaaacgtgcattagatcagacgggttttaaacgcttagtcattgccgggggcgtgagcgctaaccagacactgcgattaaaactggccgatatgatgcaaaaacgaggcggtgaagtattctatgcccgacccgaattttgcactgacaatggcgcgatgattgcctatgccgggatggtcaggttgcgaagtaacctgaacagtgagttgagtgtgtcggtgcggccgcggtggccgttatctgagttaccaaaagtctga

SEQ ID NO: 41978 - DNA, 651 bp, Yersinia pestis
atgagtgctatcgcgcttggcatgattatcttcgcgtatttgtgcggctctatttccagtgcaatcttggtatgccgggttgccaggctgccagatccacggacacatggctccggtaatcccggtgcgactaacgtgctgcgtattggtggccgtacagcagcagtggcggtattgctctttgatatattgaaaggcatgttgcccgtttggatcgcttatctgttacacatcccgccactttatctcggtttgaccgccattgccgcctgtctcggccatatttatcccgtatttttccactttaagggtggcaaaggtgtagcaaccgcatttggtgcaatcgcgcctatcggatgggatttgaccggtttgatgaccgggacctggctgctgacggtattattgagtggttattcatcattaggcgcaatagttagcgccttgattgccccgttttacgtctggtggttcaaacctcaatttactttccctgtcgccatgctctcttgccttatcctgatgcgtcaccacgataacattcaacgtttatggcgtggcaaagaagggaaaatttgggacaaacttagaaagaaaaaacagaaaacgcctgcagaagaagccgcagagttagaagagaaagaagattag

SEQ ID NO: 41979 - DNA, 1239 bp, Yersinia pestis
atgaacatctacctggtcggcggagccgtacgcgatagcttattaaacctgcccgtaaccgaacaggactgggtcgtggtaggggcgacccctgaacaattactgaaattagggtatcagcaggtcggtaaagactttccggtcttcctgcaccccgtcagccatgaagaatacgccctagcgcgtactgaacgtaaatccggccagggctacaccggttttacctgctatgccgctcccgatgtcacgctggaagatgatttattacgccgcgatttaaccgttaatgccattgcccgtagtgctgacggggaatttatcgatccctaccatggcaaacaggacttggaaaaccgagtgttacgccatgtctccgacgcatttggtgaggatccattgcgcgttctgcgggtggcacgctttgccgcccgttttgcctaccttggtttcaccatcgccccagaaacgatgtctctgatgagcaatatggcgcagagtggcgaactctccgccctaacaccagagcgcgtgtggaaagaaaccgagaaagcactgaaaacgcaaagcccacacgtctattttcaggtacttcgggattgcggtgcgttggcggtgctgttccctgagattgagcgtttatttggggtgccggcaccggagaaatggcacccggaaattgataccggtatccatactctgatgacgttggctatcgctgcacagctcagcccggaggttgatatacgctttgctgccctgtgccacgatttggggaaaggcctaacccccaaagagcattggccacatcatcacggccatggtccggctggcgtcaaattagttgagcaactgtgccaacggttgcggatccctaaccctgtgcgtgatttggctaagctcgtcgcggaataccatgacctaattcatacagtgaataaactccggccagaaactctgctaaaactgtttaatgccattgatgtatggcgtaaacctgagcgcctggagcagatgattatgaccagcgaagcggatgcccgtggccggactggatttgaaaacaatccctatccacaaggggattatctgcgggccgccttccagattgccaacggagtatcaatacaggaagtggtcgccagcgggttacaaggcttggctattcgcgacgaacttcaacgccgccgccagcaagctctggccgagtggaaacagactcaggaaacagcttcaatataa

SEQ ID NO: 41980 - DNA, 1308 bp, Yersinia pestis
atgaccgttgaaatagaattaaaatttattgctactcctgcggccattgctgctttgccggagtggattgagtcccagaaaaaccagcattttcccccacaaacactggccaatatctattttgacacggcggataagcggttgcgccagaatgatatcggtttacgtatccgcggctatgatggccgttatgaaatgacggtaaagaccggcggtaaggtcgtgggcggtttacatcagcggcctgaatataatgtcgatattgatagcgaccaactggatttagcgcgtttcccgcaggatatctggccggaaggctgggcggttgatttgttgcaagcggaattacagccgttgttccgtactgatttcacccgcgaaaagtgggtaatcacttacggtgagagcgagatagaacttgccctcgaccaaggttctatcagcgctgatacgttgtcggaaccgttgagtgagattgaactggagctgaaacagggcactcagggcgatttattggcactggcagccgaattggcaaaaatgggtggcttacgccagagcaatttgagtaaggcggcacgtggttatcatctggcgcaaggtaatccgccacgtgagctacggcctttcctggtatttcaacccgtggcgaaatcaacggttgagcaggggatggccggtggtttggaaagcatattggaacactggcaatatcatgaagagctgtggttacgtggggaacctgcggccaaaaccatgattatcgacgctttggctatggttcgccaatcgttggctatttttggcggtttggtgccacggaaagccagtacagagttacgtgcgttgctgattgcccttgagccgcaattagagccgaagagtgtcgatgcagcgttgttgtgttacagcgttgactatctgaaatgtaagttggcgcttacatcatggttgatcaccgcaggctggcggccatttatggatgccaaagcacaagctaagttcgatggctcgtttaaacgcttctgtgacattatgctcagccgcagtgccgccgatttaaaagaggcttttggccacaatcttgatgatgatggctatttggcacaactcccccgtctgaaccgccagctcatcgccttccaactgctttctggtttctatccacaaagtgaatggcatccgtatatcgatgcctggtttggtttacagcaggcgattatggcgcgccagggccactggcgagatactgcccgcaaagaagcactatctcaggccgccttttggttaaacggtgctgttcgctaa

SEQ ID NO: 41981 - DNA, 1431 bp, Yersinia pestis
atgaaagtcacgctgcctgattttcgccgtgctggtgtattagtcgtgggtgatgtcatgttagaccgctactggtacgggccaacctgccggatttcaccagaagcacctgtgcctgtagtgaaagtcgataccatcgaagagcgccctggtggtgcagcaaacgttgcgatgaatattgcctcccttggcgcggttgcgcgcttagtcgggttgaccggcattgacgatgcggcgcgtgcgctgatctgcaagctgagcgaagttcgggtgcgttgcgattttgtctcggtacccactcacccgaccattaccaaattacgggtactttcccgtaaccagcagttaatccgcctggattttgaagagggctttgacggtgttgatcccacgccgatattcgagcgcattcaactggcgttgccacagattggcgcgctggtgctgtccgattatgccaagggggcattgaacagcgtacagccgatgatccaactggcacgtaaagcgaatgtcccggttttgattgatccgaaaggcagtgattttgagcgctaccgtggtgccacattgttgacgccgaatttgtctgaatttgaagcagtggtagggcgctgtaaaaatgaagaagagttggttaaccgcggtatgcaactggtggcagatttcgaactttcagcattgctggtgacccgttctgaacaaggcatgaccttgttgcaactgggtaaaccgccgctacatttgccgactcaggcaaaagaagtgtttgatgtgaccggtgctggcgatacggttattggcgtgctggctgccgcgctggctgcaggtaacagcctggaagagtcatgtttcctggctaatgctgccgccggtgtagtggtgggtaaattgggtacctcgaccgtttctccgattgagttggaaaacgcgatccgtggccgtgcagaaaccggttttggggtgatggatgagcagcaactgaaaatagcggttgcgcaggctcgccagcgtggggagaaggtggtcatgaccaatggcatttttgacatcctccatgcaggccatgtttcttatctggccaatgcccgtaagctgggggatcgcctgattgtggcggtgaacagcgatgcttccaccaagcggctgaaaggtgaaaagcggccggttaatccattagaacaacgtatggttgtcttgggtgcgttggaagcggtggattgggtcgtgccctttgaagaagatacgccacagcgtttaattgctgatattttgcccgatctgttagtcaaaggcggcgattataagccccatgaaattgcaggtagcgaagaagtctgggccgccggtggcgaggttaaggtactgaattttgaagatggtgtctctaccaccaatattattcagtcgatcaaaaacggccgcggctaa

SEQ ID NO: 41982 - DNA, 654 bp, Yersinia pestis
atgaatcagacgcttctctcagattttggcacgcctgtcgagcgtgtagaacgtgcaatcgacgccctgcgtaatggccgtggcgttatggtgttggatgacgaaagtcgtgaaaacgaaggcgatatggtttttgctgccgaagcaatgacgctagagcaaatggctctgaccatccgccacggtagtggcattgtctgtctgtgtatcactgatgaacgccgccagcagcttgatttacccatgatggttacccataactccagccaattccagacagcgtttaccgtgacaattgaagcggcggaaggtgtgacgactggggtttctgcggctgaccgtctgaccactatccgtaaggcaatcgctgataacgctaaacctgctgatcttaatcggccggggcatgtattcccgctgcgtggtcaacctggtggcgtattatcacgccgtggtcataccgaagcgtctatcgatttggcgacactggcaggttacaaaccggctggtgtgctgtgtgaactgaccaatgacgacggtagcatggctcatgctccagaagtgattgcgtttgctaaattgcatgatatgcccgtcgtgacgattgacgatttggcggcttatctccaatctcgcgcgaagaaagccagctaa

SEQ ID NO: 41983 - DNA, 426 bp, Yersinia pestis
atgagtaaacgctacacgcctgattttccggagatgatgcgtttgtgcgaaattaactacgcacaattacgtcgattaatcccgcgtatcaatgaagtgggtgaaagcgtggcttatcagattaaagaagtcagttatcggctgacaatcattgaatcaacccgctacacttcggtcgtcgagattgtacaaacggcccctgctgccagtcattggagcctaccatcaatggtggtacgcctttatcatgatgcaatggtcgcggaagtgtgtgccagtcagcagatctctcgcttcaaagcaagttatgattatcccaataaaaagttgcatcagcgggatgaaaagcatcaaattaaccagtttcttgctgattggttgcgctattgtttggcgcatggagcggtggccgttccggtttgttag

SEQ ID NO: 41984 - DNA, 828 bp, Yersinia pestis
ttggaaagcctgtttaaactgcctatggcgagtggggccagggttagaattttacaaataacagatacccacctctttgctggcgaacatgagacattgctgggtgtgaatacttttcacagctatcgcgcggtattggacgcgattattgcggaacagcacccgtttgatctggttgttgccacgggcgatttggctcaggaccactctgtcgccgcctatcagaattttgcgaagggaatatctcgcctgcctgtgccttgcgtttggctgcccggtaatcacgatttccagccagcaatgtttgatgcattggctgaggcggggattgccccttcaaaacaggttctggcgggagaacactggcagatcctgttgctggacagccaagtatttggcgtaccttatggtgagttgagcgactatcagttggagtggatggagcgctgtctaatcgcgtatccggaacgttacaccttgatattgttgcaccatcatcctatgccgtcaggttgcacctggcttgatcaacacagtttgcgcaacgcgcatatgttggcggcgatcctgactcgttatccccgagttactacgttattgtgcggtcatattcatcaagatttagatcttgactggtatggtaagcgcttgctagccagcccttcgacctgtgtgcaatttaaaccacattgtactaactttacgcttgatgctgtggcaccagggtggcgttatctcgatttactgcctgacggggggctggaaactgaggttcatcggttagacagtgacgaattttgccctgatatggactcggatggttattga

SEQ ID NO: 41985 - DNA, 1896 bp, Yersinia pestis
atgactgaatccagctataacgctgatgccattgaagtactcagcggtctagaaccagtgcgccgtcgtccaggaatgtatacggacacctcgcggccaaaccacctcggtcaagaggtgattgataacagcgtcgatgaggcgctggctggtcatgcccgtcgtattgacgtcattttacacgccgatcaatcactcgaagtgattgatgatggccgtgggatgccggttgatatccacccagaggagggggttcctgctgttgaactgattttatgtcggttacatgcgggcggtaaattctccaataagaactatcagttttctggtggtttgcacggtgtgggtatttcagttgttaacgccttatccaagcgggtagaagtcacggtacgccgtgatagtcaaatctacagtatcgcttttgaaaatggcgataaagtccaggatttacaggttattgggacgtgcggtaagcgcaatactggcaccagtgtgcatttctggccggacgtctctttctttgatagcccgcgtttttcggtttctcgtctatcccatttactgaaagccaaagcggtattgtgtccaggcgtcgagatcgtttttaaagatcaggtcaacaacacagaacagcgttggtgttatgccgatggtctaaccgattatctgatggaagcggttaacggctttattactctgccagaagcaccctttgtggggtcttttgccggtgatacagaagctatcgactgggcattactgtggttgccagaaggcggcgaactgctgactgaaagctacgttaacctgatcccaaccatgcagggtggtacccacgttaatggcttgcgtcaggggttgctggatgccatgcgcgatttctgtgaataccgcaatatcttgcctcgcggagtcaagctctcggcagatgatatctgggaacgctgtgcttatgtgttatcggtaaaaatgcaggatccacagttcgcgggtcagacgaaagagcggctctcctcacgtcaatgtgcggcctttgtctccggtgttgtcaaagatgccttcagcttatggttaaaccagaatgtgcaggccgcagaacaactggctgaactggcgatttccagcgctcagcgtcgtatgcgtgcagcaaaaaaagtggtgcgtaaaaaactgaccagtggcccggcactgcctggcaaactggcagattgtacttcgcaggacttgagcctcacagagctatttttggtggaaggggattccgccggcggttccgcgaaacaagcccgcgaccgggaatatcaggcgatcatgccgttgaaaggcaagatcttgaacacttgggaggtctcctctgatgaagtcctggcctcgcaggaagttcacgatatttccgtggcgatcggtattgatcctgatagcgaagacttaagccagttacgttacggtaaagtgtgcattctggcggatgcggactccgatggcctgcatattgccacgttgctgtgcgcactgtttgtgcgtcacttccgggcactggtccgtaatggtcatgtgtatgtggcgatgccgccgttgtaccgtatcgatctaggcaaagaggtcttttacgcgctggatgaagaagagaaagccggtgtgcttgagcaactgaaacgcaaacggggtaaacctaacgttcagcgtttcaaagggttgggtgaaatgaacccattacaattgcgtgaaaccacccttgatcccaatacccgccgtctggtgcaattgaccatcagtgatgatgatattgatcacactctggccgttatggatatgttgttggcaaagaaacgctcggaagatcgccgcaactggctacaagagaaaggggatactgctgagatcgaggtctga

SEQ ID NO: 41986 - DNA, 318 bp, Yersinia pestis
atgatgaaattagttgtcagtatggcggtgttactgagcttgtgtagctttcaggtgtgggcaaaaaatgatattgaggcggggcgtgctaagtcatccagttgtgtggcctgccatggcatgaatggtaaagtttcagtacctatgtatcctaacctggccgggcagaatgcgctgtatctgcaacaatcattagaagcctataaaaaggggagccgctccggcgggcaagccgaggtgatgcgcgcttatgtatccggtttatccgatgaagatttttctgatttggctgcgtattatgccagcctaaagccataa

SEQ ID NO: 41987 - DNA, 2274 bp, Yersinia pestis
atgagtgacttgactcatgacggtgcagaacgcctaccgctgcacacctttactgaaaacgcctatctgaactattccatgtacgtcatcatggatcgggcgttgccgtttatcggcgatggtttaaagccggtacagcgtcgcattgtctacgcgatgtccgaactggggttgaataacagcgctaaattcaaaaaatcagcccgtaccgtgggtgacgtgctgggtaaatatcatccgcacggcgacagtgcttgctatgaagcgatggtattgatggcacagcctttttcttatcgctacccactggttgatgggcaggggaactggggtgcaccggatgatcctaaatcctttgcggcgatgcgttataccgaatctcgtttatccaaatatgcggaagtgttattgggtgagctggcccaaggcacggtagattgggtgccaaactttgatggcaccatgcaggagccgaaaatgctccctgcgcgcctgccaaatatcttgctgaacggtacaaccggtattgctgtgggcatggcgacggatatcccgccacacaacgtgcgcgaaattgcgcaggcagtgctggcgctgatcgataaacccacgacgtcgctcgacgagttgctggagtttgtacaagggccggatttcccgactgaagcagaaattatcactccgcgtgatgatattcgcaaaatttaccagaatggtcgtggctccgtccgtatgagggcggtgtggaaaaaagaagatggcagcgccgtgatcacggcgttaccacatcaggtttccggcgcgaaagtactggaacagattgccaaccagatgcgcgctaagaaattgcctatggttgaagatttacgtgatgaatctgaccatgagaaccctactcgcctggtaattgttccgcgcaccaatcgggtcgatctggatcaagtgatgagccacctgttcgccacgactgatttggaaagaagttatcgcatcaatatgaatatgatcggtttggataaccgcccatcagtcaaagggttgttagagatcctgactgagtggttggtcttccgccgccaaactgtgcgcaatcgcctgaatttccgcttggaaaaggtattgaagcgcctgcatattttagaaggtttattaattgccttcctgaatattgatgaagttattcatatcatccgcaccgaagatgatcctaaaccgctactgatgcagcgtttttccatttcggaaacgcaggctgaggcgatcctcgaactgaaactccgccacttagccaagctggaagaggtgaaaatccggggtgagcaggatgagttagcgaaagaacgcgatcagctacaggcactgctggcgtctgaacgtaaacttaacaccctgatcaagaaagaaattcaagccgatgctgctgcttatggtgatgaccgccgttcaccgctaactgaacgtggtgaagccaaagccatgagcgagcatgatattgtgccttctgaaccggtaaccattgtgttgtctgaaatgggctgggttcgtagtgcgaaaggccatgatatcgatccaagcggattaagctataaagcgggtgacagcttccgtgccgccgcgcggggcatgagcaatcaaccggtggtatttatcgactcaacggggcgcagttacgcattagatccgctcacgctgccttctgcccgtggccaaggggagccgctgaccggcaaactgacgccaccgccgggggcgaccattgaacatgtcttaatggcaccggattcgcagaaattactgatggcatcagatgcaggttatggctttgtctgtacttttaatgatttggtcgccaagaaccgcgctggcaagacgatgatcacattgccagaaaatgccaaagtcttgccgccactggaaatttatggcccggatgacatgctgctatccatcactgcggttggccggatgttgatgttcccggttgctgatctccctgagctttcaaaaggtaaaggcaacaaaattgtctctatccccgcagcacaagcggcggcaggtgaagatcgcttagcatggctgtttgtcctgcctccgcaaacctcgattacccttcattttggtaaacgtaaactcacgctacggcctgaagatttgcaaaaattccgtgctgagcgaggtcgtaaaggttcgccattaccacgtggtttacaacgcattgatcggattgatgtcgatgcaccgccacgggcaatagccaccgagagcgaagagtaa

SEQ ID NO: 41988 - DNA, 1719 bp, Yersinia pestis
atgcgtactagccaatatctgctctccactcagaaagagacacctgccgatgctgaagttatcagccatcaactcatgctccgtgccgggatgatccgcaaactggcctcaggtctttacacctggctaccgaccggggttcgggtgttgaaaaaagttgaaaacatcgtgcgcgaagaaatgaataacgcaggtgctatcgaagtatcaatgccagtggtacaacccgcggacttatggcaagagagtggccgctgggagcagtacggccctgagttgttgcgttttgttgaccgcggcgagcgcccttttgttcttggcccaacccatgaagaagtgattactgatctgatccgcggcgagattaactcttacaaacaactgccgctgaatttcttccaaattcagaccaagtttcgtgatgaagtgcgcccgcgctttggtgtcatgcgcgcccgtgagtttttgatgaaagatgcgtattccttccatactacgcaagagtctttacaggaaacttacgacgcgatgtataccgcgtacagtaagattttcagccggatggatttgaacttccgtgcggtactggcggataccggctctatcggcggcagtgcatcccacgaattccaagtgctggcagaaagtggcgaagatgatatcgttttctccactggctctgattacgcagccaatattgaattcgctgaagcattagcgccaactgaaccacgcgcaccggctacagaagagctgcgaatcgttgacaccccgaacgcaaaaaccatcgccgagttggtagagcaattcaaactacccattgagaaaaccgtgaaaaccttattggttcatgctcacgaagagagtggtcataagttggttgcgctcctggtgcgcggcgatcatgatttaaatgagatcaaagcagagaagctgccacaagttgccaagccactgacctttgctagcgaagaggaaattcgtgcagctatcggcgctggcccaggttcattaggcccggttaatttatcattgcctgttattgctgaccacagtgtggcggtgatgagcgatttcggtgcgggtgcgaatattgatgggaagcattactttggtattaactgggagcgtgatttggcgctgccgctcgttgctgatttgcgtaacgtagtagaaggcgatatcagccctgatggcaaaggcactctacagatcaaacgcggtattgaagtgggccatattttccagttagggaccaaatattctgaagtcatgaaagccaccgttcagggcgaagatggccgtaatcaggtgatgaccatgggttgctacggcataggggtatcccgtgtggtggcggcggctattgagcagaaccatgatgaccgcggtatcatctggccagatgctattgcgccattccaggttgctattctacctatgaatatgcacaaatctttccgagtgaaagaactggcagaagagctctacaccaccctgcgttctcacggtattgacgttattctcgacgaccgtaaagagcgcccaggtgtgatgtttgccgatatggaattgattggcgtgccacacaatatcgtcattggtgaccgtaatctcgatagcgaagaagtggaatacaaaaaccgacgcgtcggtgagaaacaaatgattaagaccagcgaaattgttgagttcttgctgagccaaataaaacgctga

SEQ ID NO: 41989 - DNA, 708 bp, Yersinia pestis
atgagtacattctcttttaatcagatcggcgtgatccgttcaccgtataaagaaaagtttgcggtaccacggcaacccggtttggttgaggatggtggtggcgaattacagttgctggcaccttacaaccaaccagaaagcgtacgcggcttatctgacttcagccatttatgggtgatattcgttttccatcagacgatggagggtggctggcgtccaactgttcgccctccccgtctggggggaaatacacgaatgggcgtatttgcgacccgttcaacttttcgtccaaacccgataggcatgtcgctgattgagttgaaaggcgttcgttgccaaaacggtgaggtgattctggcattgggcagcctggatttagttgatggcacgcctgttattgatattaaaccttatctgcctttcgctgagagccaacctcaggcgcgcgctggttttgcgcaatctgcaccagatacagagatgcaagtttgcttttctcccgccgccgagcaacagttagctcaccaccagcagcgttatccacatcttcgccgttttatcagccaagttttagcacaagatccacgcccagcttaccgtaaagacgataatgaaagccgtgaatatgccgttttattactggaatttaatgtgcgctggcgggttattggccagcaaacagaagtgttatcactcgacccacgctaa

SEQ ID NO: 41990 - DNA, 816 bp, Yersinia pestis
atgtctttaaaattcaaatctatcgcagcaattagtgcgctgattggtaccttgactttggtgggttgcggcccgacggaaaaagcgccaaaccatattaaagttggcgttattgtcggtgcagagcaacaagttgccgaagtggctcagaaagtggctaaagaaaagtacggtctggacgttgaactggtgacattcaatgactatgtgttaccaaacgaagcactgagcaaaggggatatcgaccttaacgctttccagcataaaccttatctggatcagcaaatcaaagaccgtggctacaaactggtttctgttggcaactcgttcgtttaccccattgccggctattccaagaaaatcaagtcactggatgaactacaacctggatctcaggtcgccctaccaaatgaccctactaatttgggccgttctctgttattgctacaaagcgttggtctgattaagctgaaagacggtgttggcctgctgccaaccgtattagatgtggttgagaaccctaaaaatctgaaactggttgagttggaagcacctcaattaccacgttctttggatgaccaacaaatcgctctggcgattatcaataccacttacgctagccaaattggcctgacaccagctaaagatggtctgtttgtggaagataaagaatcaccgtatgtgaatctgattgttgcccgcgaagacaataaagatgcggaaaatgtgaaaaaatttgttcaggcttaccagtctgacgaagtttatgatgcagcgaataaagcattcaacggtggcgcagtaaaaggctggtaa

SEQ ID NO: 41991 - DNA, 834 bp, Yersinia pestis
atgacaatgcaaccccttatcaagttgtacgatgggcgcttgatgccacaactcggcctcggcgtttggcaggcaagtatccaagaaacagagcttgcggtcagtaaggcgctggaagtcggttaccgctcaattgataccgccgctatttataaaaatgaagaaggtgtgggcaaggcgctgaaagcggcggctgttgcccgtgatgaactgtttatcaccacaaaactgtggaacgatgatcaacataatcctcagcaagccctggaaaccagcctgcaaaagctccaactggattatgtagatctctacctgatccattggccagacccgaaacaagaccattatgtcagtgcctggcgtgaactggtcacactaaaagagcaaggtttgatccgcagtatcggcgtgtgtaacttccatattcctcatctgcaacggttgattgatgagacgggtatcgcccctaccgtcaatcagattgaactgcatccgttgctgcaacaacgtcagctccatgcctggaatgccacccatcatattgcaaccgagtcttggagcccgttagcacaaggtggcaaaggcgtttttgatcaagaaattatccgcaagctcgctcagcaatataataaaacgcctgcacaaatcgtgatccgttggcatctggacagtgggctgattgttatccccaaatctgtcacaccagcacgtatcagagaaaactttgaggtttttgattttaagctacaaaaagaggagttgctggcaattaccaaactggattgcggtaaacggctggggccagacccggaagttttcggatctgaccgctga

SEQ ID NO: 41992 - DNA, 654 bp, Yersinia pestis
atgtctgaggcaatgatgtggttaatggctcgaggcgtctgggaaactcttatgatgacttttgtttccggtttctttggctttgttctggggttacctgtaggggtgctgttatatgtcacccgtcctgggcaaattatcgctaacaataaaatttatagaacgctgtctggtgtggtgaatattttccgctccattccttttattatcttattggtatggatgattccatttacacgcatgatcgtcggcacatcgattggattgcaggccgctatcgtgccgttaacggtaggagccgcgcctttcattgcccgtatggtggaaaacgctctgctagagattccgtcaggtttggttgaagcggcacgtgcgatgggcgcaacaccgatgcagatcatcaaaaaggtattattaccagaagccctgcccggcttagtgaatgcggcaacgattacattaattactctggtaggctattccgctatgggaggagcagtaggtgccggtggcttaggtcaaatcggttatcagtatggttatattgggtataacgctacggtgatgaatactgtattagtattactagtaattctggtctacctaattcagttaagtggtgatcggatagtcaaagccgttacgcacaaatag

SEQ ID NO: 41993 - DNA, 567 bp, Yersinia pestis
gtgactcagtccgttcccgcaatatttttagatcgtgatggtacagttaatgtcgatcatggttatgtccacgaaattgacaactttcaatttatcgatggtgttattgatgcatgccgtgaattgaaagaaatgggttttgcgttggtgttggtaaccaatcaatcgggtatcgcccgcgggatgtttaccgaagaacagtttttaagtctaaccgaatggatggactggtcattggctgatcgcggtgttgatttagatggcatctatttctgcccacatcatcctgatggcagtgtcgctgaattcagtgaaacatgtgaatgccgcaaaccattacccggaatgttattgcaagcgcagaatgaacttaatattgatatggctgcttcttatatggttggcgacaaaattgaagatatgcaggcggcattagcggcgaatattggcactaaagtattggttcgaacgggtaagccagtcactgccgagggtgaagcagcggccgattgggtgctaaatagtctggcagacctaccaaaagcaataaaagcgcgttataaatag

SEQ ID NO: 41994 - DNA, 804 bp, Yersinia pestis
atgagcatacctgtattcggattaggaacttttcgccttcaagatcaaattgttattgattcagtgagccaagctctgacgttgggctatcgggcgattgatacagcacaaatatatgaaaatgaagcgcctgttggtcaggcaatccaagaaagtggtattaatcgtgatgaactatttattactactaagatctggattgctaatttatcaaaagacaaattaattcccagcctgcgagaaagcatacagaaactgaaaactgactatgtagatttaacactgattcattggccatcacctaatgatgaagtttctgttgctgaatttatgtccgagttattaaaagcaaaagggctaggcttaactcgtcaaattggtatttctaactttactattgatttaatgaagcaggcgattgctgccgttggtgcagaagagattgcaactaatcaaatcgagctttctccattattacaaaaccgtaatgttgttgattttgccaaacaaaatggcattgcagtgacttcctatatgacactggcttatggcaaggcacttgcagagccagtgattaaaacgattgctgagcaacatggtgcgacccccgcacaagttattttgagttgggcgatgcaattgggttatggcgttattccgtcatcgactaaagctgctaacttggccagcaacttactagcacagaaattatgcctgaatgcagcagatatggcgttgatcgccacattggatcgcaatgagaggttggtcagccctgatggtttagcacctaaatgggattaa

SEQ ID NO: 41995 - DNA, 834 bp, Yersinia pestis
atgagaattattttcttcacgttattaatactattgggtttgattatcatattaaaagtcaactcacgctcaagaagaatatcagtttataataaaataaattcgcgtgaaaacaaaagcaaagaggcaaataatgatacaaaagataaaccgactgtactgtctgattttataaaactccctgtttttttatctaacattttatatctaaaggttttgattgttatttttatattatccatccttacaatattggctatttttaatgtagtgaatatcaatcaaaaaacactactcactattgggctactctctattatctccaccttatatttgccaagaatgataattaaaaatgcactcactaaaagaacaaataatttattgaaatctttacctttctttattgatattacagcggcatgtgttcaatctggcatgacaatagagaattcattaaattataccacacaaaaattccaaacaataaataccgacctatgcttgattatgtcaaaagtgaccaagcgtgctgaaataaatggtttagaaaatgcgattaaagaacttcaatattactcaccagcaatagaaatgaaaatgttttgcagcacactgcaatacagtattagttttggctcaacggtgtacgaacaactgactcacttatcacaagatatgagagaaatgcagctgctgatgacagaagagagcatcagtaaattatccacaaaactaacactgccattatttttatttattttgatccctttcgtcttattggttatctcaccgagtattctggagctacttaactatgttaaaaatatttaa

SEQ ID NO: 41996 - DNA, 1233 bp, Yersinia pestis
atgactaccggaataaaaataatgatgttcatgggtgtgctgtttataaaaatagacattacgccattatcgaatcatggaataaacatttataatggtggtagtatgcaattaattctcaataaagatttaatcaataaaaaagataatagggaaaagagtgctgttgtcattatctcaacccgaaaagggttaaaagataaaatttccgaatatgtccgattggctgatataaaaaacatcaaagaaatagatgatgatatttttagcgccgcctcaattttgataccggataatgtgaaaggaattataatagatataaatgagaatcatgatatcaacactattcttgatctaatgaaagttcatacaccacgggactgttggtgtatattagtcggtgatattgattctattagcatcgcccaacaatttattgagcgtggcatattatatctacatatccaatcacaattggccgatctcacacaaaatttactaaaaggtatccaaatagagtcagatagaaaagcattttttatcagtatactgggttgccggggagggataggcacgacattactcagttaccaactggcgcatgtgatcacccaaataaaaaaatcgcctaccttgttattacaaggcaatcaaggctcgcaagatctcgacttgatcactgaaaaaaaaatgggcgaagatattactggttaccagaaaaattttgatcttatgcgaggaaacgaaagaaaactcagtgaagttaatgagcataacaataaaaaacataactttattattttcgatcaaccaattcataatgcacggaaagaaaaaacactcgattatatctctaactcaaattgcatcattctgcttattgaccatagtatgatgtccgttcgtgtagcgaaagagtttattgatactctggaaaggttcaaaagagataatagacaagccattagactatttatttgccttaacgaaaacaggccaataacaaaagatatgttgacgacttctgatatccaatcattattgggccattctattgataccgcgataccttatatcaacaatgcgaagaattcactgaatagccctgactattttggtagaaagaaaaccaaggttgttgaactggcaaaacaatctttaggtataaatataaatttatcctctcataccaatatgtggattagggaaaaactcaataagttatttaaataa

SEQ ID NO: 41997 - DNA, 1485 bp, Yersinia pestis
atgccaaataatgaaaaaatctcggctagcagcattaacccccactacagtcccaaactcactaatgaagatctggccccaactcgtaagcagaactggggctggtacaatatcttttcattttggatgacggatgtgcacagcatggggggttatgtggtcgccgccagcttctttgctctcgggctatccagttggcaagtgctgttatcgctattagtcggtatttgcattgtacaaatttgcgccaatctggtggccaaaccaagccagatagccggtgtgccctatgccgttatctgtcgacaatcttttggggtatttggagcaaatatcccagccgttatccgtgggctgatcgccgttgcctggtatggcattcaaacctatctggcgggtaatgcttttatgctcgtgatgctgaaattcttccccagcctgatccccctggctcagagccaatggctagggttatccaccctcggctggatctgtttctccattatgtgggtactgcaggcgatggtgttctggcatgggatgaatgcgattaagcgctttattgattttgccgggccggcagtctatgtcgtgatgctgtcattggcgttatggattgtctatcaaaccggctggagtaacatttcattcaccctcgccagtaaaatcttaagcccatcagaacaggtctggcagatgctgacggcaaccgcgctggtcgtctcttattttgccgggccattactgaactttggtgatttctcccgctatggcaaaagtatgcaggaaatccgccgaggcaaccgatgggggctaccctttaacttcctcctgttctctctcgtcaccgtggtgattgtctccggctcacagtcgctgttcggtgaaatgattaccgaccctatcgagaccgttacccgcgtcggcaatggcgtggctatcgctctaggtctactgaccatgattatcgccactatcgggattaatatcgtcgcaaactttgtttcacccgcctttgatttttctaactgttcaccacaaagaatcaactttcgtactggtgggatgatagctgcggtaggttcagttttgcttaccccatggaacctgttccaatcaccaatcattatccactacaccctggacgtgctgggtgcctttatggggccgctatttggtattttaatcgctgatttttatctgattaaacgcggccaattatatgtagatgatctgtttaatgcttcatcatcaggacgttattggtatcgcggaggttttaatccgaaagcgattatggcgttactgcccgcagtggccattggcttgatgatcattttcatccccaacctacagcagatctccagtttcagttggtttatcggggcgtttcttggcgggagtatttatcgctttattgcacgcaatgacccattgccgaacaatgcggctctgtttatacgccctgaaataggcaaagattga

SEQ ID NO: 41998 - DNA, 1671 bp, Yersinia pestis
atgaaaaaattaatactaaagaagatcatgatactctcagattcaggaaaatccgcgaggcaattcgagttcggagagcatctaacactgataacagcagatgatgataatagcgtagggaaatctacgcttgcaaaaatgattttttggacttttggctgtgagcccattttttccgaggtttggagaacattagactgtacatcaattatagagtttgagataaataatgcaccttacattattcatagatataaaaatgaaattaaaattaggcatagcaatggtaaactacacagtttcccaaaaataaccggtgattattcaaagtatttttcagaacttgttaattttaatgtattactccctaagaaaggtcaattaacactagaaacccctccacctgcatattacttcatacccttttatattgaccaaaaaagaacatgggctaaaccttgggatagtttcgagaatcttcagcaatatagtagctgggcaaaaccagtcatctcctaccactcaggattatttataaaagcacactttgaagttgaaaaagatatttatgtaataaaaagagagttagaagaagttgagaaaggcgttactgaactgaataatgcagttataatactcaggcaaaaccttatcgatacagacaatgtacttccttcgaccgagtttatttttagtgttatacaagaatcagaaaaaaacaaaaaaaaccttcttgaagaaagaactaacttaagagttgaaaaaatacgacttgagtcgcaaatcaaattagccaaagggattattagtgagctagataaagattatattttttccgtcgaaaacatggaagatggtgacatagagtgcccaacatgtggaacaatacatgaaaattctatagcacatcgcactagcattttgattgatatggaacttgcaaaaaaccaactcgaatccttagagtcagaagtcaacggaataataaatttgctagttataaaagatgaggagattacagagcaaagcaataagagcgaacgaagttataataatgtcattgaaagtgactccaattcgttaatatcattcaccaatgataagtttgaaaaacgcgcacacgaaataaatagtaaaaaaaatataaccattgaaattaaaaaatcagaagaaaaaacagcaaaaaaatctcaaagtgacatactatccaaggaacaaaaaagtgaaataaagcaaagcttcgcagatagattatcgaaatacataacaaaattaaaagttaacgttgacatatctaaaataaaaagccctcttgattataaaaaaatatatgaagtaggcggtgcagcagaagatgcaagggctgtccttggttattatttagcaatttatgaacaagtagcggactcatgtgaagaagcattgccacctttggttattgataccccaaaccaacaagaacaagcaagcgggaattataccaacattataaaatcaatttctgacggcataaataatgataggcaatatgttatatgtgccatggaacacaaagccttagagcaaataaaaacaaatgctcaagtaattaaattagacgcaagaaaaatactattacaagatcaatacgagaaaatttcaaaactgcgaaatgaagttattttcgattga

SEQ ID NO: 41999 - DNA, 483 bp, Yersinia pestis
atgacaaagaaaaaagcatacaaacccggttccgcaaccattgcgcaaaataaacgagcccgtcacgaatacttcattgaagaagagttcgaagctgggcttgcactgcaaggttgggaagtaaaatcactgcgtgcaggcaaagcaaatatcagtgacagctacgtaatgtttaaaaacggtgaggcattcctgtttggggccacaattacgccgttgaacgttgcgtcgactcatgttgtttgcgagcctatgcgtacccgtaaactgctgttgaacaaacgcgaactggattccttgtttggccgagtgaaccgagaaggctacacggttgtcgctctctccatgtattggaaaaatgcctgggtgaaagttaaaatcggcgtagcaaaaggtaaaaaagataacgacaagcgcgatgatattagagatcgtgagtggaagttagacaaagcgcgcatcatgaagcacgcaaatcgttaa

SEQ ID NO: 42000 - DNA, 882 bp, Yersinia pestis
atgaataatagaagattcgattgtattggtattgtcggtcacccgcgacacccggctgcacttgccacccatgaaatactctaccactggctaaaagccagaggctacgccgttatggttgaacaacagattgctcatgacctcaatttaaccgatgccataacagggagtttggcagatattggccaaaaagcagatttggctgttgttgtcggcggtgatggcaacatgctcggtgctgcacgggtacttgcccgttatgatataaaagtgattggtgtcaaccgaggtaatctgggtttcttgaccgatttagacccggataatgctctgcagcagctttcagacgttttggaaggcgagtacctgagtgaacaacgcttcctgctagaaacgcatgtacgacgtacaaatcaacaaagccgtatcagtaccgcaatcaatgaagtggttttgcatccaggcaaagtcgcccatatgatcgaattcgaagtgtatattgatgaccgcttcgccttttctcaacgctctgatggcttgatcatcgcaaccccgaccggttctaccgcctattcactttccgcaggcggcccaatcttgacaccaactctggatgccatcgtattggtaccaatgtttccacacactcttactgcgcgcccattggttatcagcagcagtagcaccatccgactgaagttttcgcacattaccagcgacctggaaatcagttgcgatagccagatagccctacccattcaggaaggggaagaggttttaatccggcgcagtgattttcacctcaatcttattcatccaaaggactatagctatttcaatacgttaagcaccaaattgggttggtcaaaaaaattattctaa

SEQ ID NO: 42001 - DNA, 1281 bp, Yersinia pestis
atggctgacaaaaaagcgacgctgaatttaggcgaagctgcgatcgaactgggtgtcctatccccaaccctcggcactgacgtgatcgacgtccgcaccttaggttctaaaggttattttacctttgaccccggttttacctctaccgcatcctgcgaatcaaaaatcacctatattgatggtgatcagggtattttgctgcaccgtggcttcccgattgcccagttggcaaaagattctacttatctggaagtttgttacattctgctgtacggcgaaacacctacgccagaagagtacaaaacgttcaaaaccacagtgacccgacataccatgatccacgagcagatcacccgtctgttccatggtttccgccgcgattcacatccgatggccgtgctatgtggggttactggtgcgctagccgccttctaccatgatgctctggatgttaataacgagcgccatcgtgaaattaccgccttccgtctgttgtctaaaatgccgactgtcgcagcgatgtgttataaatattcactgggtcaaccgtttgtttatccacgtaacgatctgtcctacgcgggtaacttcctacacatgatgttctctacgccatgtgagaaatatgaagttaacccagtactggaacgcgctatggatcgtattctcatcctgcacgcagatcacgaacagaacgcgtcaacatcgaccgtccgtactgccggctcttctggcgctaacccgtttgcctgtatcgccgcggggatcgcatccctgtggggccctgcgcacggtggtgccaatgaagcctgcctgaagatgttggaagagattaaaactgttgagcatatccctgaatttatccgccgcgcgaaagataagaatgactcattccgtctgatgggttttggtcaccgtgtctataaaaactatgaccctcgtgccaccgtcatgcgtgaaacctgtcatgaagtgttagaagagctgaagctgaataacagcttgttagaagtggcgatggagttggaaaacatcgcactgaacgatccttacttcattgagaaaaaactgtatccaaacgtggacttctattcaggtattatcctgaaagccatggggattccatcgtcaatgtttacggtgatattcgccattgcccgaaccatcggttggattgctcactggaacgaaatgcataatgacggcatcaagattgcccgtccgcgccagctttatactggctatacagaacgtgatttccagagccaattgaaaaaataa

SEQ ID NO: 42002 - DNA, 1767 bp, Yersinia pestis
atgaatctgccaatcagagagtttgatgcagttgttgtcggtgcaggtggtgccggtatgcgtgccgccctgcaaatttcacaaatgggcctgtcttgcgccctgatatctaaagtcttccctacccgttcccataccgtatctgcgcagggggggattaccgttgcgctgggtaatacccatgaagataactgggaatggcacatgtacgatacggtaaagggttccgattatatcggcgatcaggatgccatcgaatatatgtgtaaaaccggtccggaagcggttctggaattggagcacatgggtttacctttctcccgtttagaggatgggagcatttatcagcgtccatttggggggcagtcactgaactttggcggtgggcaagcggcgcgtacagcggctgcagctgaccgcaccggtcatgcgttgttacacaccctttatcagcaaaacctgaaaaaccacaccactattttctctgaatggtatgcactggatttggtgaagaatcaggacggcgcttttgtcggttgtactgctattaatattgaaaccggcgaagtcgtctatttcaaagcacgggccacaatattggcaactggcggtgctgggcgtatttaccaatcaacaaccaatgcgcacattaataccggtgacggtgttggtatggccttgcgtgctggagtcccggtgcaggacatggaaatgtggcagttccacccgaccggtattgccggtgcgggtgtattagtgactgaaggctgccgcggtgaaggggggtatttactgaataaacatggtgaacgcttcatggaacgttatgccccgaacgccaaagatttggcgggtcgtgatgtagtggcacgttccattatgattgaaatccgtgaaggacgtggttgtgacggtccttggggcccacatgccaaactgaaattggatcacttaggtaaagatgtgcttgaatcccgtctgccgggtattcttgagctgtcgcgcacctttgcacacgttgacccgatcaaagaaccgatcccggttatccctacttgccattatatgatggggggaattccgactaaagtgacgggtcaggcgattaccgtaaatgaaaagggtgaggatgttgtgatccccggcttgtttgctgtaggcgaaattgcctgtgtttccgtccacggtgcgaaccgcttgggagggaactcattactggacttagtggtatttggtcgtgctgccggtatgcacctgcaagaatcattgatggagcagggcgcaagccgcgatgccagtgagtcagatatcgaagcctctctggctcgcatgaatcgctggaataatacccgttcaggtgaagatccagttgaaatccgtaaagcattgcaagcctgtatgcagaacaatttctccgtgttccgcgaaggcgatgcgatggcaaaagggttggaagagctgaaaactatccgtgaacgtttgcaaaatgcccgtttggatgacacttccagtgaattcaatactcagcgtattgagtgcctggagctggataacctgatggaaactgcgttttcaaccgctgtgtcggcaaacttccgtaccgagagccgaggtgcccatagccgcttcgatttcccggatcgtgatgatgtgaactggctgtgccattcactgtatttgccaggtactgagagcatgacccgccgtgaggtaaacatgcaacctaagctacgcgaggcattcccgccgaaagtgcgttcttattga

SEQ ID NO: 42003 - DNA, 2808 bp, Yersinia pestis
atgcagaacggcgcaatgaaggcctggctggattcctcctatctggcgggcgcgaaccagtcctacatagagcagctctatgaagactttttaactgatcctggttccgttgatgatagttggcgttcaatttttcaacagctaccaacaacgggtgtaaaacctgatcagctccactcccaaacgcgtgagtatttccgtcgcctggcgaaggattccactcgttataactcctctatcaatgatcctgatattgatgccaagcaagttaaggtattgcagttaatcaatgccttccgcttccgtggccatcagcatgccaatcttgacccactcggtttgtggaagcaggagtctgttccagacctcgatccttcctaccataatctgaccgaagctgacttccagaacaccttcaatgtcggttcttttgccatcggcaaagaaacgatgaagctggctgatttgtatgccgcgctgaagcaaacttattgcggttctgtgggtgctgaatatatgcacattaccaacaccgaagaaaaacgctggattcagcagcgtattgaatcggttgttgggaaaccgacattcagtgatgcagagaaacgccgtttcttgagtgaactgaccgccgctgaaggtcttgagcgttatttaggcgcaaaattcccaggcgccaagcgtttctctctggaggggggggattcactggtcaccatgctcaaagagatgatccgtcatgccggtaaaaatggcacacgtgaagtcgtcctggggatggcccaccgtggccgtttgaacgtattgatcaatgtgctgggtaagaaaccagaagacttgtttgatgagtttgctggtaagcataaagaacatctcggtactggtgatgttaagtaccaccaaggcttctcttccgatgtcgaaaccgaaggcggtctggtccacttggcactggcctttaacccatcacatttggaaattgtcagcccggttgttattggttcagtgcgtgcacgtcgcgatcgcctggatgaagcacgcagtaatatggtgctgccaatcactattcatggtgatgcggcgatcaccggccagggcgtggtacaagaaacattgaacatgtcacaggctcgcggctatgaagtgggcggtactgtacgcattgttatcaacaaccagattggtttcacaacctcgaacccactggatgcgcgctcgactcaatactgtactgatattgccaaaatggtacaggcaccgatttttcacgtgaatgctgatgatcctgaagctgtggcatttgttacccgtctggcgttggatttccgtaatacctttaaacgtgacgtgatgatcgatctggtttgttaccgccgtcatggccataacgaagccgatgagccaagtgcaacacagcctgtgatgtatcagaaaattaaaaaacatccgacaccgcgtaaaatctatgctgacaaactgattgagcagaatatcgccagcctggaagatgcgacagaaatggtcaacctatatcgtgatgcattagatcacggtgactgtgtggtggaagagtggcgtccgatgaatttgcagtccttcacttggtcaccgtatttgaaccatgagtgggatgaagcgtatccaagcaaagttgaaatgaaacgcctgcaagagctggcgcgtcggatcagctctgcgccggaagccattgaaatgcaatctcgggttgcgaagatatacagtgatcgcgcgttgatggccagcggtgagaagccatttgactgggggggagcggaaacactggcttacgctacattggtagacgagggcattcctattcgtttatctggcgaagatgcggggcgtggtactttcttccaccgccatgcggtcatccataatcagaaaaatggttctgtttatgtaccactgtcaaatattcacagtggccagggtgatttccaggtttgggactcggtgctgtcagaagaggcagtattggcgttcgaatacggctatgccactgcggagccgcgtaccctgactatctgggaagcacagtttggtgacttcgcaaatggtgctcaggtggttatcgaccaatttattagttctggtgaacagaaatggggtcggatgtgtggcttagtgatgttgctaccacatggctacgaagggcaggggccggaacactcctccgcacgtctggaacgttatttgcagctttgtgctgaacaaaatatgcaggtgtgtattccatcgacccctgcacaggtttatcacatgatccgccgtcaggcattacgtggtatgcgccggcctctgattgttatgtcacctaaatcattactacgccatccattagcgacatcatctctggatgaactggctaatggcagcttcttacccgctattggcgaaattgatgagttggatcctaaaggtatcaaacgtgtcgtgatgtgctcaggcaaagtctactatgacttgctagagcagcgtcgtaaaaatgggcaaacagatgtcgccatcgtgcgtattgaacaactgtatccgttcccacatcaggccgttcaatcggtgttggaacaatatgcccatgtacacgatttcgtctggtgccaggaagagccacttaaccaaggtgcctggtattgtagccagcataacttccgcgaagtgattccatttggtgcttccttgcgctacgcaggtcgtccagcatcagcttcaccggcagttgggtatctttccgtacaccaaaaacaacaacaagctctggttaatgacgcgctgaatgttgaatag

SEQ ID NO: 42004 - DNA, 873 bp, Yersinia pestis
atgtctattttaattgataaaaacaccaaagttatttgtcagggttttacgggcagccaagggactttccactccgaacaagctatcgcatacggtacaaaaatggttggcggtgttacgccaggtaaaggcggcacacagcatttggggctgccagtctttaataccgttcgtgaagcggtagaaactactggtgctacggcctcggttatctacgtgcctgcgccattctgtaaagattcgattttggaagcgatcgatgccgggattaaactgattatctgtattactgaaggtattccgacgctggatatgctggtggtaaaagtcaggttggaacagagcgatgcgcgcatgatcggtccgaactgtccgggtgttattactcctggtgaatgtaagatcggtatcatgccgggtcacatccacttgccaggtaaagtgggtatcgtttcacgttcaggcacgctgacctatgaagccgtaaaacagaccaccgacattggtttcggccaatcaagctgtgtgggtatcggcggcgacccgatcccaggctctaactttattgatatcctgaaactattccaggaagatccgcagactgaagttattgtgatgatcggtgaaatcggtggtaacgctgaagaagaagcggctgcttatattaaagagcacgtgactaaacctgttgtgggttatatcgcgggtgtgactgcacctaaaggtaaacgtatgggccatgctggcgctatcattgcgggcggtaaagggactgcagatgataaatttgctgctctggaagctgcgggtgtgaaaacagttcgtagcctggcagaaataggtaatgctgttaaagctgtattaccgcagtaa

SEQ ID NO: 42005 - DNA, 1569 bp, Yersinia pestis
atgtttgatattgtcgaactgtcacggttacagtttgccttaacggcaatgtaccatttcctttttgtcccattaacgctcggtctggcgtttctgttggcaattatggaatcggtttatgtgctgtctggtaaacaaatctataaagatatgaccaaattctggggtaagttatttgctattaactttgctctgggggttgccactggtttaactatggagttccagtttgggactaactggtcatatttctctcattacgtcggtgatatcttcggggcccctctggctatcgaaggtttaatggcgttcttcctggaatctacgtttgtcggtctattcttcttcggatgggatcgtctgactaagcatcagcatttagctgtaacttggctagttgcgttaggttctaacttctctgcattgtggatcttggttgcgaatggttggatgcaaaacccgattgcatctgatttcaactttgaaaccatgcgtatggaaatgctgagcttctcagaattagttctgaacccggttgctcaggtgaaattcgttcataccgtcgctgcaggttatgttaccggcgcgatgtttatcttgggtatcagttcttactatctgttgaaaggacgtgatattccctttgccaagcgttcttttgcgattgctgcaagttttggtctggcctccgtattgtctgttatcgtcctgggtgatgagtccggttacgaaatgggtgacgtacagaaaaccaagttagccgcaattgaagctgaatgggaaactcagccgcctccagcagcctttacgctgtttgcgatccctaaccaggaaaccatggagaaccggttcgccattcagattccatatgcattaggattgatcgcgacccgttcactggataccccggttatcggtttgcgtgacttgatgtcgcaacatgaagtgcgtattcgtaacggtatccaggcgtatagtttgttagaacagttacgtggtggtaacactgaccctgctgtacgtgatgcattcaataaagcgaagcaggatcttggttacggcatgttgcttaagcgttatacggaaaacgtagctgatgcgactgaagaacaaattcagttagctgctcaagactctattccgcgcgtactgccgctttatttcgccttccgcatcatggtggcctgtggcttcctgatgttgctgattattgggctggcgttctataacgtggttcgtggccggattggtgagaaaaaatggcttctgcgtgccgcattgtatggtattccgttgccgtggattgccgtagaagcaggctggtttgtggccgagtatggccgtcaaccttgggccatcggtgaagtattgccgacagcagtcgccaactcatcagtcactgccggggaaatactgttctcgatggcgttgatttgcggtttgtatacgctgttcctgattgcagaaatgtacctgatgttcaaatttgcgcgccttgggcctagcagcctgaaaactggccgctatcattttgaacagccgactgccccagtgcaggaagcacggtaa

SEQ ID NO: 42006 - DNA, 1167 bp, Yersinia pestis
gtgggtaaggcaaccgagcaaaatgataagctgaatcgcgccgttattgtttcggtggttctgcacatcatattgattgccctgttgatttggggctctctgacgcagacgactgaaatgggcggtggcggtgctggcggcgaagtgattgacgctgtaatggtcgatccgggtgcggtgacagagcaatataatcgtcaacagcaacagcaaacagatgctaaacgtgccgagcagcagcgtcagaaaaaagctgagcagcaagccgaagaattgcagcaaaagcaggctgctgaacaacagcggctgaaagaattagaaaaagagcgtctgcaagcgcaagaagatgcgaagctggctgctgaagagcagaaaaagcaagttgctgaacaacaaaaacaaatcgctgaacagcaaaagcaggccgctgaacaacaaaaaattgctgctgctgccgttgcaaaagcgaaagaagagcagaagcaggctgaaacggctgcggctcaggcaaaagctgaagcagataaaatagtgaaagcgcaggctgaagcacagaaaaaagccgaggctgaagccaaaaaagaagctgctgttgccgctgcggcgaagaaacaagccgatgccgatgcgaagaaagcggtagaggttgccgaaaaggctgcggctgacgcagcagaaaagaaagcggccgcagatgcagagaaaaaagccgctgctgctaaaaaagttgctgccgccgctgaggccaagaaaaaagcggcagcagaagcggctgcctcaacggatgttgatgatttgtttggtggtttggcaaacgctaaaaatgcaccgaagagtggttcgggtgcaggtgccgctgctgccggtaaaggtggcggtaagaaaagcggggcatcaggtgctgatatcagcggctacctggggcaaatcaccggcgcgatacaaagtaaattttatgatgcagatctttacaaaggccgtacctgtgatttgcgaatcaaattggcaccagacggtctattaatcgatgtgaaagcagaagggggggacccggcactgtgccaggctgctatcgctgcggcaaaacaagcgaaaattcctaagcctccaagtacggatgtctatgaacaatttaagaatgctccgcttgtgtttaagcctcaataa

SEQ ID NO: 42007 - DNA, 810 bp, Yersinia pestis
atgaacagtaacttcagacgtcacttagtgggtctgtcgttactggttggcgtagcggtcccatgggccgctactgcccaagcgccaatcagtaatgtcggctccggctcggtagaagatcgggtcactcaacttgagcgtatttccaacgctcacagccaactattaactcaacttcagcaacaactgtcagattcgcaacgcgatgttgatagtttacgcggtcagatccaagaaagtcagtaccagctcaatcaagttgttgagcggcagaaacagatctaccaacagatggagagtctgagcggtggccaaggggcgcagaattcagcttctgcggcgagtggtgcaacagcagacaatacagcggctggaagttccggtaatgccgacgcaggcgcagcagcttctacagcggcaccagcagcaagtactggtgatgaaaacagcgattacaatgtggctgtctctctggctcttgagaaaaagcaatatgatcaagcgatcactgtttttcagagttttgtgaaacagtatccaaaatcgacttaccagcccaatgccaactattggttagggcagttgtattacaacaaaggtaagaaagatgatgctgcatattattatgctgttgtcgtaaaaaattatccaaaatccccaaaaagttcagaagccatgtttaaagttggggtgatcatgcaggataaaggccaaagcgataaagcgaaggcggtttatcagcaagtgatcaagcaatatcccaataccgatgcggctaaacaggcacagaaacgtttatctgctctttag

SEQ ID NO: 42008 - DNA, 1083 bp, Yersinia pestis
atgatgaagcgcaatattcttgcagtagtaatcccagctctgttagccgctggtgcagctaatgcagcagaaatctataacaaagatggcaacaaacttgacctgtacggtaaagttgacgcacgtcactctttctccgataacaacaaacaagatggcgacaagtcttacgttcgtttcggcttcaaaggtgaaacccaaattactgaccaactgaccggttacggccagtgggaatacaacattcaagcaaacaacgctgaagacacaggcgctcaagacggcaacgcaacccgtctgggctttgctggtctgaaatttgctgaattcggttcattcgactacggccgtaactacggcgtaatctatgacgttaacgcatggactgacatgctgccagtgttcggtggtgattcaatctccaactctgacaacttcatggctggccgttctactggcctggcaacttaccgtaacaacaatttcttcggtctggttgacggcctgaactttgccctgcaataccaaggcaaaaatgaccgttctgaagtcaaagaagctaacggtgacggcttcggtatcggttctacttatgatatcggcaatggcattaacttcggtgctggtttctcttcttcaaaccgtactcttgatcaaaaatatggttctaccgctgaaggcgacaaagctcaggcatggaacgttggcgctaaatacgacgcaaacaacgtatacctggctgtaatgtatgctgaaactcagaacctgactccatacggtagcttctctgatactatcgctaacaagactcgcgatatcgagatcactgcacaatatcagttcgacttcggtctgcgcccatcactgggttatgttcagtccaaaggtaaggacctgaacgatgttgatgccaaccatgatctgctgaaatatgtttctgttggtacttactactacttcaacaaaaacatgtctacctatgttgattacaaaatcaacttgctggacgaagacgagttcacaatcgcaaacggtctgaacaccgacaacgttgttgctgttggcttggtttaccagttctaa

SEQ ID NO: 42009 - DNA, 1401 bp, Yersinia pestis
atgagcgtagtgcctgtagtcgacgtactgcaaggccgcgccgcggttggcagtgaagtcaccgtgcgcggttgggtgcgtacccggagagattctaaagcgggtatctccttcgttgccgtttatgacggttcctgctttgacccgttacaggccgtcgtgaataatactttgccgaattatcaggatgaagtactgcatctgaccaccggttgttccgttgaagtcaccggtaccgtggtcgcatcaccgggtgaaggccaaagttttgaaattcaagcaaccgccatcaacgtagtaggctgggttgatgatccggatacctacccgatggccgcaaaacgtcacagcattgaatatttgcgtgaagtggctcacttacgcccgcgtactaacctgattggtgccgttgcccgtgttcgccacacgttggcacaagcaatccaccgcttcttcgacgaaaatgggtatttctgggtttctacaccactgatcaccgcctctgatactgaaggcgcaggtgagatgttccgtgtttcaactttagatctggaaaacttgccacgcacggataccggtgctgtcgatttcagcgaagacttcttcggtaaagaagcgttcctgaccgtatcgggtcagctaaacggtgaaacctacgcctgtgcattatcaaaggtttacacctttggcccaaccttccgggctgaaaactccaataccagccgccatttggctgaattctggatggttgagccggaagtggccttcgcttctctggatgatgtcgccggtttggctgagaaaatgttgaaatacgttttccaggcggtcttgaatgaacgtgctgatgacatgaagttctttgccgaacgtgtcgataaagacgcggttgaccgcctgcaacgtttcgtcacctctgattttgctcaggttgactacactgatgccattgagatcttgctggcatccggtcagaagtttgagaatgatgtttcatggggtattgatttgtcctctgaacatgagcgttatctggctgagaaacactttaaagcgccggtggtggttaaaaactatccgaaagatattaaagccttctatatgcgaatgaatgaagatggcaaaaccgttgcggcgatggatgttttagcgccgggtattggtgaaatcatcggtggttcacaacgtgaagagcgtttagatgtcttggatgcgcgtttagccgaaatgggcctgaataaagaagattattggtggtatcgtgatctgcgtcgctacggcactgtaccgcattcaggttttggcctcggatttgagcgtttaatctcatatgtcactggggttcaaaacgttcgggacgttattccgttcccacgcacaccgagaaatgccagtttctaa

SEQ ID NO: 42010 - DNA, 1206 bp, Yersinia pestis
atgactcaagacgcctcaccgattttgacttcattgcttgatacggacgcatataagcttcatatgcaacaagccgtatttcatcattatcgtcacattactgttgccgccgaattccgctgccgtagtgatgagctgctgggggtgtatgctgatgaaatccgccaccaggtaaccctgatgggtcaattagcactgacatctgatgagtttatttacctctccagtctccccttcttccaggatgattatctgcattggttgcgcgattttcgttttaaaccagagcaagtctccgtcgctgttcatgacggtaaattagatattcgcattgccggtttatggtgtgaggtgatcatgtgggaagtgcctttgctggcagtgatcagcgaaatcgttcaccgccgccgctctacccaagtgacaacggatcaagcggttcaacaactgcgcacaaaacttgagcaattcaatgccctcagtgcggatatcgatattactcactttaaattgatggatttcggtacccgccgccgattctctcgcgagatacagcacaccgttgtcagcacgttaaaagatgagttcccttatctggtcggcaccagcaactacgacttagcccgcacattagccttagcgcccgtcgggactcaagcccatgagtggtttcaggctcaccaacaaattagcccaacattggcaaacagccagcgtgtagcactgcaagtctggctggatgaataccccaatcaactgggcatcgcactaactgattgcattactatggatgctttcctacgcgattttgatctggctttcgccaaccgctatcaaggcctacgccatgactctggtgacccgatcgagtggggggagaaggctatcgcgcattatgaaaaattgggtattgacccaatgaaaaaggtattggtgttttcagataatctagatctggagaaagcattattcctctaccgtcacttttatcagcgcattaagttggtgtttggtatcggtacccgtttgacctgcgatataccagatgttaagccattgaatattgttattaaactggttgaatgtaacgataaaccggtggctaagctctcagatagcccgggtaagactatttgtcaggaccccgcattcgttgatcaattacgtaaagcctttgcgctaccgttagtcaagaaagccagttaa

SEQ ID NO: 42011 - DNA, 2616 bp, Yersinia pestis
atgacacaacagccgcaagctaaataccgtcacgattatcgtgcgccggattacaccatcaccgatatcgatctggacttcgcactggatgcgcaaaaaacgacggtaacggcggtcagtaaagtaaaacgtcaaggaacagacgtgacgccgttgattctaaatggtgaagatctgacactaatcagtgtcagcgttgatgggcaagcatggccacattatcgccaacaggataacacgctggttattgagcaattacccgcagattttacactgacaattgtcaatgatattcatccggcaaccaacagcgcgttggaagggttatacctgtctggtgaagcgctctgcacacagtgtgaagccgaagggtttcgccacattacttattatttagaccgtcctgatgtgctggctcgttttaccactcgcatcgtggcggataagtctcgctatccatatctgctctccaacggtaaccgtgtggggcagggtgaactggatgatggtcgtcattgggtcaagtgggaagatccctttccgaagccttcttacctgtttgctttggtcgccggtgatttcgatgtgttacaggataaatttattacccgttcgggtcgtgaagtcgccctcgaaatttttgttgaccggggtaatttagatcgtgctgattgggccatgacatccctgaaaaactcaatgaagtgggatgaaactcgctttggtctggaatatgacctcgacatctatatgattgtcgctgttgattttttcaacatgggggcgatggagaataaagggttaaatgtatttaactcaaaatatgtgctggcgaaagcagaaacagccacggacaaagattatctaaatattgaagctgttatcggccatgaatatttccataactggacgggtaaccgcgtcacttgccgcgattggttccaactaagtctgaaagagggcttaaccgtattcagagatcaggagttcagctccgatttaggttcacgctctgtcaaccgtatcgaaaacgtgcgggtaatgcgggcagcgcagtttgcggaagatgccagcccgatggcacatgctattcgcccggataaagtgatagagatgaataacttttatacactcaccgtgtatgaaaaaggttcagaagttatccgaatgatgcatacgctactgggtgaacagcaattccaagcgggtatgcggctctattttgaacgtcatgatggcagtgctgcgacctgcgatgattttgtacaggcaatggaggatgtatcaaatgtcgatctgtctctcttccggcgttggtacagccaatcagggacaccattattgaccgtgcatgacgattatgatgttgaaaaacagcagtatcatttattcgttagccaaaaaacgttaccgacagcggatcagccagagaaattgccactgcacattccgttagacattgaactgtatgatagcaaaggtaatgtcatcccattgcaacataatggcttgccggttcaccacgtgctgaatgtgactgaagctgaacagacctttacttttgataatgtggcacagaaaccgattccatcgctgttgcgtgagttttctgcgcccgtaaaattggattacccttacagtgatcagcaactcacgttcctgatgcaacatgcccgcaatgaattctctcgctgggatgctgcgcaaagcttgctggcaacttacattaagttgaatgttgctaaatatcagcagcaacagccactgagtttaccggcgcatgtggcagatgctttccgcgcaatattgctggatgaacatcttgatcctgccttggccgcgcagattttgacgttgccctcagaaaatgaaatggccgaactgtttacgactatcgatccgcaagcgatcagtacggtacatgaagcgatcacgcgttgtctggctcaggaactgtcggatgaactgttggccgtatatgtcgctaatatgacgccggtttaccgtattgagcatggtgatattgccaaacgtgctttacgcaatacttgcctcaattatctggcctttggtgatgaggaatttgccaataagcttgtttcttcacaatatcatcaagccgataatatgacggattcattggccgcattggcagcggcggttgccgctcagttaccttgccgtgatgagttgttggcggcctttgatgtgcgctggaatcatgacggtttggttatggataagtggtttgctctacaagcgaccagcccggcggcgaatgtcctggtacaggtacgtaccttactgaaacaccctgcattcagtttgagtaatccaaaccgtacccgttcgttgattggtagttttgcttccggtaacccggctgcattccatgcggctgatggtagtggttatcagttcttggttgagatactcagtgacttaaatacccgtaacccacaagttgctgcgcggttaattgagccgttgatccgcctgaaacgttatgatgcagggcgtcaggcgctgatgcgtaaggccttggagcaattgaaaacgctggataatttatcgggtgatctgtacgagaagataaccaaagccctggcggcataa

SEQ ID NO: 42012 - DNA, 1914 bp, Yersinia pestis
atgtcgttaattagcatgtctggagcctggctgtcgttcagcgatgcacctttattagataacactgaattacatatcgaggcgaacgagcgtgtttgtctggtgggccgcaacggtgcgggcaaatccaccttgcttaaaattctaagtaaagaagttgcattagatgatggccgaatcatttatgaacaggatctgattgtggcgcgtctgcaacaagatccgccgcgtaatgtggccggtaccgtgtttgattttgtggctgaaggggtgcaggaacaggctgaacatctaaaagcctatcacgcaacgctgcatcaggtagaactggatccgagtgaaaaaaatctcaatcgcttagcggcattgcaagaaattctggatcaccaagggttgtggcaactggatagccgtattcaagaagtgctggttcaactggggttatccgctgatgctgaactttcttcactgtcgggcggttggttgcgcaaagcggcactaggccgtgcattggtaagctcaccaaaagtgttattactggatgaaccaaccaaccacctggatatcgaaaccatcaactggctggaaggcttcctgaaagagttccagggcagcattgtatttatctcccatgaccgctcctttattcgtgcaatggcgacccgtattgtggatttggatcgcggtaaattggtttcatggccgggtaactatgagctgtatcttgccagcaaagaagaagccttgcgggttgaagagctgcaaaacgctgaatttgaccgcaaactggcccaagaagaagtctggatacgccagggcatcaaagcgcgccgtacccgtaacgaaggccgcgttcgtgcgctgaaagcgttacggatggaacgttcgcagcgccgtgaggtgatgggcaccgccaagatgcaagtggaagagacggtacgttctggcaaaattgtcttcgatctggaaaatgttaattatcagattgatggtaaagtactggtgaaagatttcaccgctcaagtacagcgtggtgacaaaattgcgttggtggggccaaatggctgcggtaagacgaccttactgaaactgatgctcggtcagcttaacgcggacagcggtaaagtgcattgcgggaccaagctggaagtcgcctattttgaccagcatcgtgcggagctggatcccgagcgcacggttatggataacctggcggaaggtaagcaagaagtgatggtaaatggccgttcacgtcatgtactgggctatctgcaagatttcctattccaccctaaacgtgcgatgacaccggtgaaagctttgtctggtggcgagcgcaaccgtctgttattggccaaattattccttaagccaagtaacttgctgatcctcgatgaaccaaccaatgacttggatgttgagacactggaattgctggaagagatggtcgatagctatcagggcaccgtactgttggttagtcatgaccgtcaattcgttgataactcagtgactgaatgttggatctttgaaggcaatggtcaaatcaacagcttcgttggcggctattatgatgcgcatcaacaacgggcagaggccaagccgattcgtcaggccgcacttaagattgaagaaaccaaagcgtctacttcggttaaaagccctgcacccgcggctaaaaaacccggtaaattgagctataacttacaacgtgagttggatcagttgccgcaacagctagaaaaattggaaaatgatatcagcaagttacaggctgaagtcagtgatactgatttcttttcccgcccacacgaagagactcaacaggttttgaaaaccctggctgatactgagcaggcgttagaggtggcattcagtcgttgggaagagctggaagctcagaaaaacggctaa

SEQ ID NO: 42013 - DNA, 780 bp, Yersinia pestis
atgaagaatcaatacggtaaagtgagttactgggtagccggtgcggtattgctgacggctttttccggcccagccttcgctgccgataagattaccgtgtttgccgcggcctcactgaccaatgcgctacaggatattgctgtccagtataaacaagaaaagcaggtcgatgtggtggcttcctatgcgtcatcttccacgctggcacggcagattgagcagggggcaccggccgatctgtttatttccgctgaccaacaatggatggattatgccattgataaacagcaaattgtcgccaatactcgctacaccctattagggaacgaactggtattgattgcgccgcaagacagccagattgataaagttgagatcgataagaaaaccgactggaaaaagttgctggaggggggccgcttggcggttggtgatcctgaccacgtaccggcgggtatttatgccaaagagtccctggaaaacttaggggcctggtcaacgttagccccggaaatggcccgtgccaataatgtgagaagcgcaatggcgctggtcgaacgggcagaagcgccgctgggcattgtttatggttcagatgcggtagccagtaagaaagttaaagttgttggcatattcccggaggcaagtcataagccggttgaatacccaatggcgattgttaaaggccatgacaatccaacggtaacggctttttatgattacctgaaaagcccggcagccgcggtgattttcaaaaactatggattcaccccacgctaa

SEQ ID NO: 42014 - DNA, 1080 bp, Yersinia pestis
atgctagaactgaatttcagccaacaattgggtgatttacacctacaggtcgccaccgatttaccggcgcaggggattaccgcgatttttggtttatcgggtgccggtaaaacgtcactgattaatgtgataggggggctgactcgcccacagcaaggccgagtgattctgaatggccgggtgctggtggatgccgagaaaaatatttacctgccgccggaaaagcgccgggttggctacgtgtttcaggatgcgcgcttgttccctcattatcgggtgcggggtaacttgcaatacggtatggcggcgtcaatgcgcgggcagtttgacgcgattgtgggcttgctgggcattgagccgttattgaaccgcttcccgttcacgctgtcaggtggcgagaaacagcgggttgccattggtcgtgcattattgaccgctcctgagttgctgttaatggatgagccattggcatcactggatttgccacgtaagcgcgagctgttgccgtatctggagcggctggcgcaggatgtgaatacgcccattttgtatgtcagccacagcatggatgaaattttgcggctggcggatcaagtggtggtgatggatgccggtaaagttcgtgccgtgggggggctggaggaggtatgggccagcagtgcactgcggccgtggttgcaacgagaagagcctagcagcattttgcgggtgagtgtgattggtcatcatgatcgttatgcgatgacggcactggcgttaggtgaccagcggttgtgggtgggcaagttggatgccgctgaaggcaattcaatgcgtatccgtattaatgctgccgatgtctcactggcattacagccgccgcacagcagcagtattcgtaatattttgccggtaaaagtggctgagtgtctggatgtggacgggcaggtcgatgttaagttagccatcggtgagcaatggttatgggcgcggatcacgccatgggcacgggatgaactggggctgaaacctggtcagtgggtgtatgcacagataaaaagtgtgtcatttaaccgccagaatggccctgtaccagattga

SEQ ID NO: 42015 - DNA, 1935 bp, Yersinia pestis
atggcgaaaaacctaattctctggttagttattgcagtcgtcttgatgtctgtattccagagctttggtcccagcgaatcgaatggccgtagagtggattactctactttcatgtccgacgtaacccaagatcaagtgcgtgaagcacgtatcaacggacgtgaaattaacgttagtaagaaagataacagcaaatatacgacttttattccggtcaatgatccaaagctgctagataccttattgactaaaaatgtgaaagttgttggtgagcctccagaagagcaaagcttactggcatctatctttatatcttggttcccaatgttgttattgattggggtctggatcttctttatgcgtcaaatgcagggcggcggtggcaaaggagcaatgtcctttggtaaaagcaaagctcgaatgctgacggaagatcagataaaaacctcgtttgctgatgttgctggttgtgacgaagcaaaagaagaggtcagtgaattagttgactacctgcgtgagccaagccgtttccagaaattgggcggtaaaattcctaaaggcgtgttgatggtaggccctccggggacgggtaaaaccttgctggcgaaagccattgcaggtgaagctaaagtgccattcttcacaatttctggttctgacttcgtagaaatgttcgttggtgtcggtgcatcccgtgtccgtgacatgtttgaacaggctaaaaaagctgcgccttgtatcatcttcattgatgaaatcgatgcggttggccgtcaacgtggcgctggtctgggtgggggtcatgacgaacgtgaacagacgctgaaccaaatgctggttgaaatggatggcttcgaaggtaatgaaggcatcattgttattgcggcaactaaccgcccagacgttctggatcctgcgttattgcgcccaggccgttttgaccgtcaggttgtcgttggtttacctgatgttcgtggtcgtgaacaaattcttaaagttcacatgcgccgtgtgccattagataccgatattgatgcttcagtgatcgctcgtggtactccaggcttctctggtgctgatttggcgaacctggtaaacgaagctgcattgtttgccgcccgcggtaacaaacgcgttgtttctatggttgagttcgaaaaagcgaaagacaaaattatgatgggtgcggaacgtcgctccatggtaatgacagaagcgcagaaagaatctacggcctaccatgaagcagggcatgccattattggtcgtttagtgccagagcatgatccagtgcataaagtgacgatcattcctcgtggccgtgctctgggtgtcaccttcttcttgccggaaggcgatgcaatcagtgctagccgccagaagttggaaagtcagatttctaccttgtacggtggtcgtcttgcagaagagatcatttatggcccggaaaaagtgtctaccggtgcttcgaatgatatcaaagtggcaacgtctattgcgcgtaacatggtaacgcagtggggcttctccgaaaaactggggccgttgctgtatgctgaagaagagggcgaaattttcctcggccgttctgtagcgaaagctaagcatatgtctgatgagactgcgcgtatcatcgatcaggaagttaaattacttgttgagcgtaactatcagcgtgcacgtaaattgctgttagaaaatatggatgttttacactccatgaaagacgcgttgatgaagtatgaaactattgatgcgccacagattgatgacttgatgaatcgcaaagaagttcgcccgccagcgggttgggacaatgtgaccaaaaataaatcatctgacaatgacaatacaccaacggcaaccatgccggctgatgaaccgaatactccaacgtcgggcaatacagtgtcagaacagttgggtgataagtaa

SEQ ID NO: 42016 - DNA, 1269 bp, Yersinia pestis
atgacaccttctgacttagtttttgatcaacagcatatctggcatccctacacctcaatgactgagccactgccctgttaccccgtggtgggcgctgaaggtgttgaattgcaattggctgatggtcggcggctgatcgatggtatgtcatcttggtgggcagccattcatggctataaccacccggtactgaatttcgccgcgcatcagcaactggataaaatgtcgcacgtgatgttcgggggcattacccatccgcccgcagtaaagctgtgccgacaactggtcgcgatgacaccgccgccgctggaatgcgtttttttggccgattccggctcggtgagcgttgaggtcgcactgaaaatggcgttgcaatactggcaagcgaagggcgagcggcggcagcgtattttgaccttgcgccatggttaccacggcgatacgttcggtgcgatgtccgtctgtgacccacagaattcaatgcacagtttgtatcagggctatttagccgagaatctgtttgccaatgcgccacagtgcggctttgatgacccgtgggatccgcaagatatcgctaattttgtcgcgctgataacccagcacgccaatgagattgccgccgtaatcctggaacccgtggtgcaaggggcgggcgggatgcgaatttatcaccccagctatctgcgtgaagtcagggcgttatgtgataaacatcaaattttattgattgccgatgagatagccactgggtttggccgaacaggcaaactgtttgcctgtgaacatgcgcagatcgtgccggatattttatgtttaggtaaagcgctcaccggaggttatctcaccttatccgccacgctgaccacccgtgcagtggcagaaaccatcagtaaaggggatgcgggctgctttatgcatgggccaacctttatggcgaatccgctggcttgcgcagtcgcctctgcgaacctgagtttattagcagagaattcgtggcaacagcaggtgagtaaaatagaagatcagttaaaaagggaattactgccgctggctcaggaagataccgtggccgatgtgcgggtacttggggccatcggggtggtagagatgaaaaaacccgttaatgtcgcccgcctgcaacgcagttttgtcgaacagggggtgtggatcaggccctttggcaaactgatttatctgatgccgccttatattatctctcaacacgccttaacccggctcactgcggccgtggtagatcgcggaagctaa

SEQ ID NO: 42017 - DNA, 1038 bp, Yersinia pestis
atggcaacttatcatcactggacagtagggcaagccctggccctgtttgataaaccgctgttggaattattgtttgaagcacaacaagttcaccgccagcattttgatccgcgtcaggtacaagtcagtacgttgttgtcgattaaaaccggtgcctgtccggaagattgtaaatattgcccgcaaagctcccgctataaaaccggtctggaaagcgaacgcttaatgcaggttgagcaggtactggaatctgccaagaaagccaaagccgcaggttcgacccgcttctgtatgggcgcggcgtggaaaaatccccacgagagggatatgccttatttggcgaaaatggttgaaggcgtcaaggctctggggatggaaacctgtatgacattgggttcgctgagtaaacagcaagctcatcggctggcggatgccgggctggattattacaaccacaatctggatacctctccagagttttacggcagcattattacgacccgcagctatcaggaacgtttggatacgttaaacgaggtgcgtgacgctgggatcaaagtgtgttctggtggcatcgtcgggctgggagaaacggtacgcgatcgtgccgggctgttggtacaactggcgaacttgcctaagccacctgaaagtgtgcccatcaatatgttggtaaaagtgaaaggcaccccgctggaaaataacgcagaggtggatgcctttgagtttatccgcaccattgcggtagcgcggatcatgatgccgtcttcctatgtccgtctgtctgccgggcgcgagcaaatgaacgaacaaacccaggccatgtgctttatggctggagccaactctattttctacggctgtaaattactgaccacaccgaatcctgatgaagataaagatctgcaattgttccgtaaattggggctaaacccgcagcagacggcaacatcacacggtgatcgtgaacaacaacaggccttgaccgagcagctactgcatggggataccgcccagttttataatgcggcggtctaa

SEQ ID NO: 42018 - DNA, 1449 bp, Yersinia pestis
atgcatttttcacgaattgtcagtggattggcctgttctatcatactcaatatcagtgtatctaatgccaatgcggctcaggtcgagaattacactcagtatctgcctgatggggcaaatcttgcgttaatggtccaaaaaattggggcatcaacccctgcaatagactatcacgctcagcagatggcgctaccggccagtacgcaaaaagtactgacggccttggcagcgttattgcaactcggcccagactttcgcttcaatactaccttggaaagccatggcacgattactgatggtgtgttgcgaggtaatttaattgcccggtttggtggtgacccaacgttaacgcgtcaacaactgcgtaatatggttgcgactctcagaaaagcgggggttaaacagatcgcgggggatgtggtgattgatacctcagtattcgccagtcatgacaaagcaccgggttggccatggaacgatatgacgcaatgctttagtgcgccgcctgctgctgccattgttgatcgcaactgtttttcagtctctctttacagtgcgcccaatcccggcgataccgcatttatccgtgtcgcgtcttattatccggtgcaaatgttcagtgaagtccgcacgttagccaaaggctcacccgatgcacaatattgtgagttggacgtcgtgccaggcgaattaaaccggtttacgcttaccggttgtctgacacagcgcagcgaacctttgccattggcctttgctgtgcaaaatggggccagctacgccggggctatcttaaaagatgaattgaaaaaagctgatattcaaattgatggcaatctgcgccgccaaacaataccgagtcctgcgggaaacgtgctagcacagacccaatcagcccccttacatgatttgctgaaaatcatgctgaaaaaatcagacaatatgatcgctgacaccgtcttcagaaccattggtcatcagcgttttggggttccgggtacttggcgctcgggtgccgatgccgttcgccaaattttacgccaaaaagcaggcgttgatcttggtaacagcattgtggtggatggatctggcctatcgcgccataatcttatttcaccagcaacaatgatgcaggttttgcaatatattgctcaaaatgatcaagagcttaattttatatcaatgctgcctctagcaggatatgacggtactctacgttatcgtggtggcctgcatgaagcgggggtcaacggtaaagtttcagcgaagacgggtgcactgcaaggggtttacaatcttgccggtttcattactaccgctagtgggcaacgtatggcatttgtacaatttttatccggctatgccgttccacctgaagaccaaaaaaatcgccgagcccccttggttcgatttgagagccgcctctataaagatatttatcagaataactga

SEQ ID NO: 42019 - DNA, 1773 bp, Yersinia pestis
ttgacgattgcatctatcactttgaccaataaccgactcgaatggcagtcactgctgccgaacacaacgccatatgaagcgttatttgctactgcctcccaattggagcctgttgctttttcagcctatcagccccggctagagaatgggatgacgctgttctgtcatccgcaatctcaaccgcggtttatgctaatcaaagcacaggagagtaccgactatctggcattgatcgcacaagcggttaaagcgctacaaccggaggcctccaacctgcttggtggcgattatctggtccatggccaccacgtcacctggcaatcagcacagcacggtgatgaacggtttgctgcgcaatcaacctgtctctatcaagaatgggtcgagccggaacagttgtttggctgtgtcaggatgtataaagatcaaattacgctgcaaccgggtttagttcatcaggtaaatggtggtgtattgatcttgtcggtacgggccttgcaagctcagccattgatgtggctgcgtttgaagcaaatgatagttcaacaacgctttgattggctctctaccgatgaaacccgcccgctgccagtgcatattccctccatgccactggacctgcgtttgattctggttggtgaccgtttagggcttgccgatttccatgatatggaacccgagctaggtgatctggcgatttatggtgagttcgaggcagaactccccctggtagatatcgaaggcatggctctatggtgcggttacatcaacaccctattgcaacaaaagcagctccctgccttatctgccgatgcctggccggtcctgttccgccaagccgtgcgttacagtggcgaccaaggcagcctgccgctctgcccgcaatggcttactcagcagctcgcagaagcggcgctttatgctgaaaatgacaccatctcagctaacgcgctagaagccgcactgaatgcccgaaattggcggcaaaattatcttgccgaacggatgcaagatgagatcgagctggggcaaattctggttgagactgaagggcacgttgttggccagattaatgccttatccgtgctggaatatcccggtcaccctcacgcgttcggcgaacccgcacggatcagttgtgtggttcatttaggcgatggcgaatttgttgacgttgaacgtaaagcggaattgggcggtaatattcatgctaaaggcatgatgattatgcaggcattcttgatgtctgaattggaacttgaccaaccactgccattctccgcatccattgtgtttgagcagtcctacggtgaggttgatggcgatagtgcatcactagcagagctttgtgcgctggtcagtgccctttcacagcagcctatcaatcagcaaattgcggttacaggctccgttgaccaatttggtaacgtacaacctattggtggcgtgaacgaaaaaattgaaggtttcttcgaaacttgccaacgccgtggtttgacgggcaatcagggggtgattttacctaccacgaatgttcgtcacttgtgcctgaatcaagcagtggttgaagcggtacagaaaggtcaattccacctgtgggctgtcgataccgtggctgaagcgctaccattattgactggggtcacttatgacgatgagcagcaacccagcctgttaggcgctatccaggagcgtatcgcacagataaacccacaggataaacgccgctggccatggccattacgctggctaaactggttcaaccagggctaa

SEQ ID NO: 42020 - DNA, 1173 bp, Yersinia pestis
atgaagtttgtagatgaagctgcaatcctggttgtagcaggtgatggtggtaacggttgtgtcagtttccgccgtgaaaagtatatccctaacggtggccctgacggtggtgacggtggtgacggtggcgatatttacctgctggctgatgaaaacctcaacacactgattgattaccgttttgtaaaatctttccgggctgagcgtgggcagaatggtcagagccgcgactgtacaggcaaacgcggtaaagatatcaccatcaaagtcccggttggtacgcgggtgctggatcaaggcactggtgaaattgtcggtgatatggtccgtcatggccagcggctgatggtggccaaaggcggttttcacgggttgggtaacagccgtttcaaatcctcggttaaccgggctccgcgccaaaaaaccatgggaactgaaggtgaaacacgtgagctgatgctggaactgctgttattggccgatgtgggtatgttgggcctacctaatgccggtaaatcgacatttatccgcgcggtttccgccgctaaacctaaagttgctgattatccatttactaccctgattccaagtctgggcgtagtgcgaatggattacgaacagagctttgtgattgccgatattccaggtttgattgaaggtgcttcagatggtgcagggcttggtattcgcttcctgaaacatcttgagcgttgccgggtattattgcacttggtggatttggcgcctattgatgaatcagaccccgctgaaaatgccaaagtaattgttaatgagttgcagcagtacagcgagaaccttgctgagaagcctcgctggcttgttttcaataagattgacctgatagacccagaagaagctgaaaaacgtgctaaggccattgtagaaacgctaggatgggaaggtaagtactacatgatctctgccgcgaatcgcgacaatgtgaatgcattgtgctgggatgtcatgagtttccttaattctcaacctaaagccatggctattgcagaaagcgtgccagagaaagttgagttcatgtgggacgattaccaccgtgagcaactggcggaagttgaagcggaagctgaagacgactgggatgatgattgggatgaagaagatgatgacggcgtagaaattatctacgaacgttaa

SEQ ID NO: 42021 - DNA, 258 bp, Yersinia pestis
atggcacataaaaaggctggtggctcgactcgtaacggtcgtgactccgaaagcaaacgtctgggcgtaaaacgttttggcggcgaagcagttctggcaggcagcatcatcgttcgtcagcgtggcaccaaattccatgcaggcatcaatgtaggttgcggcaaagaccatactctgtttgctttggctgacggtaaagtcaagttcgaagttaaaggcccgaaaaaccgtaaatttatcagcatcgaagctgaataa

SEQ ID NO: 42022 - DNA, 924 bp, Yersinia pestis
atgcgaaatcgcacattagcggatttggaacgggtcgttgctctgggcggaggccatggtttggggcgggtaatgtcgtctctctcctccttaggctctcgcctgacaggcattgttaccaccaccgataatggcggttcaactgggcggatacgccgctcagaggggggaattgcctggggagatactcgcaattgccttaatcagttgattaccgagccaagtgtcgcctccgcgatgttcgaataccgttttaccggtaatggtgagctggcagggcataatttgggtaacttgatgctgaaagcattagatcacctgagcattcgccccattgaagcgatcaatttggtgcgtagcttgctaaaagtggatgccttgttgatcccaatgtccgaacaaccggtagatttgatggctattgaccatgaagggcaccctatttatggtgaagtgaatatcgatcaattggcgcagatgccacaagaaatgttgctatcgccccctgtacacgccacccgagaagccgtcgaagccattaatcaggcggatgttattttgattggccccggcagttttctaaccagtctaatgccattactgctgctggatgagttaactcaggcattgcgccgcagctctgccagtatgatttacattgggaatctgggccgcgaattaagccccgccgccgctgcgctgtcattacaagacaaactgaccatcatggaaagcaagattggccgtaaaatcattgatgccgttattgtcagcccaacaatcgatatcagtggcgtaaaagaccgaattattgtccaacaaccactggaagcaaaagatattcctcaccgccatgaccgcgagttattgcgtcaggcgttggaaaacaccttgcaacagttgaacggtgcagactcggtgtaa

SEQ ID NO: 42023 - DNA, 312 bp, Yersinia pestis
atgtacgcggttttccaaagtggtggtaaacaacaccgagtaagcgaaggtcagaccattcgcttggaaaagctggacatcgcaactggtgaaacgattgagtttgaccaagttctgatgattgctaacggtgaagaaatcaatatcggcgctcctttagtcgatggcggcaagatcaaagctgaaattattgctcatggtcgcggcgagaagattaagattgttaaattccgtcgtcgtaagcattaccgtaagcagcaaggtcatcgtcagtggttcactgatgttaaaatcaccggcatcagcgcttaa

SEQ ID NO: 42024 - DNA, 981 bp, Yersinia pestis
atggtacaactcactgacgcatttgcgcgtaaattctactatttgcgcctatcgatcactgatgtgtgcaatttccgttgcacatattgcttgccagagggctaccgcccagatggtgtcaaaagttttttgagccttgacgaaatcaatcgcgtcagccgcgcctttgccttgttgggaacggaaaaaatccgcctgacggggggcgagccttcgatgcggcgcgacttcactgatattattgccactatccggcaaaatcccgctatccgtaccttggccgttacaactaatggttatcgtttagttcgtgatgtggcgcaatggcgtgatgcgggcctgacggcaattaatgtcagcgtcgatagcctggatccgcgacaatttcatgccatcaccgggcaggataaattttatcaagttatgcagggcattgatgccgcatttgatgccggttttgacaaagtcaaagtcaacgctgttttgatgcgcgatgttaatgatcgccaactgagtgcattccttgactggatcaaacctcggcccattcaactgcgttttatcgagctgatggaaaccggcgaaggcggtaacctgttccgtaaacaccacgtttctggtggcgtcatccgccaacaattactcgaacaaggctggcagcagcaagatcgggcgcgcagtgatggcccggctcaggtgtttcaccactcggattaccaaggtgaaattgggcttatcatgccgtatgaaaaagacttttgcgccagttgtaaccgcctgcgtgtttctgctctcggtaatttgcatttgtgcttatttggtgagcaggggattacattacgtgatctgctgggcagtgatgatcaacaagatgagctgatagcgcggattcaaagtgcgttgcaaacgaagaaacagactcattttttgcatcagggtaacagcggtataacgcaaaatttatcctttattggcggctga

SEQ ID NO: 42025 - DNA, 972 bp, Yersinia pestis
atgaacctagaaaagattatcgagttaaccgcgccagatatggcggcagtaaatacaacaattctcgaccaattgaactctgatgttgttcttatcaatcaattgggtcattacattatcagcggtggtggaaaacgtattcgcccaatgatctcggtcttggtggcccgggcccttaactatcagggtagcaagcatatcaccgtcgcggcactcatcgagtttatccatacggcgacactgctacacgatgatgttgtcgatgaatccgatatgcggcgtggcaaagcgaccgccaatgccgcatttggcaacgctgccagtgtattggtcggcgattacatttatacgcgctcattccagatgatgacagggctgcaatcaatgcgagtgctgacattgatgtctgaagcgacaaacgttatcgccgaaggtgaggtattacagttaatgaactgtaataacccagacatcactgaagaaagctatatgcaggtcatttacagcaaaacagcacgcttattcgaggccgctgcacaatctgccgcaatattgtcagatgccagtgaggagcaggaactggcattacagaactatggtcgttatctggggactgccttccagcttattgatgatctactggattacagcgcagagggttccacgttaggcaaaaatacgggggatgacctgaatgaaggtaaaccgacgttgccactgctacatgccatgcataatggcaccccagaacaagccgcaatgatccggcaagcgattgaacaggggaatggccgtcatttactcgaaccagtgctggctgccatggagcattgtggctctctggtctatacccgtcagcgtgctgaagaagaagcagataaagcgattgccgcattgcacgcgttacctgaaagtgattatcgtctggcccttgaaggcttggcacatatctcagtgcaccgccgtttttga

SEQ ID NO: 42026 - DNA, 1704 bp, Yersinia pestis
atggaatacgattacatcatcattggtgccggttctgcaggcaacgtgctggcagcccgtttaacagaagatgcggatgtcaccgtactcttgctcgaagcgggtggaccagactatcggctggattttcggacacaaatgcctgcggcgctcgcctttccacttcagggtaaacgttataattgggcttatgaaaccgatccggagccgcatatgaacaaccgccgcatggagtgcggacgcggtaaaggtttgggcggttcatcattaattaatggcatgtgttacatccgcggcaacgccatggattttgaccactgggccagtttatcgggcctggaggactggagttatcttgattgcctgccgtactttcgcaaggcagaaacacgcgacatcggcccaaatgatttccacggtggtgaaggccctgtcagcgtgaccacacctaaaatcggcaacaacccgttatttcatgcaatggtcgctgcgggtgtgcaggccggttatccgcgtactgatgacctgaatggctatcagcaggagggtttcggcccgatggatcgtactgtgacgccgaagggtcgtcgtgccagtactgcgcgcggctatcttgatcaggcgcgcccacgtaataacctaaccattattacgcacgccctgacggaccggatcctatttgaagggaaacgagccactggtgtccgctacctcaaaggtgatgctggcaccggccaaaccgcctatgctcgccgtgaagttttattgtgtgggggtgctatcgcgtcaccacaaattttacagcgctcggggattggccctgcggaattactgcaacgcctggatattccgttggtgcaggcgttgcccggcgtcggggagaatttgcaagatcaccttgagatgtatctgcaatatagctgtaaacagccggtgtcactttaccctgctctgctgtggtttaatcagcccaaaatcggtatcgaatggttattcaacggtacgggcgtgggtgccagcaatcaattcgaagctggtgggtttatccgcagtcgcgatgcatttacctggccgaatattcagtaccacttcctgcccgtcgccattaattacaatgggagcaacgccgtaaaagagcatggttttcaggcgcatgttggctcgatgcgttcaccaagccgtggccgcattcaggtaaaatcgaaagatccgcgccagcatccaagtatcttgttcaattacatgtcgagcgaacaagattggcatgagttccgcgatgctatccgcatcacccgcgagattatcgcgcagcctgcactggatccatatcgtggtcgagagataagccctggggccaatgttcaaaacgatgacgaactggatgccttcatccgcgaacatgccgagacggcatatcatccttcgtgctcatgtaaaatgggtgacgacaagatggcggtggttgatgggcaaggccgggtgcacggtgtgcaagggctacgggtggtcgatgcgtctatcatgccgcaaatcattaccggcaacctcaatgccacgaccatcatgattgcagagaaaatagcggatcgtattcgtggctgccaaccactggcaaaaagcaacgccgcgtattttatcgccggagatactcctgcccgtacatctcccgtaaggcattcattacccgtaacatcatatccgtaa

SEQ ID NO: 42027 - DNA, 1473 bp, Yersinia pestis
atgtcccgctacggcttgcaaaaactttatatcaacggcgcgtacaccgacagcaccagtggtgatactttcgatgccgtgaaccccgcgaatggcgaatgcattgcacaactccaggccgccaacgcacaggatgttgataaggcggtagccgccgccaaacaaggtcagcctgtgtgggcagcgatgaccgcgatggaacgttcacgcatcttgcgccgggccgtggatatcttgcgtgatcgtaatgatgaactggcggcaattgaaacggcagacaccggtaaacccctatccgaaacccgatctgtggacatcgttaccggtgccgatgtgctggaatattatgctggcctaatccccgcccttgaagggcaacagatcccactacgtggcagcgcatttgtctatacccgccgtgagccactgggcgtggttgccggtattggtgcctggaactatccccttcagatcgctttgtggaaatctgcaccggcgctggcggcgggcaacgctatgatcttcaaaccaagtgaagtgacatcgctgaccgcactgaaattggcgggaatctacaccgaagcgggtttaccggctggcgtatttaacgtattgaccggcagtggtgaccaggttgggcagatgctgacagagcatccgggtattgcaaaggtctccttcaccggggggattgccagcggtaaaaaggtgatggctaacgccgcgggatcgaccctgaaagatgtcaccatggagttgggcggaaagtccccactaattatttttgctgatgccgatctcgataaggccgctgatattgcgatgatggccaatttctacagctcaggacaagtctgcaccaacggcacgcgagtttttgtcccgcaggcgttacaggccgcgtttgagcagaaaatcgttgaacgggtcaagcggattcatattggtgacccaagcgatgaacgaaccaactttggcccgttggttagcttccagcaccgcgattcagtgatgcgttacattgacagcggtaaacgggaaggcgcaaccctgctgatcgggggatacagtctgaccgagggcgcactggcacacggggcctatgtcgcccctacggtattcacccactgccgtgatgacatgcaaattgtgcgtgaagagatcttcggaccggtgatgagcattcttagttatcaaagcgaagaggaagtcattcgccgcgccaatgataccgagtacggtttagcggcgggggtcgttacacaggatttgaaccgtgcccatcgcgtgattcatcaactgcaagcgggtatctgctggatcaatacttggggcgaatcggcaccagagatgcctgtaggcggatataagcattctggtgtaggccgtgaaaacggtatcagcacgctggaacattacacgcaaatcaaatcaattcaggttgagttaggcagcttcaattctgttttttaa

SEQ ID NO: 42028 - DNA, 1191 bp, Yersinia pestis
atgaccgtacgccttattcttgctaaaggacgtgaaaaatccttacttcgtcgccacccatggattttctctggggcggttcaacgccttgaaggtgatgcactttccggtgaaaccatagatatccttgatagtcagggaaaatggttggcccgtgccgcctactcgcctgaatcacaaattttggcacgagtctggacgttccaacaagatgaggttatagattgcgcattctttattcgccgcctacaacaggctcagaattggcgagattggctggcacagcgtgatggccttaatggctaccgcctgattgccggtgaatcggatggcctgccgggcattaccattgaccgtttccagaatttcttggtgttacagttactttctgccggtgccgaatatcaacgtgaaacgctggtcagtgcgttacaacattgctatccagaatgttctatttatgatcgttccgatgtttctgtccgtaaaaaagaaggtttgccactgactcaaggccttatctgtggcgaaatgccaccagccctgctgccaattagcgaaaatggcatgcaactcttcgttgatatccagcaaggtcataaaacgggtttctatttagatcaacgcgatagccgcttagcggcccgtaattatgccaatggccgtcgtgttttgaactgcttctcatacacgggggcttttgctgtcgccgcgttgatgggcaattgccaacaggtcattagtgttgatacatcgcaatccgtgttagatattgcgaaacaaaacattgaactgaaccagttggatctgagcaaaacggagtttgtccgtgacgatgtattccaattgttgcgcagctatcgcgctcaaggggaaaaattcgacctgatcattatggatccacctaaatttgttgagaataaaagccaattagccagtgcatgccgtggctataaagatatcaatatgttggcgattcaattactgcgccctggcggtatcttgctcagtttctcttgttcaggtttgatgccggtcgatttattccagaaaattttggccgatgccgcgttagatgcaggccatgacatacagtttatagagcagttccgccaagctgcggatcacccagtgatcgcggcttatccagaaggtttatatctaaaagggttcgcgtgtcgggtaatgtaa

SEQ ID NO: 42029 - DNA, 3918 bp, Yersinia pestis
atgaagtgggtaaagagactcagtattgcattcttgctgattatcctgctattggtcggtgctctgggggggttactcggtacgaccagtgggttacattttttaatcaacagcgccgcccgctgggtacctgggcttgatattgccagtgttagtggtggctggcgtggtctcaccttaacgggcattcagtatcaaatgcccggcgtcacggtcaaagctgggcaattttatctgtcattgcagctctcttgtctgaagaatagtgagctatgtgttaacgcactgacagcacaagatattgatgtggtggtgaatactcaagcgatgccacctacgtcatccacgccagccagtactgaccccatgggggaactgagtaccccatatcccattttcttacgtttgctgtcactgaataacgtcaaagtgaccattgatgatacggctatttcactggatgaattccgtactggtgcgcattggaagcaacgttcattggctttgatgccgacaaaaatcaacgggttattgatcgcattacccaaaacggtgtcagccggggttcccgatgcggtgaagcctgcggttgaaactgctatggccgccaaagaggcggttgcgcaattatcagcggctcctggacgatcagccactgcatcagggcaatcaaccactgcgtcaggacgatcagctactgcgtcagggcaatcagccactaccgggggtcaactggctacggtcccagcagaaccggcgaccccactgggtgaaagtttaaaagcgctatttgccaaaccattgctaccggcattgccggacttccgtctaccgctggatttgcagattgaagagatctcagggcaacagcttaggctgaccggggataacgaggtccttatcagcagcttgttactgcaggccagtacacaagatcaacggataacactggatacgctggagatcaaatcgccgcagggcgggttgtcggcgcaggggcaagcgacattggcggataagtggccgctggatctggtggtcaatagtgcgttgaacattgactcgctgaaaggcgaaaaagtgaaattgaccgtcggtggggcgctgcgtgaggaactcaaggtcacgctcaatctgtcagggccggtcagtgcgcaactggagacagaaacgtcgctggcaaaggcaggtttgccgttgtcgctgactctgcagagcaaacaactgcgctggccgttgactggcgagccccaataccaaatgaataacctcaggatgcgcctcaatgggcaagcgacggattatgcgctttctatccgttctgatatcaaaggtactgatctaccgccagcggtattcacgctggagggtaaaggcaatgttgagcaatttaatctgacgcgtttacgtctggcggcgttgcaaggtcacactgacctgactggggtagtggattggcggcaagcgatcagttggaattcggtactcaccttatcgggcatcaatatggccaaacagtggcctgaatggccagcaaaattggagggtaagattgttacccgcggcagtattcatggcggtagctggcaattgcaggttccggagctggtacttgatggcaatgtgaaacagaatcgcgtgaccgcccgcgggtctctgaccggtaatgcggcgggccaatggcatattcctggtatcaatctggcgttgggccgtaataagcttgatatgaaaggggagttgaacgacaactggctgttggatgctaatgtcgatgcgccacaacttgatggcgcgttgcccggtctgggtggtgtagtgaaagggtcgctgaaattacgcggtaacctgaaaacgccgcaactgctggctgatctcacggctaaccgcctgcaatggcaagagttgcacatcaatcgtattaaagtggatggcgatgtccgttcgacagatcaaattcaaggccagttggcggtcagagttgaacagcttaagcaagctgattttgtggtcagtttgttgacgttggatgcccgtggcagtgaaaaacagcatcagttgcgtctgaatatgcaaggggatcctgtctccggccaattgtcgctggagggcagcttcgacaaacaacaacagcgttggcgcggtactctcaataacacgcgctttgataccccagtgggggaatggcgtttaagccgtgcaatgacactggattatcagaacagcgcgcaacggatcaccatcggcccccactgttggcttaatcccaatgctgagctttgtgcgccccggccaattgaagctggccccagtgggcaggcaagtgtggtactcaaccgctttgatttagcgatgatcaaaccgttcctcggcccggataccaccatgaacggtgtgtttactggccgggcagaggtcagttggaaagagggcggtaagttacctgatgtgcgggtatcactcagtggtaatggcgtgaaagtacaacaaatggtgcagggcagcccactgccgattgcctttgaaaccctgaacctgaatggcgggctggcgaatgggcaagtgcgcgccgactggttggtcaagctcgtcaataacgggcagttctctgggcaggtgcaagttgcagacccagaagggcggcgcaacttatccggtaatgtagccataagtaatctctctctggcgatgattaacccgattctgagtgatggtgaaaaagcggctggcatattgaatgcgaatctgcgtttggcagggaatgcgaaaagtccgctcgtctatggccgcctggcactggataaggtggatattgatggcagttggatgccattcgatatcaccgaagggcgcttggcgatgaattttgatggcatgacatcgacgctggaggggttgatacggacttcccaagggcagttgaatctctccggcgatgcggactggcgtgatattagcgcctggcatgccagaattgcggccaagggcaacaagttacgggttacgatcccgccgacggcgcgagtcgatgtttcaccggatattgttttcgaagccacgccgcagttatttacgctcaatggttcggtcgatattccttgggcgcgcatcaccgtgcaggaagtgcccgaaacagcggttggcgtctcctcgaatgaggttatgctcaatgaccaattgcagcctattgcgccacggagcgccagtattccgatcagcagtaatttggtgattcggatcggtaacgatgttcgtttgaatgcatttggtttgaaagcccgcttgcagggcgatttgagaatgatgcaggatcagcgtgggttagggctgaatgggcaaattaatattccgtccggtagcttccgcgcttatggtcaggacctcatcgtcaacaaaggaatattgctgttctctggcccaccagatcagccgctacttaatattgaagcgatccgaaatcctgactctaccgctaatggtgttattgccggagtacgtgttacggggatggcagattccccgcgcatggaggtattctctgatccggcaatgtctcaacaggaggccttatcttatctgttgcgtggccaggggcttggcaattcgggggctgacagcagtatgatgacctcaatgttgatcggcatgggggtggcacaaagtggtaaattggtgggtaaaatcggtgaggcatttggtgtcagtaatctggcattagatactcaaggggtcggtgatagctcacaagtggtcgtgagtggttacgtcaccaaagacctgcaaataaaatatggtgtgggtatatttgactcactggctacgttaacgttacgttatcggttgatgcccaggttgtatctggaagcggtgtctggtattgatcaggcattagatttgctttatcagtttgagttttaa

SEQ ID NO: 42030 - DNA, 1332 bp, Yersinia pestis
atgttaaatagtatcttactgattctttttttaattgcggtcagcgccttcttctcgctatcagagatttcattggcggcttcacgcaaaattaaactaaaactgctggcggacgagggcgataccaacgccttacgagtcctgaaactgcaagagacgccaggaatgttcttcaccgtggtccaaattggcctgaatgctgtcgccattcttggtggtattgtcggtgatgccgctttctccccttcgttcaaactcgtttttgagcgttttatggctcctgagttggccgatcaagccagtttcgtttgttctttcgtgttagtgaccagcttatttattctgtttgctgatttaaccccgaaacgcatcggtatgatttcacctgaagcggttgccgtccggatcgtcaacccaatgcgcttctgcctaatgatcttccgcccattagtctggttcttcaatgggatggcaaatcttatcttccgcctatttaaattacccatggtccgtaacgatgacatcacttccgatgatatctatgccgtggtagaagccggtgcgctcgccggagtgctacgcaagcaagagcatgagttgattgaaaacgtctttgagctggagtctcgaaccgttccttcctccatgacttcacgtgaaaacgtgatttactttgatctacgggaaagcgaagacagtatcaaagataaaatctccacacatccgcactcaaaattcctggtatgtgatggccacattgaccaagtggtgggttacgttgactctaaagacttgctgaatcgggtattaggtaaccaaagtctggtactcagcagtggcgtacaaattcgttcagctctgattgtgccagatacattgacactttcagaagcgttggagagttttaaaaccgcgggtgaagacttcgccgtgatcctcaacgaatatgctttagttgttgggataattacactgaatgacgtaatgaccacgttgatgggcgatttagttggccaagggcaggaagagcaaattgttgcccgcgatgagaattcatggctgattgagggcggtacaccgattgaagatgtcatgcgcgtactgcatatcgacgatttcccgcaatcgggcaattatgaaactatcggcggctttatgatgtatatgctgcgtaaaattcctaaacgaactgattttgttaaatatgcgggttacaaatttgaagtcgtcgatattgatagctacaagatagatcagctactggtgacaaggctcagtgaccagccagcgccaatcctgccaaaagcaccacacgaaagcagtgacgcctag

SEQ ID NO: 42031 - DNA, 666 bp, Yersinia pestis
atggattaccgcaatcagtctctgggcgcactggctatcgctattcctcgggccacaaagttattccgtcaacatcagctcgatttctgctgtggcggcaaacaaacactcttacgggccgccaataagttgaatctggatattgatgcgctggaagcacaattgagtgcattgcaaaccgaacctcactcatctgaagattggcaacaacagccactgacaaatctcattagttttatcatcagccgctaccatgatcgccatcgtgagcagctaccagaactggttctcatggcggaaaaggttgaacgggtacacggcgagaaacccacctgtcctcgtgggctggcagcagaactcagtgcgattttagaagagttgactcaacatatgtataaagaggagcagatcctgttcccgatgatccaacgaggcatgggttctcaggccagtgggccaatatttgtgatggaagcggagcacgatgcggttgggcagcaattagacgtggtaaaacaactcacacaaaatgtgacaccaccagaaggggcctgtaatacctggcgggcgctttacaccggtatcaatgaattcattactgacctgatggaacatattcatctggaaaataatttactgtttccccgtgcgctaaggggcgaataa

SEQ ID NO: 42032 - DNA, 453 bp, Yersinia pestis
atgcaagttattctgcttgataaagtagcaaacctgggcagcctgggtgaccaagttaacgtaaaagcgggctatgctcgtaacttcttggttccacagggtaaagctgttccagcaacaaagaaaaacgtagagttctttgaagcacgccgcgctgaattagaagccaaattggctgacgttctggctgctgcagaagctcgcgcaaccaaaattaacgaactggtcagcgtcactatctcttctaaagcaggggatgaaggcaaactgttcggctctatcggtactcgcgacatcgctgacgctgtaactgcagctggcgttgaagtagccaagagcgaagttcgtttgccgaatggcgttctgcgtactgcaggtgagcatgaagttcacttccaagtacacagcgacgtgttcgcgaaactgaacgtagttgtggttccagaagcgtaa

SEQ ID NO: 42033 - DNA, 228 bp, Yersinia pestis
atggcacgttatttccgtcgtcgcaagttctgccgttttaccgcggaaggcgttgtagagattgattataaagatatcgctacgctgaaaaactatatcactgaaagtggtaaaattgtcccgagccgtattaccggtactcgtgcaaaataccagcgtcagctcgcccgttgtatcaagcgcgcacgctacctgtctttgttgccgtacactgatcgtcatcagtaa

SEQ ID NO: 42034 - DNA, 321 bp, Yersinia pestis
gtggtgaccactaatcgtctggtactttctggcactgtgtgcaagacaccggttcgaaaagtaagtccttctggtattccgcattgtcaatttgtgcttgagcatcgatcaacacagcaggaagccggatttagccgacaaacatggtgcagaatgcccatagtcgttagcggacagcagtcacaagcattaactcacagcataacggtcggcagtcagttaaccgttgaaggcttcattagctgccatcaaggtcgcaatgggctgaacaaattggttctgcatgccgagcagattgaatttatagattctggagactag

SEQ ID NO: 42035 - DNA, 393 bp, Yersinia pestis
atgcgtcattacgaaatcgtttttatggtccatcctgaccaaagcgaacaggttccgggcatgatcgagcgctatagtgcaactatcactaatgctgctggtacgatccaccgtctggaagactggggccgccgtcagctggcttacccgatcaataaactgcacaaagcccactacgttctgttgaacgttgaagctccgcaggaagcgatcgatgagctggaaacaaacttccgcttcaacgacgccgttatccgtagcatggttatgcgcgttaagcacgcggtaactgaagcatcaccaatggttaaagcgaaagacgaacgccgtgagcgtcacgacttcgcgtcagaagccaatgatgattctgaagctggggattctgaagagtaa

SEQ ID NO: 42036 - DNA, 999 bp, Yersinia pestis
atggctaacatgtttgctttgattctggcaatagcaacgctgttgacggggattatctggtgcttcgagcggtttaaatgggggccagcccgtcaggcaaaaattgcggcagttaatgcacaaactgcggaaatcaaggcccaaaccgggtgtgccgtagataataaaaccttagcccaagctgcaaagcaaccgggttggatcgagacatgtgcctctatcttcccggtgctggccttggtctttatcgtgcgttcgtttatttacgagcctttccagatcccttctggttcgatgatgccaacgctgcttatcggtgattttattttggttgagaaatttgcttatgggattaaagatcccattactcagaccacattaattccaacaggtaagccaaaccgcggtgacattgcggtgtttaaatatccgttggatccacgtttggattatatcaagcgtgtggtggggctgccgggggatcgggtaatttataacccgataagtaaagaagtcacggtacaaccgtcatgtaataccggtacttcttgtgatagtgcgttggccatcacttacagcacgtctgagccaagtgagtttgtgcagacattccgttatagcggtaatggcgaaagctccgcagggttcttcccaatcccgctaaatcaggcagtacctgatggcggtgtccggttacgtgagcgtactgaaagcctcggcccggtagcgcatcacattctgaccgtcccagggcggcaggatccgttaggctcttattatcagcaacccgatcaaccgttaggggtttgggtggtaccggaaggccattactttatgatgggtgataaccgggataacagtgcagatagccgcttctggggttttgtaccagaacgtaatctggtaggtaaggctacggctatttggatgagttttgaaaagcaagaaggtgaatggccaacgggtgtgcgtttaagccgaattggtggaattcactaa

SEQ ID NO: 42037 - DNA, 912 bp, Yersinia pestis
atgagcgaagtagaaaaaacgtattgtggttttattgccattgtagggcgcccgaatgtaggcaaatcgaccttactaaatgagctgttggggcaaaaaatctccatcacctcacgtaaaccgcaaaccacacgtcaccgtattatggggatccacactgaagggccttatcaggctatttatgttgatacccctgggctgcatattgaagaaaagcgtgccattaaccgcttaatgaatcgggcggcaagtagctctcttggtgatgtggaattagtcatttttgtggttgaaggtactcattggactgctgatgacgagatggtggttaataagctgcgcagtttgcaatgcccggtattattggccatcaacaaagtggataacgtaacggataaaaccaagttattaccgcatatgcagttccttagccagcagatgaacttcctggacgttgtgccaatctcagctgagaagggaatgaatgttgataccatcgccagcattgtgcgcaagcatatgccggaagctgaacatcacttcccagaggattacatcactgaccgttcccagcgttttatggcgtcggaaattattcgtgaaaagttgatgcgtttcctgggcgaagaactgccttattcggtgacggttgagattgagcagttcgtgccgaatgaacgtggtggctataatatccatggtctgattttggttgagcgcgaaggccaaaagaaaatggttatcggcaacaaaggcagcaaaatcaaagtaatcggtaccgaagcccgtcaggacatggagcggatgtttgaagctaaagtgcatcttgaactgtgggtgaaagtgaaatcaggctgggcagatgacgaacgtgcattgcgcagcttaggctataccgacgatttgaaataa

SEQ ID NO: 42038 - DNA, 900 bp, Yersinia pestis
atgaatcaacacgatcgagcagtaatttctgcatctacgctttatgtggtacctaccccaatcggtaatttaggggacattacccaccgggcgttagaggtactgaaaggcgttgatttgattgcggctgaagatacacgccatacggggttgttgttacagcattttgcgatcaacgcccgcctgtttgcacttcatgaccataacgaacaacaaaaagctgatcagttgctggctaaactgcaagaaggccagagtattgcgctggtatccgatgcaggtacgccactgattaacgatccgggctaccatttagtgcgccgttgccgtgaagctggcatcagagttgtgcccttgccgggcgcttgcgcggcgattaccgcactctctgccgcaggccttgcctcagatcgtttttgctacgaaggcttcctgccagcaaaaaccaaaggacgtaaggatactctgcaagcgttgattgaggaacctcgaacactgatcttctatgaatcaacgcatcgcttattagaaagcttacaggatatggtaaccgtacttggcccacaacgctatgttgtactggccagagagctgaccaaaacctgggaatctattcacggagcgccagtcggtgaattgctggcttgggttaaggaagaagagacccgtcgccgtggtgagatggttttgattgtcgaggggcataaagtacagtccgatgatgcattaccagccgatgcactgcgcacactggccttactgcaaaaagagttaccgctgaaaaaagccgccgcattagcggcagaaattcatggagtcaaaaagaatgcgctctataaatatgctttagaacagcaacaaggcgacgtagaaacagaagaggatgacattcagcagtaa

SEQ ID NO: 42039 - DNA, 1596 bp, Yersinia pestis
gtgctaagtactaacaatatcaccatgcaattcggcagcaagccgctgtttgaaaacatttcagtcaaattcggtggcggtaaccgctatggcctgatcggcgctaatggttgtggtaaatccacattcatgaagattctggggggcgatctggtccctagcggcggtaacgtcttccttgacccgaatgagcgtctgggtaaacttcgtcaggatcaattcgcctttgaaaacaatacagtgctggataccgttattatgggacacggcgaactgtgggaagtaaaagaagagcgtgaccgcatttatgccatggctgaaatgagcgaagaagatggctataaagttgctgatctggaagttgcctacggtgaaatggatggctacagcgcagaagcccgtgctggtgagttgttgctgggcgtgggtattcccgttgaacagcattatggcttgatgagcgaaatcgcacccggttggaagttacgtgtattgctggcgcaagccctgttctccgatccagaaattttgttacttgatgagccaaccaacaacctggatatcgatactatccgttggttagagcaggtgctaaacgaacgtaacagcaccatgattattatttcccatgaccgtcacttccttaacatggtgtgtacgcatatggcggatctggattacggcgaactgcgcgtttatccaggtaactatgatgagtatatgaccgcagcgactcaagctcgcgagcgtttgttgtcagataatgcgaagaaaaaagcccaaatatctgaactgcaatctttcgttagccgctttagcgccaacgcctctaaatctaagcaggcaacttcacgtgctcgccagattgataaaattcagcttgatgaggtaaaagcctccagccgccagaacccgtttattcgcttcgatcaggatagaaaactgttccgtaatgcgctggaagttgagatgttgaccaaaggttttgataacggtccgctgtttaaaaatctgactctccgcctggaagtgggtgagaaagtggctatcctcgggccgaacggtattggtaagtctactttgctgaaaaccctgctaggggagtatgaatctgatgctgggaccgtaaaatggtctgaaaacagtaagattggttactacgcacaggatcacgccagtgattttgacatcgatctgacggtgtttgactggatgagccagtggaagcaagagaaagacgatgagcaggcggttcgcagtgtgctggggcgtttgttgtttagccaggatgacatcaagaaaaaagttagcgtgctgtctggtggtgagaaagggcggatgttgtttggtaagttgatgatgcagcgccctaacattttagtcatggatgaaccaaccaaccacttggatatggagtccattgaatctctcaatatggcattggaaatgtacgaagggacattaatcttcgtctcccatgaccgcgagtttgtgagttcactggcaacccgcgtgattgaaatgacgccgaataagcttatcgactttaccggtaactacgaagattatctgagtagccaagggattcactcataa

SEQ ID NO: 42040 - DNA, 726 bp, Yersinia pestis
atgatctcagtcagacgggggtttagtcagctttggtattgggggaaacggggggttatcggcattattgcgctgtggatggccggtattctgatttttgcttttttgccggtcccgttttctatggtcatgatcgaaaggcaactgggtgcctggctgaccggtgatttcgcttatgttgcccactctgattgggtgcccatggatgaaatttcaccctatatggcgttggccgtcatggcggcggaggatcaaaagttccctgaccactgggggtttgatgtcggtgccatcgaatcagcgctgtcccataatcagcgcaatcaaaagcgtatccgtggtgcatcaacgctgtcacaacaaacagctaaaaacgtgtttctttgggatggccgtagctgggtacgcaaagggttggaagtcggattgactgcgggtattgaattgatatggacgaagcgccgtatcctaacggtttatctgaatattgccgaatttggtaatggtatctttggggtcgaagctgctgcgcgccattttttcaacaagcccgccagcaaattaagtgcctcggaagccgcattattagcggcagtactgccgaatccacttcgctttaaggttaatgcgccgtctggttatgttatttctcgccaacaatggattttgcgccagatgcaccagttagggggcaaaacgttcttgcaggaaaatacgctggattga

SEQ ID NO: 42041 - DNA, 1275 bp, Yersinia pestis
atggatcactgtaatacctcggatttactctctctggaacaagcactgaccaaaatgctatcacaggccacaccattgccagcaacagaggtcatcccattgtctgaggctgcgggccgcatcaccgccagcgccattacttcacctattgctgtcccacctttcgccaactcagcgatggacggctatgcggtacgttggcatgaattgagcgacgagatacccttacccgtcgcaggagtagcgtttgcaggtgcgccgtttaaagatgtgtggccggaaaagacctgcattcgcattatgacaggtgcgccactccccaagggtgcagatgccgttgtcatgcaagagcacgctgtcgtgagtgaacaaggtgtcatcttcaatagtaacattcgaatcgggcaaaacattcggctggcgggtgaagatatccagcaaggagcgtcagtttttccggctggcgttaaattaggtgcagcacagctaccgctattagcctcgttaggtattgctgaaatcgcggtttatcgtgcattaaaagtggctattttctcaaccggtgatgaattacagcctatcggacatcccttagctgaaggacagatttacgatactaaccgctttgccgtcaggctaatgttgcagcaattggggtgtcaaatcatcgatcttggtgttatccgtgacgatcaacatgcactacgtgcagcatttcagcaggcggatactgcagcagacttggtcatcagcagtgggggcgtttcagtcggtgaagccgattataccaaacagatactggacgaactcggggatattggtttttggaaattagccataaagcccggtaaaccttttgcttttggtaaacttagcaatgcttggttctgcggtttgccagggaatcctgtctctgcggccctaacattctatcaactggtacaaccgctgttggcaaagctgtccgggcatacagaatggcatccaccactgcgattaaaagccaaagcgacaacaccactgaaaaaaacaccaggccgcttggactttcaacgtggggttttttccagcaatgcggacggtcagttagaggttcgcacgactggccaccaaggctcccacattttcagttcattcagtcaaggcaactgttttatcgtgcttgaacgggaacgcggttcggtagccgtgggggaatccgtagaaatagagttgtttaatgaattgttaggaggtaatcgaccgtttgccattcatcaccctgtcggaggttga

SEQ ID NO: 42042 - DNA, 2766 bp, Yersinia pestis
atgtcaaggacaataaatttgagcagcccggctatgccttatctattgggtgagcctgcgctggtactgtctaagttggaaggcgaggaagccttttcgactttatattcttatactattacggcaaagacaccggctaacccattaattccttggcaagcggcttcaaatgtcgatctcaaatccttaattggtaaagagatgacgattgaaatggaactggacggcaacggcctgggtgatgtgagaagtgtaggtaaaggcacgcgtgaaattacggggctggttgagagagccagatacattggtcgagatgccaatcaggccatatttgagatcactattaagccttggttctacctggctaatttaacctctgactttaaaatttatcaaaataaaaatgtcgttgatattatagaggaagtgttctcagactataattttccgtttgagaaacggttggctacaacctatccgatattagattttcaggttcagtacggtgaaaccgactttaatttccttcagcgtttgatggaagagtggggtatttactggttctttgagcatcaggatcataaacaaaaattaattcttgtggatcatgtcggtgcgcataaacgctcgttcagtaccgcctaccatgccattgagtacttgtcggatgagcctaaagcgggcgaagagtacatcacacaattccagactcaggaaaccttgacgagtgggacctgggtcaccaacgattatgacttcacgaaatcccgtgccgatattctggcaatggacagtaaaccgcgtaaaaccagctttaacgatctcgagatttatcactggccaggggattatgatcagccagatattggtgagcacctttcacgcgtgcgtatcgaagaacgtggtgctctgggttcgcgggcggtcggttctggtcaactgcgcgggatagtttgtggtgctaacttcgagctgaaagggttccccgttgataaagcgaatcgggaatacatgattatctccagccgtttgacggtggctgaagttgatcaactgtctggcggtgaggatgcgtttagttgcgagagttctttcacggttcagccgacgaccaaaatctatcgtcacccacaggtgacaccaaaaccgaaaaccaatgggccgcaaaacgccattattgtggggccaccgggtgaagagatttggaccgatgaatatggccgcgtaaaagtgcgtttcgtttgggatcgctatggcacaaacagcgagtcagactcttgctggctacgtgttagccaggcttgggcagggaacagctttggtgggatctatattccacgcattggtcaggaagtcattgttgactgtattaacggcgatcctgaccggccaatggtgatgggcagcctttataataacgtgacgcgtcccccttgggacctgcctgccaatgcgacgcaaagtggcatggtcagtcgtaccgttggcggcgggttaaccaactataacggcgttcgttttgaagataaatcggggctggagcagtactgggaacaggccgagcgcgatatgtcgcgtttgactaaaaataatgaaacgcaaattatcggtgccgattctgtcctgaatgtaggggccaaccgaagtgaagttgtcggggccaattataaccaagatgttcttggcacatcaatgttagccatcggtgcagcctctatgctacaggtgggattggcgcgtagcgttgtggttggcggagcacattcactgaatgtggttttggcgaatgccaccaatgtgggtggcgctaacatgaccaacgtaggggggtttaatggccttgcggtggggggagcccatcagacagctgtaggcggtgctgcgacactggctgccggcggccctattgctattggggcgggtggtgagcttatcctcagtggggatatcgtaaaaattgttggtaaaagtaaggttattattcagggcggtgaagttcacattaactctgatgattgttgtggtcgtaaaacgggcaatggcggcggggcattcggtgcctttgcgagcctggcaggtttattgccgctggcgggtgctattgccttaccgctaccgttacccttgttgccaatagtggtgccaccagtgacatcgccaccggatccaacagtgccaccggatccgacattgccaccagatccaacgttgccaccagatccaacgttaccgccggaaaccacggcaccgccggaaaccacggcaccgccagaaacaacggcaccgccagagacaacggcaccgccggaaaccacggcaccgccggaaacaacggcaccgccagagacaacggcaccgccagagacaacggcaccgccagaaacaacggcaccgccggaaacaacggcaccgccggaaacaacggcaccgccggaaacaacggcaccgccggaaaccacggcaccgccagagacaacggcaccgccagagacaacggcaccgccggaaacaacggcaccgccagaaacaacggcaccgccggaaacaacggcaccgccggaaacaacggcaccgccggaaacaacggcaccgccggaaacaacggcaccgccagaaacaacggcaccgccggaaacaacggcaccgccagaaacaacggcaccgccggaaacaacggcaccgccagaaacaacggcaccgccagaaacaacggcaccgccggaaccgacgcgaacaccgccagggacgcagacgccaccgccttga

SEQ ID NO: 42043 - DNA, 843 bp, Yersinia pestis
gtgaatacgtcacttgaacttctcgaagagcatcggatgtttggctgctggcaacagcgctaccgccatgctgccagcagcctgaattgtcatatgaccttcagtatctatctgccaccgccacgggacgataacccaccaccagtcctttattggctatcgggcctaacctgtaatgatgagaactttacgctgaaagcgggcgcacagcgggttgctgcagaactcgggctggtactggttatgcctgataccagcccccgcggtgataatgttcccaacgatgacagctatgatttaggtcagggagcgggcttctaccttaatgcgacgcaggagccgtggtctgatcatttccagatgtatgactatatcagccaggaattgccctcactgatccgccaacattttagcgtcagtgaacggcaatcaatcagtggtcattcaatgggcggccatggtgcactgatgctagctctgcgtaatcctcaacaatatcagtctgtttctgcttttgcgccaatagttaacccatgccaagtaccatggggccgaaaagcctttaccgcttatcttggcagtgatgaaaaccaatggctgcaatatgatagctgccatttactgacccatgcacagcatcagttgcctatattggtggatcagggggatggtgatcaatttcttgccgatcaactccaaccggcaaaattggcggagctggcgcgccagcgagactggccactgatgttgcgtattcagccgggttatgatcacagctattttaccatagctacatttattgaagatcacctgcgctttcatgctgcacacctacagccgtaa

SEQ ID NO: 42044 - DNA, 2040 bp, Yersinia pestis
atggcacgcttgtctggcaaggcattatacgttatctggatcttattgttacttgtgacgggaaccgttcaggctaccgccgatgagatttccgtgagtacaccggctgtcgaagcaccaaagggccacggccttatccgtgcttatgaacacattctatcgttcgatactcatgcgcgttttgacgccgatggcagtatggagatgcgtgagaatattaaggtgttgtccctcgggaaacaaataagccgtgggattttccgtacgctgccgttaacctggaaccgacaggatggcaaatttttcagcgtcgaatatcagattaaaaatgtattacgtgatggggtggccgaaccttttagtgtgacgaaagaaggcgaaacactgatggtccgtattggtcgcgctgaccatatattgaagcccggtatttataattatgtgatccaataccaagtcagcaatcatttcagccgattccccgattgggatgaactgtattggaatgtgacaggtaacggctgggaatatcctattagtaaagccagtttccatctggaattacccgcaagcgaagcgtttctaaatagtgaaggcaaagatacccggttgagcacgattgatgtttataccggcaggctcggcgaaaaagaacaaaatgccaaaattctggccgatggtagcgtacagacgtcgcaaccactcaaacaaggtgaaggtttgaccgtcgcctatacttggccgcgcactattcttgctaacgcacctgcaccggaaacctcctcactgttagtctatctgctgctgcctaccgtgcaaaccagcgtattatggataccgatactcctcctcattggctattacctgctttggtggcgtaaaaatgttaccgcgattgggctgaaaatgccgccgatagtgccgctctatgcgctccctgccacgctgtcaccgggctatctgcgttatgtcactcagcgtaaatacgatgcgattgccttcagtagcgatttgctgaatttagtcgctcaacgtagcgtagccattaaaacaaaaaagagtaaaaacaaaagcccatgggttttaaacagccgcgatgaacagtggctatcactccaatccgatggcaatcagctcgatatccatgataagcaattactgcatacgctgtttagtagcaaccgtaagaatatcaatctcagtaagccccatcagcggccaatgcagaaggcgctgaagtttttagagaaacgctgtgaggatcagcaagagaagttattcagtcaatggcttgggccaatatggcgtggaatatttatcatgctattggtgcccgttatctgcggcctgctattcaatacgggtatcgccttcattactattcccgttttattgttgctgctattgggcatcaacctcctttctttaccgctgaaatttttatttagccccaaacaagtattggatagccggggggctctctctgtatgcttcgcgctattatttggcttattggctctccttcccgttggtctttttatctttaacctcccccccttaacccagttaccggctggatacttaggcgctttattggttgctattttgctctgcgttacttttaccaggatggtaccccgttacacacaacgagggctaaatcatcttgctatcgctcgcggactaaaattatatcttggtaccgcagaaaggcatcgctatcaggccctttatccgccggacaaactggttgcccattttgaaagtatgttgcctgtggctttggctctcggcgtgggtaaaacgtgggcgaatagttttgcacaatatttggtcagcacaggcaccctgtcggtggtctttgccaatgccgactggagcagcgtgaatcacttcagccaatcctgtagctcatccgctacggcaacccccagccgcagttctgactccagttccagctccagttcgagtggttcaggctcctccggcgggggttcgtctggtggtggttctggcggtggcggcggcggtggctggtaa

SEQ ID NO: 42045 - DNA, 4617 bp, Yersinia pestis
gtgagaaccatcacgagaggccattggcggagggcggaaaagcagatttgccgcaaagcacgcgtctgtcagcccacactgtctgatatcaatatgtcctttacgagctggtttgtgagagtctcacagagcctggggaggttcactgatatgttgtatgatcaatcccaagagagggacaactgtggtttcggcctaatcgcccatatagaaggcgaacctagccataaggtagtgcgcaccgcaatacacgcactggcccgtatgcaacaccgtggcgcgatccttgctgatggcaagacgggcgatggttgtggcttattattgcaaaaaccggatcactttttccggatggtcgctgaagaacgcgggtggcgtttggccaaaaactatgccgtaggtatgatgtttctcagtcaggacgaagaactcgccaaggcaagccgccgcattgtagaagaagaattgcaaaatgaaacgctgtcgattgtcggctggcgtgaagtgccgacgaacccagatgtactcggtgaaatcgctctctcctccctgccccggattgaacaaatttttgtgaacgcccctgcgggctggcgttcgcgtgatatggaacgtcgcctgtttgtggcacgccgccgtattgaaaagcgtatttcagataaagatttctacgcatgtagcttctcgaatctggtgacaatctataaaggcttatgtatgcctgcggatttgccacgcttttatcttgatttggctgacctgcgcctcgaatcggcaatctgtctgttccatcaacgcttctcaaccaataccgtcccccgctggccgctggctcagccgttccgctatctggcacataacggcgaaatcaacaccatcgccggtaaccgccaatgggccaaggcgcgtgcctataaatttaaaacgccattaattccggatttacaggatgcggcccccttcgtcaatgagaccggctctgactccagttcgctggataacatgttggaactgttcctcagtggcgggatggacttgatccgtgcaatgcgtctgttagtgccaccggcctggcagaacaacccagatatggatactgatctgcgtgccttctttgacttcaactccatgcatatggaaccgtgggatggccccgctgggatcgtgatgtctgatggtcgctacgcggcctgtaaccttgaccgtaatggcctgcgccctgcgcgctatgtcatcaccaaagacaaactgattacctgtgcctcggaagtcgggatttgggattaccagcccgatgaagtggttgaaaaaggccgcgtgggtcctggcgaactcatggtgattgatacccgcagcggtaaaatcttgcattccgccgaaacagacaacgatctaaaaagccgccacccgtataaagagtggatggagaagaacgttaagcgtctggtgccattcgaagacctaccggaagagcaggtagggagccgtcagttagatgattcgcagttggaaacttatcagaagcagtttggttacagcaacgaagagctggatcaaatcattcgcgtgctgggtgaaaacggtcaggaagccaccgggtcgatgggcgatgacacgccatttgccgtgctctccagcggcccgcgcattatttatgactatttccgccagcaatttgctcaggtgactaacccccctatcgatccactgcgtgaagcacacgttatgtcactggcgaccagtattggccgtgagatgaacgtcttctgcgaagctgagggccaggctcaccgcttgagctttaaatcgccgatcttgctttactctgattttcagcaattaaccacgctggaaggggaacattaccgcgctgaccgtttagatctgacgttcaatcccgcagagaatgacttggagcaagctgtactgtcgctgtgtgatgaagcagagcgtaaagttcgtgatggtgccgttatgttggtgctatcagaccgtgccattgcgcctaaccgcttgccggtgccagcccccatggctgtcggtgcaattcaaacgcgtttggtggacaaaagcctacgctgtgacgcgaatattattgtcgaaaccgccagcgcacgtgatccacaccacttcgcggtgctgctcggttttggtgcgacagcgatatacccttatctggcttatgagtcattggccaaactggttgattcccaagcgattgataaaaagtatcgcgatgtgatgctcaattatcgcaacggtatcaataaagggctgtacaagatcatgtccaaaatgggcatctcgacggtggcctcttaccgctgtgccaagctgtttgaagcggttggtttgcatcgtgatttgtctgatctctgtttccagggtgttgtcagccgtatcggcggggccagcttcagtgatttccaacaggatttacagaatctgtccaaacgcgcctggctgaaacgtaagcctctggatcaaggcggcttgctgaaatttgtccacaacggcgaataccacgcctacaacccagatgtggtcagtaccttacaaaaagccgttcatagcggtgaatacagcgattatcaggcgtacgccaagctggttaatgagcgcccgattgccacactgcgcgatctgttagccattaaaccgcaaggcactccgattccggtggatcaagttgaaccggctgaatctctgtttaaacgttttgatactgctgcaatgtctatcggtgccttaagcccggaagcccatgaatcactggctatcgccatgaacagcttgggaggtttctctaattccggcgaagggggcgaagatccggcccgttacggcaccaataaggtgtcccgtatcaagcaggtggcctctggtcgtttcggtgtaacaccggcatatttggtcaatgcggatgttatccagattaaagtggctcaaggagcgaaacccggtgaaggcggccagttaccgggtgataaagtcacgccgtatatcgccaaactgcgctattccgtaccgggtgtgaccttgatatccccgccaccgcatcatgatatttattcaatcgaagacttggcccagctaattttcgatttgaagcaggtcaatccgaaagccatgatttcggtgaaactggtctctgaaccgggtgtcggcaccattgcgaccggtgtcgccaaagcttacgccgatttaattactattgccggttacgatggggggaccggtgccagcccgctgtcttcggtgaaatatgccggttgcccatgggaactgggtctggttgaaacacaacaagcattggtggccaacggcttacgccataagatccgcctgcaagttgatggcggcctgaaaactggcgttgatattgttaaagccgctattttgggggcggaaagcttcggttttggtaccggccctatggtggcactagggtgtaaatacttacgcatttgccacctgaataactgcgcgaccggtgtggctacgcaagatgaaaaattgcgtcgtgaccattatcacggcttaccggaacgcgtagtgaactacttccacttcatcgcccgtgaaacccgtgaaacccgtgaaatcatggccgaactgggcgtgagtcaactggttgatttaattggccgaaccgatatgttgctggaactggatggcatctcagcgaagcaaaacaaactggatctgtcgccaatgctgaaaacagcaacgccacatccgggcaaggcgctgtattgtactgaaagtaacccgccgttcgataaaggcttactgaacaaagagttgctgtctcaagctgaaccctatattgaagccaaacaaagtaagacgttctattttgatattcgcaacactgaccgctccgtcggcgcagcattgtcgggggcgattgccacgaaacatggcgatcaagggctggcaactgatccgatcaaagcgtatttctccgggactgccggtcagagttttggggtgtggaatgccggtggcgttgagttgatgctgactggcgacgcgaatgactacgtcggtaaagggatggccggtggccgtatcgcggtacgtccgccagtcggttccaacttccgcagccatgaagcgagcatcattgggaacacctgcctatacggtgccaccggcggtaaattgttcgccgcaggccgggcgggtgaacgcttcgcggtgcgtaactccggggcgatcaccgtcgttgaaggtatcggtgataacggctgtgaatatatgactggcgggattgtctgtgttctgggccgtactgggattaactttggtgccggtatgaccggtggcttcgcttatgttctcgatgaagacggtgaattccgtaaacgtgttaaccctgaactggtagaagtgctggatgtcgagcaattggctatccatgaagaacatctgcgcgggctgatcactgaacatgttcagttgactggctctagccgtggcgaagagattctggctaactggccagaatgggtgaccaagtttgccttggttaaaccgaaatccagcgatgtgaaagcactgttgggccaccgtagccgttccgcagctgagctgcgggttcaagcgcagtaa

SEQ ID NO: 42046 - DNA, 642 bp, Yersinia pestis
atggctgtcgctgccaacaaacgttcggtaatgacgctgttttccggcccgaccgacatttttagccatcaagtacgtatcgtactggcagagaaaggtgtcagtgttgagattgagcaggttgaagctgataacctgccacaggacctgattgacctcaacccctaccgtactgtccctactttggttgatcgcgagctgacgctgtatgaatcccgcattatcatggaatatttggatgagcgtttccctcacccaccattgatgccagtctatcctgttgctcgtggtagcagccgcttgatgatgcaccgtattgagcacgactggtattccctgctgtataaaattgagcaaggtaatgcacaggaagctgaagcggcacgtaaacagttacgtgaagagttactgtccatcgcgccagtctttaacgaaacacctttctttatgagtgaagagttcagtctggtcgattgttacttagctccgttgctatggcgtttaccggtgttagggattgagttcacaggggcgggctctaaagagctgaaaggctatatgactcgcgtctttgagcgtgatgcgttcttggcttcactgactgaagctgaacgtgaaatgcatctgaaaactcggagctaa

SEQ ID NO: 42047 - DNA, 660 bp, Yersinia pestis
atgtttatcagcgtgttgcgccgtgaattaaaaatagcctttagaaaaggtgcggaaatcgttaacccgctgtggttctttttgatcgttattacgctgttcccattggggataggcccagagccacaattgctggctcgcattgcaccgggcatcgtgtgggtagcggctttgttggcctcgttactctcgttggagcgcttattccgtgatgatttttacgatggctcccttgaacagttgctgttattgcctacaccactccccctcaccgtcttaggcaaagtatgtgctcactgggtcgtcactgggctgcctttattggtgttatcaccgctggttgctttattgctttctctggacgtcaataccgctatcgcgatggggctgacgctcctgcttgggacaccaacactgagttttatcggtgctatcggcgtggcgttgacggtggggttacgtaaaggcggggtgctgctgagtctattggttttgccgctgtatatcccggttttaatctttgcgacggcggccattgatgccgcgtcaatggcgatgccaatcgacggttatctggctattttaggtgcgatgctggcagggagtgtgacacttgcgccttttgcgacggcagcagcgttacgggtgagcatacagtaa

SEQ ID NO: 42048 - DNA, 393 bp, Yersinia pestis
atggctgaaaatcaatactacggcactggtcgccgcaaaagttcttccgcacgcgtctttcttaagccgggtagcggtaaaatcgttattaaccaacgtagcctagaagtttacttcggccgtgaaactgcccgcatggtagttaatcagccgctggaactggtagacatggttactaagtttgacatgtacatcactgttaaaggtggtggtatttctggtcaagctggcgctatccgtcacggtatcacccgtgcactgatggagtatgacgagtctctacgtggtgaactgcgtaaagctggcttcgtaacgcgtgatgcgcgtgaagttgagcgtaagaaagtgggtctgcgtaaagcacgtcgtcgtccacagttctccaaacgttaa

SEQ ID NO: 42049 - DNA, 429 bp, Yersinia pestis
atgaaaactttcacagctaaaccagaaactgtaaaacgcgactggtatgttgttgacgcgagcggtaagactttaggtcgcctcgctactgaactggctcgtcgcctgcgcggcaagcataaagcggaatacaccccgcacgttgatactggtgattacatcatcgttctgaacgcagaaaaagttgctgtaaccggcaacaagcgtacagacaagatttattaccatcacaccggtttcgtcggtggtatcaaacaagcgacctttgaagagatgattgcccgccgtcctgagcgtgtgattgaaatcgcggttaaaggcatgctgccgaagggcccgttgggtcgtgcaatgtaccgtaagcttaaagtttacgcgggtactgagcacaatcatgcggcacagcaaccgcaagttctggacatttaa

SEQ ID NO: 42050 - DNA, 1521 bp, Yersinia pestis
atggccgatattaatacagcacaacctcgtgactggttactggaaatgagcaatattgataaatcatttccaggcgtgaaggcgttagataacgttaatcttaaagtccggccctattctatccatgcactgatgggcgaaaatggtgcaggtaagtcaacgctattaaaatgtctgtttggtatctataaaaaagattccggaagtattattttccagggacaagaaattgaatttaaaagttctaaagaagcattagaacagggtgtttcgatggtacatcaagaattaaacttggtgttgcaacgtacagtaatggacaacatgtggttggggcgctatccaaccaaaggtttttttgtcgatcaagacaagatgtataaagagacaaaggccatctttgatgaattagatattgatattgatccgcgcgataaagtagccacgttatcggtatctcagatgcaaatgatcgagatcgccaaggctttttcttacaatgcaaaaatcgtcattatggatgagccaacctcttcactaacagaaaaagaggtgaaccatttattcaccataatccgaaagttaaaggcgcgaggctgcggcatcgtttatatttctcacaagatggaagagatattccaactgtgcgatgaaattactattctgcgggatggtcagtggattaccacccagcctttggatggtttgacgatggatcagatcatttcaatgatggtcggtcgctctctgagccaacgttttcctgatcgcctgaacaagcccggtgaagtcattcttgaggtgaagaatctgacctcattgcgccagccctctatccgcgatgtttcctttgatttacataaaggggaaatcctggggattgcaggcttggtcggggctaaacgcacagatatcgttgaaactttatttggtatccgagaaaaagtgaccggcacgattaaattgcatggtaagaatattaataaccacagcgctaacgaagccattaaccacggttttgccttagtgactgaagagcgccgttcaaccgggatctacgcttatctcgatatcagttttaactccctgatctctaatattcgtaactacaaaaataaatttgggctgctggataacactcgcatgaaaagtgatacccagtgggttatcgatgcgatgcgggtaaaaacgccaggccatcggacaaatattggttctttgtcgggggggaatcagcagaaggttattattggccgctggttactcacgcagccagaaatattaatgttggatgagccaactcgaggtatcgatgttggcgctaagtttgaaatctatcagttaatgactgaactggcgaagaaagacaaagggattattattatctcctctgaaatgcctgagttattagggattactgacagaatactggtaatgagtaacggtcaggttgcgggcattgttgataccaagcaaaccacgcaaaatgaaatattacgccttgcatccttgcatctctaa

SEQ ID NO: 42051 - DNA, 798 bp, Yersinia pestis
atgccgggtggaatgggtggaaagggtgtggacagaaaattcatcgagacactgaaaacatactgtgatgatgctaaccggggagggggtccgctctaccagcgtctggagaaaggtttccgcgatctgatcacccgtggtgagctaaaagccggatacgcgattcccagcgaacgcgaactttcggaacgcttgaatctgtccagagtgacagtccggcgtgcgttaagtgaactggctaacgcgcaggttatcgtgcagcgtcgtggagcgagaagtactgtggcgggaagggttgaaaagccgctgtcttcgctgaccagctttagtgaggatatgatttcacgtggctatgagccaggcgcacgctggctacagaaagagcttactcacgcttctccctcggaaattattgcactgaatctgtctccaggtgctctggtgtggcgtctcaagcgcctgcgtaccgtagatgaacacccgatggcagtggagatcgccgtggtgccgcagatgtttattccagagatggatgaactgagggattcgctttattcagtactgcagttgcacgggtttatgcccgcccgcgcgttacagcgtattcgagcagaaccgctgagtcgcgatcacagccaactgttagatatgcctgctcacagcccggcgctgcatgttgagcgccattgctatctggaagatggccgcccgattgaatacacccatacctggtatcggggcgacagttacgattttctggttgaacttcagcgcgacatcacccccggtctgtcatga

SEQ ID NO: 42052 - DNA, 405 bp, Yersinia pestis
atgacctgggagtatgcgcttattggattggttgttggtgttgtgatcggcgcggtggctatgcgctttggcaaccgcaaattgcgtcagcaacaagtgctgcaaaatgagctggagaagagcaaaacagatttggaagagtatcgtcaagagctggttgggcacttcgcacggagtgccgagttactggataacatggcccgtgattatcgtcagctttatcaacatatggcgaaaagctccaataacttattaccggacttaccattacaggataatccgttccgttaccgtctgacagaatccgaagcggataatgatcaggcacccgttaaactaccacctcgtgattactctgaaggcgcatctggtttattacgcccggaacaccagaatcgcgattaa

SEQ ID NO: 42053 - DNA, 1014 bp, Yersinia pestis
atgacagatcgtgttattaaagttggcgttattggcgcgggttttatgggggcgatgcatgcccgaatttggcagcaaatgtacggtgtcgaagtggtcggtgtggccgatccagatttatcccgcagtgaagcgctgaagccgtggatccctcaactgaatggctatgaagatttcaaccagatgctggagcaggaaaaaccagatattgtcagcatctgtaccaaagatgacttccaccttgcgcccgcacttgcagctgcaaaagtgggtgcccacattttcctcgagaaaccgattgcgactacggtggaagacggtgaagccatcacgcgtgctgcacgcgaagcaaacgtcaagttgggtattggtttcctgctgcgtttcgacccgcgctactcacgtgcacaagagatcctggcttcgggcagtgcaggcgaagtgagccatattagtgctcgtcgtaatagtccggctatcgaaggtcctgcccgttatggcggtagcctgccgttgccgctgcacgtcactgtgcatgacgttgatatgatcctgtggttgctaaagcatacccacccgatcagcgtctacgcccagaccactaacaagcttctcggccatctggggacggaagattctgtctttgccatcattcgctttgccgacggcaccgtcgtgaatctggagagctcttgggcgctgccagccggttcacgcacgttgctcgacgctaaaatgtcgatcctggcaactaaaggcctgattgaaattgaatgcggtgaatccggtctgtatcacgcgtctgaaaacatgaaccgttacatcgacacccagcactggccgctgagtcagggtgaactcaaaggcgatctgcgtgaagagctgatggcgttcctcggcgatgttcgcaccggcactacccgtgtagcaaccggcgaagaaggcaatgaggcactgcgtattaccgttgccattatggactctgcccgtaccggcgaaattgtccgggtctga

SEQ ID NO: 42054 - DNA, 1374 bp, Yersinia pestis
atgaagaaaacatcattacttcttagtgcgctagcaataagcgtcggcttaggtctcgcttctgttcctatggtgagtgcagcagcactgcctgcggcggtcgccggacaaacgttacctagcctggcaccaatgctggaaaaagtattacccgccgttgtcagtgttcatgtctctgggagccaggcacagcaacaacgcttgccagaagagtttaaattcttctttggcccgaatgcaccatcaggaaaagagagcagccggccattcgaaggcttaggatcaggcgttattattaacgctgagaagggctacatcctgaccaacaatcacgtcatcaataatgccgataaaattcgtgttcagctgaatgatggtcgtgaatacgatgcaaaattgttgggtcgtgatgaacaaaccgacatcgctttactgcaattaacggatgctaaaaatctgactgcgatcaaaattgcagattccgataacctgcgggtgggggattttgctgtcgccgtaggtaacccgtttggtctagggcaaaccgcgacgtcaggtattatttcagcactgggtcgtagtggcttgaatctggaagggctggaaaactttatccagaccgatgcctcaatcaaccgtggtaattctggcggtgctctggtgaatctggatggggaactgatcggaattaataccgccatccttgcgccaggtggcggtaatatcggtatcggcttcgctatcccaagtaacatggcacaaaacctcagccagcagttgatcgagtttggcgaagtgaaacgtgggctgctcggtatccgtggtagtgagatgacggctgacattgcgaaagcctttaatattgatgctcagcgtggggcttttgtcagtgaagtgctgccaaaatcagcggcagcgaaagccgggatcaaaccaggtgatgtgttgatttccgttgatgggaaaaagattagcagctttgctgaattgcgcgccaaagtcgggacaacggggccaggcaaaaccattaaaattggtttactgcgcgaagggaaaccactggaagtatcggtgacgctggataacagtagctcaacatccaccagcgctgaaaatctatcgccatcattacagggcgcatccctgagtaacggtgagctcaaagacggtagtaaggggatcaaagttgatagcgtcactaaaggttcgccagccgcacaatctggcttacaaaaagatgatgtgattattgccgtaaaccgcgaacgggttaaggatattgctgagttgcgtaaagccatcgaagccaaacctgccgtgattgcactgaatatcgtgcgtggtgaagataatatttacttattaatccgctaa

SEQ ID NO: 42055 - DNA, 765 bp, Yersinia pestis
atgaacttccgccttactgggttggctttcgcaagcgtactgttagttgggtgcgccagtagttcaccggatcacatggagcagggccgctctgatccgctggaaggtttcaaccgggcaatgttcaattttaactatgaggtcctcgacccttatgtggtgcgtccggtcgccgtcgtctggcgtgattatgtgccgcaaccagcacgtaacggtatgagcaactttttgggtaacctcgaagaacccgccagtatggtgaacagcttcctggtcggtgatccatataatgcgatgaagcattttaaccgcttcttcctgaataccgttttgggtatgggcggtttgatcgatgtcgccgggatggctaatccgaaactggcaaaacaagtgcctcaacgttttggtagtacattaggccactatgatgtgggctacggcccgtatgtggtgctaccagggtatggcagttttaccctccgcgaagatggcggccagttggcagatacggtgtatccggtactgagttatctgacgttctggatggccgcagggaaatgggtgcttgaaggggttgaaacccgcgcacagctattggactctgatggtttagtgcgtaattcttcagatccttatctcatgatacgcgaggcttatttccagcgtcatgatttcctggcgaatggtggccaactgaaacctgaagttaactcgaatgctcaggctattcagggcgatctggatagcatagatgccgccgattga

SEQ ID NO: 42056 - DNA, 1272 bp, Yersinia pestis
ttggtcatgaaccagaaaaacctgtttacccgctcagctctggcagcagctatcgctcttatttcatcgaacgtttctgcagccggttttcagttgaatgaatattcagccgccgctctagggcgtgctttctctggtgaaggcgcagtggctgataatgcttccgttggtagccgcaatcctgcagcaatgactttattcgaccgcccttctttctccggtggtgtgatttatattgatccaagtgttgatatcacggggacgtcgccaagtggcaaaagtacggatgccagtaacattgcgccatcagcgtgggttccgaatctccactttattatgccattggatgaacagtgggcaatcggtgcttctgcgacctctaactacggtttagccactgaatttaatgatgattatgtggcaggcatgttaggcggccaaaccgatctgaaaacggctaacctcaacctaagtgccgcgtaccgcctgaatgataacttcagttttggcctggggtttgatgcagtctatgctgatgcgaaaattgtgcgccatctcggtgaagctggcgggggtctattgcctgctaacactgaagccgccaggttggaaggtaccaaatggggttacggctggaatacgggtattttgtatgaaatcgataaagaaaaccgctacagcttcacttatcgttctgaagtcaatatcgattttgacggtgattacagtaaccaactacctgttattttcggtggtctgggtggaaaaacggtccctggttccctaactctgaacctgcccgccgtgtgggaagtctccggctacaataaagtcgcgccacaatgggccattcactacagcatggcttacaccacctggagcagtttcaaggagttaaaagcaaccgcgtctaatggcgatgtgctgtttgataaacatgaaggcttcagagatgcctaccgtattgcgttagggaccacctattactacgatgataactggacattccgcaccggtattgcctttgatgatagcccgatccccgcaggaaaccgttcaatttccatcccggaccaagatcgtttctggctcagtgcaggtaccacctacgccttcaacaaaaatgcctctgttgatgtcggtattgcttatatgaaaggccagaatgtcagtattaccgaaaagaccccggccccatctaacaccacatatgagttcaactcgaaaggttccgcgatgctatacggtgtgaacttcaactacacattctaa

SEQ ID NO: 42057 - DNA, 1263 bp, Yersinia pestis
atggataagtttcgtgtgcaggggcggactcgcctgagcggtgaagtcactatttccggagcgaaaaatgctgcgttaccgatattgtttgcagcattgttagcagaagagccggtagagctacaaaatgtcccaaagctaaaagacattgataccaccattaagttgctcagccagttaggcactaaaattgaacgtaataatggttccgtttttgttgatgccagcgctgttaatgagttttgtgcgccttacgatttagtgaaaacgatgcgtgcctctatttgggcgttggggccactggttgcccgttttggccaaggtcaggtttctttgcctggtggttgtgcgattggcgcacgtccggttgatttgcacatcacgggtctagaacaactgggtgctgaaatcaagctggaagaaggctacgttaaggcctccgttaatggccgcctaaaaggtgctcatatcgtgatggataaagtcagcgtgggtgcgacggtgactatcatgagtgcggcaacactggcggaagggacgaccgtgattgaaaatgcggcccgtgaaccagagattgttgatacggcgaacttcctgaatacgctgggtgctaaaatcagtggtgccggtactgaccgcattaccattgagggggttacccgtttaggggggggcgtataccgtgtgctacctgaccgcatcgaaaccggtactttcctggttgccgcagccatttcaggtggcaaagtggtgtgccgccaaacacgccctgacacgctggatgctgtcttggctaaactgcgcgaagcaggtgctgatattgaagtcggtgatgattggatcagtctggatatgcagggtaaacgccctaaagccattacctttcgtaccgcgccacaccctggcttcccaacggatatgcaggcccaattcagtttattgaatctggtggctgaaggaacgggtgtcatcactgaaaccattttcgaaaatcgttttatgcacgtcccagagcttattcgaatgggcgcacatgcagaaatcgagagcaataccgtgatttgctatggcgttgaacaactttctggtgctcaggttatggcaaccgatttacgtgcttccgccagcctggtattagccggttgtatcgctgaaggcgtaacaatcgttgaccgtatttatcacatcgatcgtggctacgaacgtattgaagataaactgcgggcgctaggtgcgaagattgaacgcgtgaaaggcgagtaa

SEQ ID NO: 42058 - DNA, 297 bp, Yersinia pestis
atgtcagatgcaattaatcgttgtagtgcggaagaaaccgcggcttgctgttgcgtagatgtgggtacagtgatggacaatacggatcggacagcatcctacagctgtgtgtttgctagccgtcatgaagcagaagcgatgttgaaaacattgactgataaagcacgggcagtcgaatcagacccatgcctgattgaacataaactggaagatgtcgagggcggtgttcgtttgactatcgatttcacctttgcctgccaggcagaaacaatgattttccaactcggtctgcgttaa

SEQ ID NO: 42059 - DNA, 1311 bp, Yersinia pestis
atgagtaagccattaccgttagtgacgcgtcagggcgatcgcattgtaatagttaacggcctgcggacccctttcgccaagcaggcaactgcttaccatggcgtacccgctgtagatttaggcaaaatagtggtcagtgaattgctggccagaagtggcatttcttctgagttgattgatcaactggtttttggccaagtagtgcaaatgcctgaagcacctaatattgcccgcgaaatcgttttgggtactggcatgagcgttcataccgatgcttacagcgtttcccgcgcctgtgcgaccagttttcaggcggtggccaatgtcgcggaaagtattattgctggctccgttgatatcgcgatagccggcggggcagattcttcatccgtgctgcccatcggcgtcagtaaagccctggcccgcacactggttgacgccaacaaggcccgcagtttatcccagaagttgaaattgtttagccgacttagattacgtgatctgttgccagttgcacctgcggtggcagagtattcaaccggcctgcgcatgggggatactgccgagcagatggcaaaaacctatggcatcagccgtgaggatcaggatgctttagcgctgcgatcccaccaattggccgctgaagcctggcaacaggggtggctgcacgatgaggtgatgacggcttatattccgccttatcgagaggccattattgaagataacaatatccgcaaagattccacattggcgcaatatgccaaattacgtccggcgtttgatcgtcagcacggtagtgtgacggcggcgaacagtactccgttgacggacggggcggcggcagtactcatgatgagcgaatcaaaagccaaagctctggggttgccgcctttgggctacctgcgcagttttgccttctctgccattgatgtttggcaggatatgctgttagggccatcctatgccacgccattagcgttagaccgggcgggtattacactggcggatttgacacttatcgatatgcatgaagccttcgccgcacaaacactggctaacctgaaaatgtttgccagtgatacttttgctcgcgaaaaactggggcgtagccaagccatcggagaggtggatatgagtaaattcaacgtattggggggttccattgcatatggccacccatttgccgctactggcgctcggatgataactcaaacgctgaatgagttgcgtcgccgtggcgggggattgggcttaaccaccgcctgtgctgctggtgggttaggtgctgcgatgattctggaggtggagtga

SEQ ID NO: 42060 - DNA, 2325 bp, Yersinia pestis
atgagcaaggaaaatatcgttacccgtgaaaatacagctgtcagtgaaaatgcagtcagtgaacctacagtgaataatgatgtgggcgcatcggccacgaattcagttacccatcccgcatttaccctcaacgtaaggccggacaatattggcattatcaccattgatgttgttggtgacaaagtgaataccctaaaggctgaatttgctgatcaaattgccactatattgcaacaagcgcacgctctaccaaaattacagggactcgtcattgtttctggcaaaccagactccttcattgccggtgcggatatcacgatgatcgcggcttgtcgtaccgctcacgacgcccgcgtattagcacaaaaaggccaatcaattttggcgcaaattgccgctttccctgtgccggttgtggctgcgattcatggcgcttgtctggggggagggctagagctggcgctggcttgccatagccgcatatgttctctggatgataaaaccgttctcgggctaccggaggtgcaactggggttactgcctggctccggcgggacgcaacgtctgccgcgtttagtgggggtcagtaaagcactggatatgatattgaccggtaaacagatacggccccgtcaggcactaaaaatggggctggtggatgatgttgtgccacgcgatatcttattggatgtggcgattcagcgcgcgaaagcggggtggcttaatcgacgagcattaccatggcaggagcgtttactcagtgggccgttgggtaaagctttattattccgtattgtccgtaaaaaaacgctagctaaaacgcgggggcactacccggcggctgaacgtattattgatgtggtgcgtaaaggattagatcagggcgggccaagtggttatgaggcagaagccagagcatttggcgagttggcgatgtcgcctcagtcagccgcattacgcagcctgttttttgccacgacgtcactgaaaaaagagaccggaagtgcagccacagcgcgtgcaattcatcgggtcggcgtattgggcggtggcttgatgggcggaggtattgccaacgtaacggctacccgagcgggcttgccagtgcgtatcaaagatatcaatccgcaaggaattaatcaggcgctgaaatatacctgggacgcattgggtaaacgggttcgtagtaagcggatgcgcccaactgaacagcagcggcagatgatgttgatctctggtagtacggattaccgtggttttgaacgtgtcgatattgtggtggaagcggtatttgaggatttatcactgaagcagcaaatggttgctgacatcgaacgatttggtgccgcccatactatttttgcctccaatacatcatcactccccatcagccagattgctgctttggcgcaacggccagagcaggttattggcctgcactattttagtccagtagataaaatgccactggttgaagtcatcccccatgaaaaaaccagtgaagagaccatcgctaccaccgttgctttagcccggaaacagggtaaaacagccattgtggtggctgatcgcgctgggttctatgtaaaccgcattttggcaccttatattaatgaagctgcccgttgcctgctcgacggagagcctatcgaatcagttgataacgcgttggtcgattttggtttccccgtaggccccatgatgctgcttgatgaggttgggattgatgttgcgaccaaaataatgccgattctggtcgagcaattagggccgcgttttgctgcgcccccgtcatttgacgttattttgaaggatggacgtaaagggcgcaaaaatggccgtggcttttatttatattcaaaccccacaaaaaattcatctccaacaaaaaatgggaattctccggcgaagcgtaatagctttaagtggagaaaaaacaaagtaaaaccagtcgatgccagtatctataccttgttgggggtgacacctaaagcccatcttggtgcaggcgtgattactcaacgttgtaccatgctgatgttgaacgaagcggtacgctgtctggatgaatcgatcattcgtaacccgcgcgatggtgatattggtgcagtgtttgggatcggttttccgcctttcctcggtggtccgttccgctatttggatagcctgggagccgataaggtggtacaagcactcagattattggtacagcaatacggtgagcgtttcgaaccttgccagcggttggtaacaatggctgaacaacaacaacaattctatcccgtggacgccaatatagatgaggtgacggacgtggcaagctga

SEQ ID NO: 42061 - DNA, 1182 bp, Yersinia pestis
atgcaaagattctcatcgcgcgtaaccaatctgctgattgcttcgttggtgttgaccatagggcgtgcagttaccttaccgttcattactatttatttggtcgagcattttcaactggccccagataccgttggcctgctattgggtgccagtttagccttgggtatttttaccagtctgtatggcggttatctggtcgataaatttaataaaaaacgattgattttactgacgataatcctattctcagccactttttttgcattaccgtggattgaacatcccgcttgggtcattttaactctggcgctactgcattcggcctactcagtctacactatcgcggtaaaagcgtgctttgccgactggctaccggtcaatgaacgtattaaagcgttttcagccaactacacgctggtcaatgtgggttgggctatcggcccggtaatgggggtattagtggtgggtttcggcccacaactgccttttatcatttcaggcgcattggctttattggttgctatcgtgctgaaattcaggataaatgacgccgatatgttagcgactgaacgggtgtctagcgaatcagtacctgaccttcgccaaacattcaatatattgcgtcacgataagcggctgatttactttacgctcggtagcctgctcggcgccatggtattcgctcagttctccggttacctctcccaatatctgatcacggtattcgacgccaaatttgcttatcaggtgattggggcggtaatgaccgtcaatgcgaccatcgtcattgctctgcaatatctattaagccgccggatgaaccaacagaatttgatgcgttggctcatgataggcaccctgttctttattattggtttgctaggatttatggtagctcaggattccattccgttatggatgctggcaatggccattttctcattgggcgaaattattgttattccagccgaatacctgtttatcgactttattgctccagcaaacctcaaaggcagttactatggggtgcagaaccttggtcaactcggcggagcaattaacccggtactctgtggttttctgctagcctacacggtgcccgaaatgatgttttatatgctaattattgcggctactttaggtctggtgctcttctatcgcggctaccatttggcaaaatag

SEQ ID NO: 42062 - DNA, 2028 bp, Yersinia pestis
atggctcaagtcgcgaaaaaaatattggtgacgtgcgcgctaccatacgctaacggttctattcatctcggccacatgctcgagcatatccaggcagacatctgggtccgtttccagcgaatgcgcggcaaccaggttcattttatctgtgcagatgatgcccacgggactcctatcatgctgaaagctcagcaaatgggtattgaaccagagcagatgattgccgaaatgagccaggagcaccaacaggatttcgccggttttgctatcagttatgataactatcactccacccacagtgatgaaaaccgtgaactgtcgagcctgatctatggccgtctgaaagccaacggttatataaagaaccgtactatttctcagctctatgatcctgagaaaggcatgtttctgcccgatcgtttcgtgaaaggcacttgcccaaaatgcaaagccccggaacagtacggcgataattgtgaagtctgtggcgcaacctacagcccaactgaacttatcgaccccaaatccgccgtttctggtgcgacaccagtgatgcgtgaatctgaacacttcttcttcgatttaccggctttcagtgacatgttgcaagcctggacacgctcaggtgcgctgcaagaacaagtcgcaaacaaaatgcaggaatggtttgattccggcctgcaacagtgggatatcacgcgtgatgccccttatttcggtttcgaagtaccggatgcaccgggtaaatatttttacgtctggttagatgccccaatcggttacatgggggcgtttaaaaacctatgtgataaacgtggtgacctggattttgatgaattctggggtaaagacgccaaaactgacctctatcacttcatcggtaaagatattgtttacttccacagtctgttctggccagccatgttggaaggcagtaacttccgcaagccgacaaacctgtttgtccatggctatgtcacggtaaacggcgcgaaaatgtctaaatctcgcggtacgtttattaaggcggggacttacctgaaatatctggatgcggattgcctgcgttactactacgcggcgaaactctcttcgcgtattgatgatatcgatttaaatctggaagatttcgtccaacgcgttaacgccgatatcgttaataaagtggtgaatctggcctcacgtaatgctggttttatcaataaacgctttgcaggccagttagctgaccaattggctgacccggtgttgtataaaacattcaccgatgccgcaaccagtattgctgatgcttataacaaccgtgagtcaggtaaagccattcgtgaaattatggcgctagctgatgtggctaatcgctatgttgatgaacaggctccatgggtggtcgctaaacaagaaggccgcgatgccgatctacacgctatctgctcgatggggatcaacctattccgtgtcctgatgacctatctgaaaccggtattaccctctctgacagagcgtaccgaggccttcctcaataccgagctaacttgggatagcattgaacaacctctgctgggccactctatcaccgctttcaaggcactgtttaatcgtattgatttagacaaagtaaacgaaatggtcgcctcgtctaaagaagatatggcacctgcaaccagggttacaggcccgttagccgatgatccaattcaggaaaccatcagttttgatgactttgccaaagttgatatgcgaattgcgttgattcaacaagccgaatttgttgaaggctcagataagttattaaaactaacacttgaacttggaggggagacccgccaggtattctcgggtatccgttcagcttaccctgacccaaaagccttggaaggccgcatgaccgtgatggtcgctaaccttgccccgagaaaaatgcgctttggggtttcagaaggcatggtgatggccgcaggccccggaggtagcgatatcttcctgcttagccctgacagtggtgcgcagccaggcatgcaagtgaagtga

SEQ ID NO: 42063 - DNA, 1086 bp, Yersinia pestis
atggctgggaacagtattgggcagtttttccgcgtcaccacttttggtgaatctcacggtatcgccctaggatgcattattgatggtgtaccaccgggcattccgattaccgaggctgatattcagttggatcttgaccgtcgccgtccggggacttctcgttataccactcagcgccgtgagctggatcaagttcgcattttatccggcgtatttgagggcgtcactacggggaccagtatcgggttaatgattgaaaatacggatcagcgttcgcaagattacagcgcaattaaagatgtgttccgccccggtcatgctgattatacctatgagcaaaaatacggtgtacgggattaccgtggtggtggccgctcttcagcccgcgaaaccgcgatgcgggtggcggcgggcgctattgctaaaaagtatttagcacaaaaatttggtgtacaggtgcgtggttatctggcgcaaatgggggatgttagctgtgatttgctcgattgggatttggtcgagcaaaatccattcttttgccccgatgccagcaaactggagccgctggatgccctaatgcgtgagctgaaaaaagccggtgactccattggtgccaaaatcaccgtcgtcgctgaaaatgtccccgtaggtttaggtgagccggtatttgatcgtttggatgcggatcttgctcatgcattgatgagtatcaacgcggtaaaaggggtggaaattggcgatggttttgctgtcgtcactaagcgtggcagtgaaaaccgtgatgaaattactccgcagggcttccaaagtaatcatgctggcggcattttaggggggattagcagcgggcagccggttgttgctcacattgcattaaaacccacctccagcattatggttccggggcaaactatcaatcggcaaggagaagcggttgaaatggtgacccgagggcgtcatgacccgtgtgtgggtatccgggcggtacctattgcagaagcgatgatggctatcgtacttatggatcacctactgcgccagcgcgcgcagtgcggcgatgtggcttcagacgttccgcgctggtag

SEQ ID NO: 42064 - DNA, 1857 bp, Yersinia pestis
atgagacgattactgacaatgttagttatcctgctaattgtgttagttgcaggtatgagcgcattagtgctgttggtgaatcctaatgattttcgcgcctatatggtcaaacaggtagagaaaaagagtggttaccacttgcagttggagggtgatttgcgttggcacgtctggccgcaactcagcattatcgctgggcgcatggcgctaaccgcacctggcgcactagaaccggtggtcagtgctgaaaatatgcggttggatgttaaactttggccgttactgtcacatcaactggatgttaaacaagtgatgttgaaaggggcggtgatccgtttgacccctgacagcgaggcccagcaacagatagatgcgccggtcgccccaattgcacctgcgggcagtacgccagtgagcgataaccgtggctggacgctagacatcaatagacttcaaatcgcggacagtttgcttatttggcaacgttctgacaacgaccaaattaatgtccgggatatcaatctcgaactcaagcaaggcgggcagcgtcaggtgcaggtcactcttgccagccgtgttaatcgcaatcagcgggacttaactttctcaatggtcattgatgccgatatgcatcaatatccccgacagttcagtgccaatatcagccagttcacttataaactggaaggggctgatattcctgcaggggggatcagtggtggaggggcgttggaagccagttatcagagtgatattcagcaattactacttaatcagttaaattttactgccaataataaccaattggcaggcagtgttaaggcgacctttggtgatgtgcctgactacgtggttaatttgacctctgataatctcaatcttgatgcgatctttggttggcagccgaagagttcaacagcaagtaccgacgaagccaaacagcctgtcacgacagcaccggttattgctattcagatagatgatgatgtagggcaaaatttacaagcattacgtgattttacggcgcaaacgacggttgtcgccaataatgtggtttatcgcaacattaacatcaaccagttgaatttacaggcaactaaccagcagggtgacttacaggtaactcgcctaaccggtaatgcgttggagggggacttctcactcgcgggggcattggatgttacgggcaaaaaagtgttggctacggtgaatccgctgataaaccatatggaattggggccagtattgcaggctgcaggtttaccgcaggtaatgacgggtaagttttccatgcaagcgcagttgtctggagatggtgtgaatctcgcagcatttaaacatcgctggcggggggaagcgcaagtcagtatgaataatgcccggttacagggcctaaatattcagcaattgattcaacaggctgtcacacgtagtaccaatgatgtcaaaggtcaggaacgctatgagcgatacactgaggttaaacaactgcaagcctctctggcgctgaaccgaggtgcagtgaaagtcagcggcctcaatgccagttcgtcgttaatttccgttaaaggcagcggggggcttaatctcccaactcagcaatgtgacatgaatctagctgtacgcgttatgcaaggttggaacgggcagagtagccttgtcaaaacattacaaaatacagatattccgttgcgtatttatggcccatggacccagctcaattatcaattgaatgttgatcaattgctgcgtagtgagttacagcagcgggccaagaaagcgttgggggagtgggctgaacgtaaccaacaaaatcgccgtgtggacgatctgaaaaagtcacttgataagttgtaa

SEQ ID NO: 42065 - DNA, 1578 bp, Yersinia pestis
atgaattcttcctttgaatctctgattgaacagtatcccttacccattgccgaacagttgcgccactgggcggcccgttatgcctcgcgaattgccgtcgttgatgcaaaggggtcgttaacctacagcgcgcttgatgcacaagttgacgaacttgccgcaggtctgtcatcactgggtttgcgttcgggggagcatgtaattgtgcagcttcccaacgacaacgcgtttgttaccctgctgttcgccttgttaagactgggcgttatccccgtgctggcgatgccctcgcaacgggcgctggatatcgacgcgctgattgagctggcgcaacccgtcgcttacgttattcacggggaaaaccacgcagagctggcccgacagatggcgcacaaacacgcctgcttgcgtcatgttctggtcgctggagagaccgtgagcgacgattttacgccgctcttctcccttcacggtgagcgacaggcatggccgcagcctgatgtttccgccaccgcgttgttgttgctctcaggcggcacaaccggcacgcccaaactcatcccgcgccgacatgccgactatagctataacttcagcgcttctgctgaactgtgcggcatcagccaacagagcgtgtatctcgccgtcctcccggtggcgcataactttccgctggcctgccccggtattctgggaacgcttgcctgcggcggaaaagtggtgctgaccgacagcgccagctgtgatgaggtgatgcctttaatcgcgcaggaaagagtgactcacgtcgccctggttccggcgctggcgcaattatgggtgcaggccagggagtgggaagacagcgacctttcgtcgctgcgcgtcattcaggcaggcggcgcccggctcgacccgacgcttgctgagcaggttatcgccacctttgactgtaccctgcaacaggttttcggtatggcggaaggcctgctctgttttacccgactggacgatccgcatgccaccattctccacagccaggggcgcccgttgtcccctctggatgaaatccgcatcgttgatcaagacgagaacgacgtcgcgccgggcgaaaccgggcaattgttaacgcgcggcccttataccatttcgggctattaccgcgcccctgcccacaacgcgcaggcctttaccgcgcaagggttttaccgcacaggcgacaatgtcaggctggatgaggtggggaacctgcacgttgagggacgcataaaagagcagatcaaccgcgccggagaaaaaatagccgcggctgaagtggaatcggcactgctgcgtttagcggaagtgcaagattgcgcggtggtcgccgcgccggacacgctgcttggcgagcggatttgcgcgtttatcatcgcgcagcaggtgccaactgactatcagcagttgcgtcaacaactgacccgtatggggctcagcgcgtggaaaattcctgaccaaatcgagtttctggaccactggccgctcaccgccgtcggcaagatagacaaaaaacgcctgacggctctcgccgtcgaccgttatcgccattctgcccaataa

SEQ ID NO: 42066 - DNA, 855 bp, Yersinia pestis
atggtgctgatgattgtcagcggccgttccggttcagggaagtctgttgctttgcgtgcattggaagatatgggcttttattgtgtcgataacttgcctgtggttctgttgccgcagttggcaagtacacttgccgataggaacatctccgccgccgtaagcatagatgtgcgcaatatgcctgaatctcctgaggtatttgaacatgccatgacccaactgccggacagcttttccccgcagttgctatttttggatgcagaccgtaataccctaattcgtcgctacagtgatacccgtcgcctgcacccactgtcggcgaagaacctatcgttagaaagcgcgattgatgaagagagtgacctgctagagcctctgcgctcgcgggctgacttgattatcgatacctcagaaatgtcagtgcacgagttggctgaaatgctgcgtacccgcctgctgggtaaacgtgagcgtgagttgaccatggtatttgagtcctttggctttaaacacggcattcccattgatgcagattatgtcttcgatgtccgtttccttcccaacccacactgggatcccaagctacgcccaatgaccggcctggataaacccgttatttccttccttgatcgccatacggaagtacataactttatttatcaaacacgcagctatttggaacagtggctgccaatgttggaaaccaataaccgcagttatttgacggtcgctattggttgtaccggcgggaaacaccgttcggtctatgttgctgaacaactggccgattatttccgcgctcgtggtaagaatgtccaatcacgccatcgtaccttggaaaaacgtaaacaatga

SEQ ID NO: 42067 - DNA, 918 bp, Yersinia pestis
atgaatgttttatttccattgtttgcggtgattatttggtcagtcaatgccgtggtgagtaaaatctccgccaccgccattgatccggcagcaatctccttctaccgctggttactggccctgctgacattatccccatttctgctgctcggtgtggtccgcaattggcaggcgatacgtgtctattggtggaaattaatgctactggggatgctgggcatggtgctgtaccaaagcctggcttactatgccgcccacagtgtcagcgcactgtttatggggatcctcagttcattaattccgctgttgacggtgcttatcagtattgtgttgttacgcgtggcaccaaccgttgggattgctctgggtagcctgctgtccttagggggattagtttggttgatcagtgcgggcaacccagttcaactgctgcaacatgggatcggtaaaggcgaattaatgatgcttggcgcgtcagcctcttatgcgctgtatggggtattaacaaagcgctgggccattcaactaccgaattggcaatccctttatatgcaaatcgtttttggtgtcgtgctgctgttacctggcttcctgatgaccccagacgtgcagctaacggcacagaatattcctttggttctctttgctggtattccagcctcaattcttgcgccttatttatggattcaaggcgtgatgcgactgggtgccaataccgcttctatctttatgaatctgacacccgtatttactgccattattgccgtcgtcttcttgcatgagcagttgcacagttatcacttgattggtggcggcattacccttgctggagtggtgctggcccaacgtctgcgcagcccattgcggcgcaatttagatcttgctggacatatcccaaacaacaaaaacagtagatag

SEQ ID NO: 42068 - DNA, 1128 bp, Yersinia pestis
gtgaaaattctggttgatgaaaatatgccgtacgctgaggagctgttccggcgtttaggtgatgtacaggctgtgccagggcgtcccattcctcgtgacgcgttggttgatgccgatgctctgatggtacgttcggtcaccaaagtgaacgaggcgctgctacacggtacctcaattggttttgttggcacggcgacggcgggtaccgaccatgtcgatgacacttggctgcgtcagcaggggatcggtttctctgcggcccccggttgtaacgccatcgccgtggttgaatatgttttctctgcgttgatgatgatggctgaacgggatggcttccagttgcgcgataaaaccgtgggcattatcggcgtcggaaatgtgggttcacggctgaatgctcgtttgcaagccttaggtgttcggaccttgttgtgcgaccccccgcgtgctgatcgtggtgataacgaagccttctggccgctggaaaaactggtacgtgaggctgacgttctgaccttccatactccgctgaataaaaccggagcctaccaaagtctgcatatggccgatgatgaactgctggccgccttaccggatggccgtattctgatcaacgcctgccggggtgcggtggtggataacgcagcactattacgggcgctggaaaaagggaaaaaactcagcgtggtattggacgtctgggagccagaaccggatctctctttaccgctgttggcccgtgtcgatattggcacaccgcatattgccggatatacgctagaaggcaaagcacggggtaccacacaggtttttgaggcgttcagtcagcatttggggcaaccacagtcggtcgaactggcctctttattgccagtgccagagtttagccatttacgtctaaatggtgagttggatgaaggcaaattaaaacgattgatgcacttagtgtatgatgtgcgccgcgatgacgcgccattgcgccatgtcgctggcctgccaggggagtttgaccgcctgcgcaagcattatcaggagcggcgtgaatggtcatcactgtgtgtacagtgcgatgatgctaccagtgctggactcttgcagcagctaggttttactactcaattgctgtga

SEQ ID NO: 42069 - DNA, 1011 bp, Yersinia pestis
atgtctgacggctggaatattgctctattaggggcaacgggcgcagtaggtgaagctttgctggagctgttaaatgagcgccagttcccagttggtgaattgtatcctttggcgagcgagcgcagtgccggtgctactgtacgttttaacggtaaaagtatactggttgagaatgtggctgaatttgactggtcccaggctcaactcgccttctttgtcgcaggccgtgaagcatcggcacaatatgcggaagaggctgggaatgccggttgtctggtgatcgacagtagcggcttgttcgctatggaacccgatattcccttggtggtgccgagcgtcaatcctcaggtgctggctgattaccgtaatcgtaatatcgtggcggtagccgatagcctgaccagccagttgctgacggcgattaaaccgctgacagaacaggcggggctgtctcgcctgcatgtgactaacctgatttcagcctcagcacatggcaaagcggcggtggacgatctcgctgggcaaagtgccaagctgctcaatggcattcctgcggaaccgggtatcttccctaagcaattggcgtttaacgttttaccgctgctggccgatgaagagggcagtgtgagcgaagagcgccgtctggttgatcaggtgcgtaaagtattacaggacgaaggcttgccgatcaccgtaagctgcattcagtcaccggtattttatggccatgcgcaagtggttcatctggaggcattgcgcccgatcgctgccgaagaagctcgtagcgaactggaaaattgtgacgatatccaattgtccgaagaagatgattatccaacccaggtcagcgacgcctccggcagcgatgccctgagtattggttgcgttcgcaacgattatggtattcctgaagtgctgcaattctggtcggtggctgacaacattcgttttggtggcgcattgatggcgattcaaacggcagagcgcctgttacaggagcaactatactga

SEQ ID NO: 42070 - DNA, 1698 bp, Yersinia pestis
atgggcattagccaaacagaactgatcttttcccttttacaacagatgtgtgtgtatttggttattgcctatctgctgagtaaaacaccgctttttatccccttgatgcaagttactatcaggttgccccataaactggtgtgctatctcaccttttccatgttttgcattatgggcacctactttggtcttaacattgatgattctatcgcgaatactcgtgctatcggcgcagtcttgggtggaatgctaggggggccatcggtcgggtttctggtagggctaaccggaggcctgcatcgttattcaatgggggggatgaccgcaaccgcctgtatgttatcaaccattgctgaagggttattgggcggccttctccacctttatctgacacgtaaaaaccgcctcgatttattgtttcagccactggtggtcgcgggcattacactggtagccgaagtgctacaaatgatgattattctggccgtcgcccgccccttcaatgaagcggtcgaattggttgaaaatattgccttgccgatgatgatcaccaataccattggtgccgccatgtttatgcgtatcttattagaccgccgggccattttcgaaaaatacaccacggcattttctgccaaggcgctacaaattgctgcacgggcggaggggctactgcgccatggctttgaccagcagaacagtatgcgggtggcgcgtatcttgtatgaggagttgggtgtgggcgcagtagccattactgatcgcgaaaaattactggcctttatcggtagcggtgccgaccaccatcaggtgggcagtgctattacctccagccatacccaccgcgcgattgaactcaatcaggtggtgtatgccgacggcaatgccgtgccttatacctgctcaatttcacccacctgtaagctgggttcaacactggttatccctttgcgaggtgaagagcaccgggtgatcggcagtatcaaattgtatgagccaaaaagtaaattattctccagcattaaccgcaccttaggagagggtattgcgcacttattgtcagcacagattttggcgggagaattcgaacaacaaaaacaattactggcgcaatctgaaatcaaactgctccatgcacaggtcaacccacatttcttgtttaatgcgctcaataccctatcagtggtgatccgccgtaatccagatcatgcccgcaatttggtgctttctttatcaacctttttccgtaaaaacctaaaacgcagccatgacgtggtcacgttaagtgatgagattgaacatgtgaatgcgtatcttgaaatagaaaaggcacgctttgctgatcgtctgaccgtcacggtttcactaccgaatgaactgatggaggcgcacttacccgcgttctccctgcaacccgtggtagaaaatgcaatcaaacatggtatctcacagatgttcagtaacggacgggtcacgttgcgcggtaaattggatgacaacacgttggtattggaagtcgaagataacgccggtttatatcagccgcagccggatggcgatggtctgggaatgagtttggttgatcggcggattaaagcgcgctatggcaaggaatatggcatcaccgtcgtcagtaacgcggaagtatttacccgtattattattaagttaccgtttattaccgtgagcgagcagtaa

SEQ ID NO: 42071 - DNA, 204 bp, Yersinia pestis
atgaaacaccctttttcaacccgcctagcggcggttcaacattacctttcaggaaaggccactctgcgggaaaccgcacgtcaattcagtgttggcaaatcccctcttacgcgttggatccgagcttttcgccgtcaaggtgaggctggactggagcaccatctttccagaacttatactccagaattcaggctttgcgttgtc

SEQ ID NO: 42072 - DNA, 915 bp, Yersinia pestis
atgagctggattgaacgaattcttaacaaaagcaatatcacacaaacccgtaaagcgagtattcctgaaggggtatggacaaaatgtgatagctgcggtcaggtactttatcgtgctgaactggagcgtaatctggaagtgtgtcctaagtgtgatcaccatatgcgtatgtcagcccgtgcacggttgcatatgctgttggatgcaggcagtgaagttgaattgggtagcgaactggagccgaaggacatcctgaaatttagggattccaaaaagtataaagatcgtatttcagccgcacaaaaagatactggcgagaaagatgctctggttgccatgaaagggacgctgcaagggatgcctatcgttgccgcctcgtttgaatttgcctttatgggcggttcaatggcgtcggtggttggtgctcgctttgtacgtgccgttgaacaggctctggaagataattgcccattggtctgtttctcctccagtggtggtgcacgtatgcaggaagcgttgatgtcattgatgcagatggcaaagaccagtgcagcgctggctaaaatgcaagagcgcggtttaccctacatttctgtgctgactgaccctaccatgggcggtgtttctgctagcctggccatgttaggtgatatcaatatcgctgagccaaaagcgttaatcggctttgctggcccacgtgttattgagcaaaccgtgcgcgaaaaactgccgcctggcttccagcgcagtgagtttctgattgaaaaaggcgcgattgatatgatcgttcgccgtccagttatgcggcagactttggcgagcattttgtctaaattgactcatcagccgcagccaagcgtggttgagagcaaagcagataccgtggcccagcctgaaaatcaggcagatgtctga

SEQ ID NO: 42073 - DNA, 9042 bp, Yersinia pestis
atgttaaattattttagggctatcctcatttcttggaaatggaagttgtctcatcacacttctcgtccccatgatgtgaaggaaaaaggacaccccagaaaaataaaagttgtcgcatggattacacttttctttcaatttgcattcccactaagtctctcttttacgcccgcaattgctgccgcaaacacgactaattcagcaccaacctcagtcataacgccagttaatgcgtctattttgcctcctgctgcacgtgcgactgaaccttatacgctggggccgggtgactctattcaatcgatagcaaaaaaatataatattacggttgatgaactgaaaaaactgaatgcttatcgtaccttttccaaacctttcgcatcactgacaacaggggatgagattgaagttccccgcaaagagtcatctttctttagcaataatcctaatgaaaataataaaaaagatgttgatgatttgttagccagaaatgctatgggagccggtaagttactttctaatgacaatacctctgatgccgcaagtaatatggcgcgttcagcagtgacaaatgaaattaacgcatcttctcagcagtggttgaaccaatttggtactgcgcgggtacaattgaatgtagatagcgattttaagctagataacagcgcgctggacctattggtaccactcaaagacagtgaaagttcactcctgtttactcaacttggtgttcgcaataaagacagccgcaacacagtaaatattggtgccggaatacgtcagtaccaaggtgactggatgtacggtgctaataccttctttgacaatgatcttactggaaaaaaccggcgtgtgggggtgggtgctgaagttgcgactgactaccttaaattctccgctaacacctattttggtttgaccggctggcatcagtctcgtgacttcagcagttacgatgagcgtccggctgatggcttcgatatccgtaccgaggcttatttacccgcctatccacaattaggcggtaaattaatgtatgaaaaataccgtggtgatgaagtcgccttatttggtaaggatgatcgccagaaagacccacatgctgtgacgttgggggttaattacaccccggttcctttggtcactattggtgcagaacaccgtgaggggaaaggtaacaacaacaataccagcgttaatgtgcaactgaattatcgcatggggcaaccgtggaatgatcagattgatcagtcagcggtggcggctaaccggacactggcgggcagccgttatgacctggttgaacgtaataataatattgttctggattataaaaagcaggaattaatacatctggttctgcctgacagaatcagtggttcgggtggcggtgccattacattgaccgcacaggtacgtgcaaaatatggctttagccgtattgaatgggatgcgacaccgttagaaaatgcgggcggcagtacctccccactcactcagagttcattgtcggttaccttacctttctatcaacatattctcagaacaagcaatacgcatacaataagtgcggttgcctatgatgcccaagggaacgcctcaaatcgtgcggtgacatctattgaagtcactcgtccagagaccatggtgatcagccatctggcgacaacgattgataatgcgacggctaacggtattgcgactaacacggtacaagccacagtaaccgatggcgacggccaaccgattatcgggcagctcatcaactttgcggttaatactcaggcaacattaagtacgacagaggcaagaacaggagctaatggtactgccagtaccacactgacgcataccgtctcgggtgtaagtagggttagcgttacgttgggttctagtagccgaagtgtggatacgacgtttgtggctgatgaaagcacggcggagatcaccgccgcaaatctgacagtgacaacaaatgactcagtggctaatggcagtgacactaacgttgttcgggcgaaggttaccgatgcctatactaatgctgttgctaatcaatccgtgatattcagtgccagtaatggtgcaactgtcatcgatcaaacagtgataaccaatgccgaggggatcgccgactccacgctgaccaataccaccgcaggggtttcggtagtgactgcaacgttgggaggccaatctcaacaggttgatacgacatttaaacctgggtcgacagcggcgatcagtttggtgaaattggctgaccgggcggttgccgatggcatcgaccagaatgaaatccaagtcgtgttacgggatgggacaggcaatgccgtgccaaatgtgccgatgagtattcaggcagataatggcgcgatagtggttgcttcaacaccgaataccggtgtagatggcacgattaatgccacattcacgaaccttcgggcaggagaatccgttgttagcgtgacgtctcctgcattggtgggtatgacgatgacaatgacgttctctgctgatccgaggacggcggttgtttctacgttggccgcaattgataacaatgccaaagcggatggaactgacaccaacgtggtgcgtgcgtgggtcgttgatgcaaatggtaattcagtaccgggtgtttctgtaacatttgatgctgggaatggtgctgttttggcacagaatccagtggtgacagaccgtaatggctatgcagaaaatacactcaccaacctggctataggtaccactacagtcaaagccacgacggtaaccgaccctgttggtcagaccgtcaatacccactttgtggccggtgcagtagataccatcaccctgacggtgccggttaacggcgcggtggctaatggtgtgaatactaacagcgtgcaggcggtggtcagcgacagcgggggcaacccggttaccggtgcgacggtagtcttcagctccaccaatgccacagcgcaagtcactacggtgatcggcaccaccggtgtggacgggatcgccacggcgaccctgaccaataccgtggccgggaccagcaatgtggtcgccaccattgatacggttaacgccaatatcgacaccgcctttgtggcgggtgcagttgcgaccatcaccctgactgcgccagttaatggcgcggtggcggatggtgcagacaccaatcaggtggacgcattggtagaggatgctaacggcaacccgatcaccggtgctgcggtggtctttagttcggccaacggggcaactattctttcctcgaccatgaacaccggtgtaaatggagtggcatcaacgctcctgactcataccgtggccgggaccagcaatgtggtcgccaccgttgatacggttaacgccaatattgacacgacctttgtggccggtgcggtcgcgaccatcacactgacgacgccggttaacggcgcggtggcggatggggcaaacagcaacagcgtgcaggcagtggtcagcgacagcgacggcaatccggttaccggtgcggctgtagtcttcagttctgccaacgccacagcccaaattaccacagtgatcggcaccaccggtgcggacgggatcgccacggcgaccctgaccaataccgtggccgggaccagcaatgtggtcgccaccattgatacggttaacgccaatatcgacaccgcctttgtggcgggtgcagttgcgaccatcaccctgactgcgccagttaatggcgcggtggcggatggtgcagacaccaatcaggtggacgcattggtacaggatgctaatggcaatgcgatcaccggtgccgccgtggtctttagttcagccaatggagcagatattattgccccgaccatgaacaccggtgtaaatggagtagcatcaacactcttgactcataccgtggccgggaccagtaacgtagtggccaccattgatacgatcagcgccaatatcgacactgcctttgtggcgggtgcagttgcgaccatcaccctgactgcgccagttaatggcgcggtggcggatggtgcagacaccaatcaggtggacgcattggtagaggatgctaacggcaacccgatcaccggtgctgcggtggtctttagttcggccaacggggcaactattctttcctcgaccatgaacaccggtgtaaatggcgtggcatcaacgttcctgacccataccgtggccgggaccagcaatgtggtcgccaccataggcagcgttactgagaatatcgacaccgcctttgtggccggtgcagttgcgaccattacgctgactgcgccagttaatggcgcggtggcggatggagtgaacactaacagcgtgcaggcggtggtcagcgacagcgacggcaatgcggtcaccggtgcaaccgtagtctttagctctgccaacgccacagcacaaattaccacagtgatcggcaccaccggtgcggacgggatcgccacagcgaccctgaccaataccgtggcggggaccagcaatgtggtcgccaccattgatacggttaacgccaatatcgacacgacctttgtggccggtgagctggagaatatcgtcgtcagtattattaacaataatgcactggcaaatggcgcagataccaatattgtcgaagcctttgtgactgaccgtttcggtaatggcgtggcgaatcaaagcctaatatttggcaccaatggggcgtccattgtgggttcatcaacagtgacgactaatctcgatggtcgtgttagagcgagtgctacgcatactgtggcggggagcagtaatacggtgattgcaataagtggcgctcatcaaggatatgccagagtaacctttgttgccgatgtttcgacagcccagcttaagctaacgtcgttcttggataaccagcttgcgaatggtaaagccggtaacattgcacaagcgttggttaccgatgctcatgacaacctattagctaatcaatccgttagctttgctctcgataacggtgcagtcattgagtctcagggcgatgccagtagcgcctctggaattgtcttgatgagattcaacaatacgcttgcaggtatgacaacggtgacggcaacgctcgattcaaccgggcaaactgaaaccctcgagacgcattttgtggcgggaaaagcggcatcgattgaaatgacgatgacgaaagataatgccgtggctaacaatatcgataccaacgaagtccaggtgttagtgacggatgtagacggtaacgcgatcaacggcgcggtggtcaacctcacttctaacagtggcatgaacattacaccaaactcggtaacgacaggcagcgatggtacggcgacggcgaccttgacgcataccctggcagggagcctcccgatcaatgcgcggatcgatcaggtgagtaaaacgattaatgccacctttatcgctgatgcttcgactgcgcagattattgcgggtgacatgttcatcatcgttaacgatcaagttgctaatgggcaggcggttaacgcggttcaggcaagagtcactgatagctatggtaaccctattaaggatcaaacggttgaattcgtgctgagtaataatggcaccattcaatatgagctcgatgtgacatcagttgaaggtggcgttatggtgacattcactaataccctggcgggtattaccaatgtgaccgcgaccgtggtatccagtggcagcagccgcaatattgatactacctttattgccgatgtgacgacggcacacattgctgcaagtgatttgatggttattgttgatgacgcggtcgcggataacctggataaaaatgaggtccatgcacgggtcaccgatgcgaagggcaacgtgttatcgggtcagacggttatcttcacctctggcaacggtgctgctatcacgacagtcaatggtatcagtgatggcgatggtctgaccaaggccaccttaacccataccttggcgggtaccagtgtggtgactgcaagggtcggtaaccgggtgcagagcaaagatacgacctttattgcggatagaaccaccgcaactattagggcatcagacctgaccattacccggaacaatgcgctagctgatggggttgctactaatgccgctcgtgtgattgttactgatgccaatgggaacccggtgccgagtatgtttgtgggttatacctcggataatggcgcactactgacaccaacatcagggatgacggatagcagtgggacgtttagcacaacctttacacatacgacagcgggtatcagtaaggtgactgcggcgatcgtaacgatggggataagccaaactaaagacgccgtctttattgcagacagatccactgcccatgtgtcggagttgatcgttgtgaaaaatgattcgcttgccaacaatagcgatagaaatatcgtgcaggcgcacattaaggatgctcatggcaacgtggttacgggaatgaatgtgaactttagtgccacggagaatgtgacgttgaccgcaaacactgtcaccacgaattctcaagggtatgcagaaaataccttaaggcataacgcgccggttaccagtgcggtgactgcaacggtcgctactgacttggtgggtctcaccgaggatgtccggtttgttgctggtgccggtgcccgaattgagctattcaggttgaatgatggggcggtggccgatggcatccaaactaacagagttgaagccagggtctatgatgtctctgataacctggtgccgaatagtaacgtggtgttcagcgcagataatggtggccaattagtgcagaacgatgtgcagactgatgccttgggtagtgcttatgtcacggttagcaatattaatactggcgtgactaaggtcactgtaactgcagatggtgtgtcggcctcaaccacgacgacctttatcgccgatagggatacggccacattggtcacggatcgctttttgatcactcatgataatgcggtagcgaatggggttgtagaaaatagagtgttattacaccttgtggatgccaatgataattcggtttctggggtcgaagttaactttagtgccactaatggtgcgtcaatcaatgcatcagctatcactgatataaatgggtttgctatcggtgtactgacaaacactctctcagggccaagtgacgttacggtaacgctggtgacgccaggggggactgagagcctgacggttacgcctcaatttattgccgatataaacaccgccaatattgccactggtgactttgtcattatcgatgatggcgccgtggccaatagcgtggacgccaatgaagtccgcgctagggtgactgacaatcaggggaatgctattgctggctacagcgttgttttctcatcacaaaatggcgcgaccatcaccaccagtggtattactggcgtcgatgggtgggctagcgcgaagctgacccatattaaagctggagagagcgggatcttagcgcgactctcgcggcctatggcgacggtgcacacgctgatgccgtactttattgcggatgtgagcacggcaacgttacaactttttaatttcaaccctattccgataattgccgatggggtaatgcaattcttcgtgctaggaagggtttttgatgccaaccagaacccagtaggggggcagcaagtggccttcagtgcaacaaatgaggtgaccctaactgagagtaatggctcgatcagtactccggaaggaagtgtgctcttatctgtcacgagtactcaggctggggttcaccctattacggggaccttggtatcgaataactatacggacacgtttggtgccgcatttatcgcgaacaaaaataccgctcaattgtccaccttgatggtcgttgataacaatgcactggcagatggtgttacacgtaaccaggtccgggcgcatgttgtcgatagtacgggcaattcggtggccgatatggccgtgacatttaccgccaaccgtggtgcgcaactgagtaaggtaacggtactgaccgataataacggggatgccgtcaatacgctgaccaacagtttggttggcgtgacggttgtgacggccaaactgggtacggcaggaacgcctttgactgttgacacggtctttactgccgggccgctggcgacactgacactggtgacaacggtcaataatgcctttgcggataacagtgctaccaatacggtacaggcgacgcttaaagatgtcagcgggaacccaatcgttggggaagtggtcgcctttgcggcaagcaatggggcgacgatcaccgccaccgatggtggggtaagcaatgctaacggtattgtcttggctaccttaactaatggaacagccggggttagcacggttacggcgacgatagagaccttgacggagacaacagacaccacctttattgctatgaagaatctggatgtgaccgtgaatggtacaacgtttaacggggatgccgggttcccaaccaccggttttgtgggggccaccttcaaggtcaattcgggtggagataatagcctctatgactggagcagcagtgccccagcgctggtatcggtcagcggtgatggtgtggtgacatttaatgcggtattcccgacgggtacaccgacaatcactatatctgccaccccgaaaggcggcggtagcccactctcgtacagttttagagtcaaccagtggtttatcaataataatggcgctacgttaaatcgcgctgatgcaataacgcattgtgaaaatgtgggctatacgatgccaacgtctacgcaggtcaccaatgcggcgacctggatgtcaggcaagcgggctgttggtaacttgtggtcagaatggggtgacttcagtgcctatactgcgccgggctgggtgcctgctgagttcttctggctcagtaataatcatgatgccagtacggctctggctattggtttgtcaacgggtacgctgacgacgatgggtgattttatggccataactcatgtgatgtgtacccgcccaatctag

SEQ ID NO: 42074 - DNA, 585 bp, Yersinia pestis
atgattgcagcaactgtgttgctatttttaattatggatccattgggaaatttgccgatttttatgtcggtactcaagcatttggagcctaaacggcgacgggtggttttgatccgtgaattactgattgccttaattttgatgctgatttttctgttcgcaggcgagaagattctgttattcctgaatctgcgcaccgaaaccgtctcaatatccggcggtatcattttgttcttaatcgctattaggatgattttcccttcctccgagagcaacgttactgggctatctgctggggaagagccgtttttggtgccactggcgatccctctggtggccggcccctctattttggccaccctgatgttgctgtctcatcaatatcctaatcagctcagccacttggtgctggcattgatgattgcctggggtttatcggcagctattttactgatgtcgaatctgttcctgcgtttgttggggagtaaaggtgtcagtgcgctggagcggttgatggggttaattttggtgatgctatcgacgcagatgtttttagatggtgtgagggcgtatttggcgatttga

SEQ ID NO: 42075 - DNA, 1317 bp, Yersinia pestis
atgccattaatcatcgtcgcagttggcgttgccatgctgctattactgatgatccgttacaaacttaacggatttatctcgctgatactggtcgcgttagcggtaggtatcatgcaagggatgccaatcgataaagttgtcggctcgatcaaagcgggtgtcggcggaacattaggtagcctggccttgattatgggcttcggggccatgctcggtaaattgctggccgattgtggcggcgctcaacgtatcgcgaccaccttgattgagaaatttggtcaaaaacatattcaatgggcggtggtactgaccggctttactgtgggttttgccctgttttatgaagtgggttttgtgctgttattgccactggtattcagcattgcggcctctgcccgcatccccttgctatatgtgggtgttcccatggcggcggcgctttctgtcactcatggttttctgccacctcacccaggcccgaccgccattgccaccattttcaacgccgatatgggcaaaacgctgctgtacggcacgttgctggcaatcccaaccgtgattttggcaggcccggtgtacgcccgctttctaaaaggaattgataagcctgttcctgaagggttgtataacccgaaaatctttaccgataaagagatgccaagctttggggtcagtgtcagtacggcgctggtaccggttattttgatggcattgcgggccgtagcagagatgattttgcctaaaggccattcgctgctcccctatgccgagttctttggtgatcctgtaattgctacgctgattgccgtgttaattgcaattttcacctttggtctaaaccggggccgctcagtggaatcggtcatggagaccctgtctgattccatcaagatcatcgcaatgatgctgttagttattggagggggcggtgctttcaagcaggttttagtcgatagcggcatagagcaatatattgctggcatgatgggcaatagcggggcatcacctattctgatggcatggtccatcgccgccttactgcgtatcgccctgggttctgcgacggtggcagcgatcaccgctgggggcattgtcgcaccgttaatcgcgaccaccggtgccagccctgagttgatggtcattgccgttggttccggtagcgtgatcttctctcacgtgaatgaccctggcttctggctattcaaggagtatttcaacctaaccattatggaaaccattaaatcgtggtcagtactggaaaccattatttcagtctgcgggttgatcggctgtttgttgctgtctctggttatttag

SEQ ID NO: 42076 - DNA, 789 bp, Yersinia pestis
atgtttatgaataaaaagctgcgagttcttcctttggtattcgcattcgctgcggctagtagtgcttttgccgccattccaaaagagatcaaaattggcacagatccgacttacgccccttttgaatcgaaaaactcgagtggtgaattagtgggttttgatatcgatatcgcgaaggagttatgcaaacgtatagataccaaatgtacttttgttgaaagtgactttgatgcgctaatcccgtcgctgaaagcgaaaaaagtcgatgccattatctcctctctctccattactgaaaaacgccaaaaagagattgccttcaccgataaactctttgccgccaattcccgtttaattgctgctaaaggtagcactattgagccgacactggtggcattaaaaggtaagcgcgtgggggtgttacaagggtcgactcaggaagcttttgccaatgctgagtggcagccaaaaggcattgatgttgttgcttatcaaaatcaggatctgatttatgcagatctggcctctggccgtattgatgcggctttccaggatgaagtggccgccagtgaaggtttcctaaaacaacctgtgggtaaagattatatctttgccggtccatcagtaaaaaatgatcaattcttcggtgtagggactggcatggggttgcgcaaagccgatgttgagctgaaagaggcgttaaataaagcgtttgctgaaatgcgtaatgacggcacctacgatcaatttgccaaaaaatacttcgattttgatgtttacggtgattaa

SEQ ID NO: 42077 - DNA, 687 bp, Yersinia pestis
atgctggatggatattccaaactgatatttgaaggtgcgctggtgacactggagttagcattgttctcggtgctgctgtcagtggttatcggcttgatgggggccggtggcaagttatcgtcaaaccggttggtatcgggcttgtttgagtgctacaccacactgatccgtggcgtacctgatttggttttgatgctgcttatcttctacggtttgcagattaccctcaatagcattaccgagtcccttggttttgtacaaattgatattgaccctctctctgccggggttatcacccttggctttatctatggcgcttacttcactgaaacgtttcgtggcgcttatatggcggtctctaaagggcaaattgaggccgcgacggcctttggttttacctccagccagatctttcgtcgcattatgttcccagccatgatgcgctatgcgttgccgggcatcggtaataattggcaagtgatcctgaaagcgacggcgctggtgtcaattttaggcttgaatgacgtggtcaaagccacccaattggcgggaaaaggcacttatcagccgtttttctttgctttggttgctggtgcgatttatctgttctttaccactctctctaacggtgtcttgtggtggctggaaaggcgctattcccatggggtgaagagggctgagctatga

SEQ ID NO: 42078 - DNA, 699 bp, Yersinia pestis
atgggtcagaaagtacatcctaatggtattcgactaggtattgtcaaagcttggaactctacctggtacgcaaataccaaagaattcgctgacaacctggacagcgactttaaagttcgccaattcctgactaaggaattagcgaaagcttccgtttctcgcatcgttatcgagcgtccagcgaagagcatccgtgtgactattcacactgctcgccctggcatcgttatcggcaagaaaggtgaagatgtcgaaaaactgcgtaaggtcgtagcggatatcgctggcgttcctgcacagattaacatcgccgaagtccgtaaaccggaactggacgcaaaattggttgctgacagtatcacttcacagctggaacgtcgtgttatgttccgtcgtgctatgaagcgtgctgtacagaacgcaatgcgtcttggcgctaaaggtatcaaagttgaagtaagcggccgccttggcggtgctgaaatcgcgcgtaccgaatggtaccgtgaaggtcgtgttccgttgcatacactgcgtgcggatatcgattacaacacatctgaagcgcacaccacttatggtgtaatcggcgttaaggtatggatcttcaaaggtgagatcttgggtggtatggctgctgttgaacaaccggaaccggctgctcaacctaaaaagcagcagcgtaaaggccgcaagtaa

SEQ ID NO: 42079 - DNA, 909 bp, Yersinia pestis
atgcgtattttaatcaccggtgctacagggttgatcgggcgcagcctgaccccctttcttctgtcgcaaggccaccaaataacggccctgacccgctcactgcagcgggccaataacctgctcggtcagcaagtgacctactggcccactctggatgatcaagaggatctcaacagttttgatgccgtgatcaatctggccggagagcctatcgccgagaaacgctggacctcgcagcaaaaagagatcctctgccaaagccgctggcaaataactgaacgcttagccacgctgatcaatgccagcagccagccaccaaccgtttttatttccggttctgcggttggattttatggcgaccaagggcaggcattagtcaccgaagaagagcctccccacgacgagtttacccatcaattatgtgagcgttgggaaaatctggcactggcggcggagagtagccatacccgagtctgcttgctgcgtaccggcgtcgtattagcgccagaaggcggcgcgctagccaagatgcttcctctattccgccttggattaggtggccccatgggggatggtcgccaatatctgccttggatacatctcgaggatatggtgcagggtatttattatctgctaaccacccataatctgcgcggcccgtttaatatggttgccccctatccggtccacaatgagcaatttacggcgacgctggccgatgttttggatcgcccagcagccatccgcacacctgcagcggccattcgtctattaatgggtgaatccgcaatattggtgctcggtgggcaacgggcgttaccgaaacgattagaagaggcggggtttggctttcgctattatgaattggaagatgcactgcgtgatgtactgaaaaaaccaaaggaataa

SEQ ID NO: 42080 - DNA, 411 bp, Yersinia pestis
atgttacaaccaaagcgtacaaaattccgtaagatgcacaaaggccgtaaccgtggccttgcgcaaggtacggatgttagcttcggtgagttcggcctgaaagcttgtggccgttgccgcctgacggctcgtcaaatcgaagcagcccgtcgtgcgatgacacgtgcaattaagcgtcaaggtaaggtctggatccgtgtattcccggacaaaccgatcactgagaagccgctcgaagtgcgtatgggtaaaggtaagggtaacgtggagtattgggttgccctgatccagccaggaaaagtattgtttgaaatggctggtgttcctgaagaaactgcacgtgaagcatttaagcttgctgcagcgaaactgcctgtcggaaccacctttgtaactaagacggtgatgtaa

SEQ ID NO: 42081 - DNA, 531 bp, Yersinia pestis
atgaaaaaaactttagtgacgttgatgctatttatcctgccgggtatagcttttgcggaaacctcgaacaataccataaagttccagggagaagtcgcagaacagacctgtatggtggatatcaatggtaccgccaacaccccggtggttctgctgccgactgtctcgaccagtaaccttaatcaagtcaactcggtggcgggaaagaccaactttacgatcaatctaacaggctgcaatattgcgattcaagatacccaaatcagctctgtttttcaggggatgaatgtcacgtctggcggaaacctgggcaatattggcacagcaagaaatgttgccattcaattaattgatccccgtggcaccccgattcgtatgtctggtggcagtgtggaagttccgggaattaccttggcgactggcgcaacctcagcatcacaggatctgtcggcacaatatataacggaagaaggccaggcaaccgcaggcagtgttattgcctctgcacagtatgcgatcacctacccctaa

SEQ ID NO: 42082 - DNA, 255 bp, Yersinia pestis
atgactgaccaaatccgtactctgcaaggtcgcgtagttagtgacaaaatggagaaatccatggttgttgctatcgaacgtgtggtgaagcaccctatttacgggaaattcatccgtcgtacgacgaagttgcatgtacatgacgagaacaatgaatgtggtatcggcgacgtggtagaaatccgcgaatgccgtccactgtcaaagactaagtcttggacgcttgttcgcgttgtagagaaagcgattctgtaa

SEQ ID NO: 42083 - DNA, 372 bp, Yersinia pestis
atgatccaagaacagactatgctgaacgtggccgacaactccggtgcacgtcgcgtaatgtgtatcaaggttctaggtggctcgcaccgtcgctacgcaggcatcggcgacatcatcaagatcaccatcaaggaagcaattcctcgtggcaaggtgaagaaaggcgatgttctgaaggcggtagtggtgcgcaccaagaagggtgtacgtcgcccggacggttctgtcattcgcttcgatggtaacgcttgtgttattttaaataataacagcgagcagccaatcggcacgcgtatttttgggccggtaactcgtgaactgcgtaatgagaagttcatgaaaattatctctctggcaccagaagtactctaa

SEQ ID NO: 42084 - DNA, 315 bp, Yersinia pestis
atggcagcgaaaatccgtcgtgatgacgaagttatcgtgctaaccgggaaagacaaaggtaagcgcggtaaagtaaagaatgtcctgtcttctggcaaggtcatcgttgaaggtatcaacctggttaagaaacaccagaagccggttccggctctgaaccaaccaggtggcattgttgaaaaagaagctgcaattcaagtttccaaccttgcgctgttcaacgcgacaaccggtaaggctgaccgtgtaggctttagatttgaagacggcaaaaaagttcgtttcttcaaatcgactagcgaaactatcaagtaa

SEQ ID NO: 42085 - DNA, 540 bp, Yersinia pestis
atggcgaaactgcatgattactacaaagacgaggtggtcaaacaactgatgtctcagtttggctacgactctgtcatgcaagtccctcgggtcgagaagatcaccctgaatatgggtgttggtgaagcgatcgctgacaagaaactgctggataatgcagcagctgacttggcagcaatctccggtcaaaagccgtttatcaccaaagcacgcaaatctgttgcaggcttcaaaatccgtcagggctatccgatcggctgtaaagtaaccctgcgtggcgaacgcatgtgggaattctttgagcgactgattaccattgctgtacctcgtatccgtgacttccgtggcttgtccgctaagtcattcgatggtcgtggtaactacagcatgggagtgcgcgagcagatcatcttcccggaaatcgactacgataaagtcgatcgtgtacgtggtttggatattaccattaccactactgcgaaatccgatgatgaaggccgtgcattgttggctgcttttaaattcccattccgcaagtaa

SEQ ID NO: 42086 - DNA, 306 bp, Yersinia pestis
atggctaagcaatcaatgaaagcacgcgaagttgttcgcgtgaaactagctaacaaataccgcgctaaacgcgaggaattaaaagctattatctctggtgtgaactcatccgacgaagatcgttgggatgctgttctgaagctgcagtctctgccgcgtgattccagcccgtcccgtcagcgtaaccgctgcaaccaaactggtcgtcctcatggtttcctgcggaagttcgggttgagccgtattaaagtccgtgaaaccgctatgcgcggtgaaatcccgggccttaagaaggctagctggtaa

SEQ ID NO: 42087 - DNA, 393 bp, Yersinia pestis
atgagcatgcaagatccgatcgcggatatgctgacccgtatccgtaacggtcaagccgcaaacaaagttgcggtcaccatgccctcctccaagctgaaagtggcaattgccaacgttctgaaggaagaaggctttattgaagattttaaaatcgaaggcgacaccaagcctgttctggaattagcacttaagtacttccagggtaaggcagtggtagaaagcattcaacgtatcagccgtccaggtctgcgcatctataagaaaaaagatgagctgccaaaagttatggccggtttgggtatcgctgttatttctacctctaaaggtgttatgaccgatcgtgcagctcgccaagctggtcttggtggcgagattatctgctacgtagcttaa

SEQ ID NO: 42088 - DNA, 534 bp, Yersinia pestis
atgtctcgtgttgcaaaagcacccgtcgtcattcctgccggcgtagaggtaaaactcaacggtcaggttatttcgattaagggtaagaacggcgagctgactcgtaccgtccatagtgctgttgaagttaagcaagaagaaaatacattgactttcgctccacgcgaaggcgctgtagacggttgggcccaagcgggtaccactcgtgcactacttaactcaatggtcattggtgttaccgaaggcttcactaagaagcttcaactggtaggcgtaggctaccgtgccgcagttaaaggcaacgtggtgaatttagctttaggcttctctcacccagttgaccatgaattgccggctggcatcactgccgagtgcccgacccaaactgaaatcgtgctgaaaggcgctgataagcaggtgattggtcaggttgcagcagatttgcgtgcctaccgtcgtcctgagccttataaaggcaagggtgtccgttacgccgacgaagtcgtgcgtaccaaagaggctaagaagaagtaa

SEQ ID NO: 42089 - DNA, 354 bp, Yersinia pestis
atggataagaaagcagctcgtatccgtcgtgcgacccgcgcacgccgcaagctcaaagaactgggtgcgactcgcctggtggtacatcgtaccccacgccatatttacgcgcaggttatcgcaccaaacggttctgaaattttggtagcagcttctactgtagaaaaagctatcaatgagcaattgaagtacgccggcaacaaagatgccgcagcagctgtaggcaaaactattgctgagcgcgcgttggaaaaagggatcacgaaagtatcctttgaccgttccggtttccaatatcatggtcgagtccaggcactggcagatgctgcccgtgaagctggccttcagttctaa

SEQ ID NO: 42090 - DNA, 1257 bp, Yersinia pestis
atggatttctttcgtttcttaatgagtgatgtgctttctgaacccgcaatactggtcggtctgatcgctttgattggccttattgcccagaaaaaaccggtgactgaatgtattaaaggcaccgtcaaaaccattatgggttttgtgattttgggtgcaggcgctggcctggtggtttcatctctgggtgattttgccaatatcttccaacaggctttcggtattcagggcgtagtgccaaataacgaagctattgtttctgtggcacagaagagtttcggcaaagaaatggcgatgattatgttcttcgctatggtgatcaatatcctgattgcccgttttacgccgtggaaatttatcttcctgaccggtcaccacacgctgtttatgtccatgatggtggccgtgattctggcaactgctgggctaagtggcatgatgctgattgccatcggttccgtggttgttggggtagcgatggtcttcttccctgccattgcccacccttacatgaagaaggtgacaggatctgatgatgtagccatcggtcacttctctaccctctcctatgtattggctggttttatcggcagtaagtttggtaataaagaacattcgactgaagacatgaacgtgccgaaaagtctgttgttcttgcgtgatacaccggtcgcgatctcctttaccatgtgtatcatttttgtcgttacctgcctgtttgccgggccggaagtggtgaaaagcctgagtggcggtaaaaactggttcatgttctcattgatgcaatccatcacctttgccgcaggggtttatattattctgcaaggtgttcggatggtgattgccgagatcgtgcctgcttttaaagggatttcagacaagttagtgcctaatgcaaaacctgcgttagattgcccggttgtcttcccttacgcacccaatgcggtactggttggcttcctgagcagctttgccgctggcctgatcggtatgttcgcgttgtatttgttgaatatgaccgtgatcatcccaggcgtcgtccctcacttcttcgtaggtgctgccgcaggggtgtttggtaatgctaccggcgggcgtcgcggggcgattctcggtgcatttgctcaaggtctgttaattaccttcctgcccgtcttcctgctgccagtcttaggcgatattggttttgccaataccacatttagtgatgcagattttggtgcgctgggtattttactggggattatcgttcgataa

SEQ ID NO: 42091 - DNA, 843 bp, Yersinia pestis
atgtctaatcttgatacttaccaaacccgcagttggctctttacgccagccactcgctcggatcgctttgctaaagcggctgaaaacggtgcagatgtcgccattattgatcttgaagattcggtctctcaagcggataaggagcaggcccgacaaaaagccatctcttatctctcttcacgtccggctacatcactaccgctggcactacggatcaacggactggatactcgtgccggtattgaggatattcacgccttactcgaatgtggcagccttcccgattacctagtccttcctaaaacggagtcagcggctcatctgcagattctggatcgcctaatgatgttcgcaggctctgatacgcgccttatcggcatcattgaatctgtacgtggcctcaacgctgttgagtctattgctgctgccaccccaaaattggccggattgatatttggtgctgcggacatggccgccgatattggcgcagcatccacctgggaaccgctagcgctggcgcgtgcccggttagtctccgcctgtgcgatgaatggcattcccgctattgatgcccctttttttgatgtccacgatgtttcaggcctacagtctgagacccttcgcgcatctgatttcggcttttctgcaaaagcggccattcatcccgcacaaatcagcacaatcaataccttatttacccccactgcagcagagatacgccatgcccgcgcagtgctcgccgagaataccaaaggggtcgggaccgtcaacggaatgatgatcgatgaggctgttgcacgtcaggcccgccgggtacttacccgagcgggtatctctgcctga

SEQ ID NO: 42092 - DNA, 1197 bp, Yersinia pestis
gtggaacagtttgatgtggtagtcataggtgcgggcgcggcagggctattttgtgcggctcaagcggggcaagcagggtgccgagtgctgttagtggacaacggtaagaaagccgggcgcaagatattgatgtccggcggtggccgttgcaactttacgaacatttatacggaacctgcggcttacctctcacaaaaccctcacttctgtaaatctgcattggcgcgttatacccagtgggattttatcgacctgatgaatcgccacaacatcgcctggcatgaaaaaacgctggggcagcttttttgtgatgattccgctcagcaggtcgtcgatctgttactgaaagagtgtgagctggggaatgtcactgtgcggctgcgcagtaatgtgttgtcggttgaaaaaagcgacacgggctttgtgctacacattaatgatttgagagtgagcgctaactcacttgttgtggcttctggtggtttatcgatgccggggctgggggcatctccgtttggttataagctggcggaacagtttggtttgaaggtgttaccaacccgagcggcattggttcctttcacgttgcataaacccttgttggatcacgtgcaaacgctgtctggtgtctcggttccggcggtggtgacggcggagaatggcgttagcttccgtgaaagtattttatttacccaccgtgggctttctggcccggctatcctacaactctcaagctattggcaggctggtgagtatgtgagcattaacttacttcctgatgtcgatctggctgcctttttgaacaccgagcggcaagcccatccaaaccagacgctaaaaaacacactggctcaattattgcccaagcgattggtcgagtgcctgcaaacattggaacaactgcctgatgttaccctgaagcagcttaatgttccccagcaggcggcattaattgcaaatcttcagcagtggcgggtgcaacccaacgggacggaaggctaccgtaccgcagaagtcacgttggggggggtcgatacccaagagctctcttccaagaccatggaagcccataaagtgccggggctgtactttattggcgaagtcgttgatgtcactggttggctaggcggttataacttccaatgggcctggagctcggcttgggcttgcgcgcaagggctggcggcgaagaagtaa

SEQ ID NO: 42093 - DNA, 1497 bp, Yersinia pestis
atgctacatcttttcgctggcctggatttccataccggccttatgttagttcttgctttgttgttcgtgctgttttacgaagccatcaatggttttcatgatacagccaatgcggttgcgaccgtaatctatacccgtgccatgcgttcacagatcgcagttgtgatggcaggggtgtttaacttcctcggcgtgatgctgggtggtttgagcgtggcctacgccattgttcacttactgcctactgatctgctgttaaacgtcagttccacgcatgggttggcaatggtcttctccatgttactggccgcgattatctggaatttgggtacttggtattttggtattccagcctccagttctcatacgctgattggtgctatcatcggtattggtctaaccaatgcattaatgaccagtacatccgttgtggatgcgctgaacgttcctaagatgatacaaatctttctgtcgctgatcttatccccgattgtgggtctggttatcgccggtttgatggtattcctgctacgtcgttactggagcagtaccaaaaagcagcaacgtattcacctgacgcctgctgaacgtgaaaagaaagacggtaaacgtaaaccgccattctggacccgtacggcgctgatcctctccgctatcggtgtgagtttctctcacggcgctaacgatggtcagaaagggattggcttgatcatgctggtattaatcggtgtggctccggctggttttgtcgtgaatatgaatgcgaccggctatgatattgcccgcacccgcgatgcagtcactcatgtgcaactctattatcagcaacatgctgaggcattgcctcatgccatcgcgctgaaaccactggtgccagccccagaaaccttgccaggtacacctgcgcaattccactgtgacacttcacgcgcgatggtcgccattaaccatgcacaagcgctgctgaccgatctgaaaagctatgatgacctaaccgttgatcaacgcagccaaatgcgtcgcttgctgatgtgtgtcgcagaaaccgcaggagccgttgccaaactgccagaaaccagtgccgaaaaccgccgtttcctcaacaatctgcgtaccgatttgttggataccgtggaatatgcaccaacctggattatcgtagcggttgctctggctctgtctctcgggacaatggtcggttggagacgcgttgccgtcactatcggtgagaagatcggcaaaaaaggcatgacctatgctcaaggggtttcagcccagatgaccgcggcggtctctatcggtattgccagttataccggcatgccagtatcgaccactcaagtgctctcttctgctgttgccgggaccatgttggtcgatggcggtggcgtgcagagtaaaacggtgaagagcattatgttggcctgggtcttaaccctgccaatctctatcttcctttccggtgcactgtattggatagccttaaagttcatttaa

SEQ ID NO: 42094 - DNA, 1917 bp, Yersinia pestis
atggacaaaacattattggccggtgctatcagtctatctttagttatattacctgttcaggtattggcttttacaccgaatgtggtgggaataactgtcaacgatgaagtcgtcattcatggtatacagaatgtgcgcgacggcggagtcattaataatgggctggttagtgacaatgccgcaattactgtcaccaacgggagcagtgctggtacggcaaataatactaccgtgggtgataaaggctggttacagattaccggtgctctggcgacgggtaccattgttaatcaaggcgggctgcttgacaccaaaacggcgggtaccgtaatagatagccaaattaatgatggcggccatatgactctgggacttaatagccagtctaaaggctacctcaatatagcggctggcgcagaactttttgttaccaacaacgatccatacatctccgatgtgaccacccataaccccgcactgcctgccaatgttatgattgagaacctcaacgtcgcgggtctggtcgaaatcggcccttcctggaagggcacgagtatcgtgccgcttcccctctctgacgttttagggccggtgctggttacccgaatcaataatgtgactttgcaagggggggatatcaatttaatggcctattctgctggtgggcaatttaaccggctggagatagaaaatttgtctggtcagggtaattttgcgatgacaacccagcttgccagcaataccggggatttcattacggtctcacagcaggcgaccggccaatttggtattaccgttcaggacagcggtaaagagccgcaatctgccgacaacctggcactggtacatattaatcgtggtgatgctcagttccgtttactcaatacaggcggagtggtggatttaggtgtttaccaatacgggctatatagtcaggaaagcaatggcagcactgactggtatctggcaactagcacagaagaactgcctggtacaacaccgaacgtaaccgctccaatgctcagttccgcagcacaaggtgtgctgaatatggcagcggcaccgcggcatatcctgaatgcggaattgagtaccttgcgtcagcgccaaggcgagttgaaggcagatgcggaagggactgttggcgtttgggcgcgttaccttacagatgacagccggttgtctgataataaaaatatcgctttcaagaataccttaagtggcatggaaattggggccgataaacaacttggattaaaccggggtaatatgttgatcggagcatttacctcctacagttcatctgatgtcaaatccacccacgacgctaatggtgatattcgcagttacggtggtggcctctatctgacctatttggatcaaagcggattttatgttgatacggtgctaaaagctaaccgctttaataataagatgaatacacaggaaacccgtggcgaatataaccagaatgctcttaccacctcagtagaaagtggttatcaatggcctgtttatgccaatctggtgctcgaaccctatggaaaggtgagttattcacgtattggtagcgcagattatactctcagtaacggcatggtagcggaagtggcgaaagccgatagcgtgcaaggcgagttaggcacggtactcgccgcctcttacagcattaaccaaatgacgataaagccttatattaaactggctattacccgtgaatttaccaaaagtaatgctgtagcgattaataacattggtttcgataatgatttctccggtaatgtcggtaaatatggcgtaggcataaatgcgacggtagccaataacaccgccatttttgctgaagtggattatctcaatggttcaaaaattgaaacaccggtaactgccaatatcggtttccgccttcggttctaa

SEQ ID NO: 42095 - DNA, 504 bp, Yersinia pestis
atgtctcacatcgaaaaacaagctggcgaactgcaggaaaagctgatcgcggtaaaccgcgtatctaaaaccgtaaaaggtggccgtattttcagctttaccgcactgacagtagttggtgatggtaacggtcgcgttggttttggctacggcaaagcacgcgaagttccggcagcgatccaaaaagcgatggaaaaagcccgtcgcgctatgattaacgttgctttgaataacggcactctgcagcacccagttaaaggtgctcacacgggttctcgtgtattcatgcaaccagcttctgaaggtaccggtattattgccggtggtgccatgcgcgccgttttagaagttgcaggggttcataacgtattagctaaagcttatggttctactaacccgattaacgtggttcgtgcaactattgcagctctggaagatatgaaatccccagaaatggtcgctgccaagcgtggtaagtccgtcgaagaaattctagggaaataa

SEQ ID NO: 42096 - DNA, 435 bp, Yersinia pestis
atgcgtttaaatactctgtctccggctgaaggtgccaagcatgcgccgaagcgtgtaggtcgtggtattggttctggcctgggtaaaaccgctggtcgtggtcacaaaggtcagaactcacgttctggtggtggcgtacgtcgtggttttgaaggtggtcagatgcctttatatcgtcgtttgccgaaattcggcttcacctctcgcaaagcgatgatcacggcagaagttcgtctgtctgaacttgctttagtggaaggcgacgtaatcgacctgaacacgctgaaagccgctaacgttgttggtatccagatggagttcgtgaaagttatactttcaggcgaagtcaatcgtgcggtaactcttcgtggtctgcgagtcaccaaaggcgctcgtgctgctatcgaagctgctggcggtaaaattgaggaataa

SEQ ID NO: 42097 - DNA, 1332 bp, Yersinia pestis
atggctaagcaaccaggattagattttcaaagtgctaaaggcggattaggcgagctgaagcgcagacttttgtttgttatcggtgcgcttattgttttccgtatcggctcttttattccgattcctggtatcgatgccactgtgcttgccaaattgcttgagcagcagagaggcaccatcattgaaatgtttaacatgttttctggtggtgctctcagtcgtgcttctatctttgccttgggtatcatgccgtatatttcggcatcaattattatccaactgttaacggtggtacatccagcgttagcagaaataaagaaagaaggggaagctggccgtcgtaagattagccagtacacccgttatggcacgttggtattggctatattccaatcgatcggtattgctaccggtcttccgaatatgcctgggatgcaaggtctggtaatcaatccaggctttgctttctattttaccgctgttgttagcttagtcacagggactatgttcctgatgtggctgggtgaacagattactgaacggggtatcggaaacggtatttcaatcataatctttgctggtattgttgcggggcttcctcctgcaattgcccataccatcgagcaagctcggcaaggcgacctgcacttcctcctgttgctgttggttgcagtattagtgtttgcagtaaccttcttcgttgttttcattgaacgtggtcaacgtcgtattgtcgttaactatgcaaaacgtcaacaaggtcgtcgtgtttatgcagcacagagcacacacttaccgttgaaagtgaatatggctggggttatccctgcaatcttcgcttccagcataattctgtttcctgccacgattgcatcatggtttgggggcggaacaggttggaactggctgacgactatttcgatgtatttgcagccgggacagccgctttatgtgttactctatgcgtctgcaatcatcttcttctgtttcttctacacggcgttagtgttcaacccgcgtgaaacagcagataacctgaagaagtccggtgcattcgtgccaggaattcgtccgggagagcaaacggcgaagtacatcgataaagtaatgacacgtctaaccttaattggtgcgatgtatattactttcatctgcctgatcccggagttcatgcgtgacgcgatgaaagtaccattttactttggtggtacctccctacttattgtagtggtggtcatcatggactttatggctcaagtgcaaactctgatgatgtctagtcagtatgagtctgcattgaagaaagcaaacctgaaaggctataaccgctaa

SEQ ID NO: 42098 - DNA, 357 bp, Yersinia pestis
gtggcccgtatagcaggcattaacattcctgatcagaaacataccgttatcgctttaactgcgatcttcggcatcggcaaaactcgctcacaggctatctgtgttgctgcgggtattgctgaacatgttaagatcagtgagctgtctgaagagcaaatcgagaagctgcgtgacgaagttgccaagtacgttgtagaaggtgatctgcgtcgtgaggtgaccctgagcatcaagcgtctgatggaccttgggacttatcgtggtttgcgtcatcgtcgtggtctaccagttcgcggtcagcgtactaagaccaacgcacgtacccgtaagggtccgcgtaaaccgatcaagaaataa

SEQ ID NO: 42099 - DNA, 390 bp, Yersinia pestis
atggcaaaggcacctattcgtgcacgtaagcgtgtaagaaagacagtctctgacggtgtggctcatatccatgcttctttcaacaacaccatcgttaccattactgatcgtcagggtaacgcattgggttgggcaacagcaggtggttccggtttccgtggttctcgtaagtctactccgtttgcagcgcaagttgcagcagagcgctgcgctgaagcagtgaaagaatacggtatcaagaatctggaagttatggttaaaggacctggtccgggccgtgagtctactatccgtgcgttaaacgcggctggttttcgcatcactaatattactgatgtgactccgatccctcataacggttgtcgtccgccgaaaaagcgccgcgtataa

SEQ ID NO: 42100 - DNA, 621 bp, Yersinia pestis
atggcaagatatttgggtcctaagctcaagctgagccgtcgtgagggcacagacctgtttcttaagtctggtgttcgcgcgattgacaccaagtgtaagattgaacaaccacctggccagcacggtgcgcgtaaaccgcgtctgtctgactacggtgtgcagttacgtgagaaacaaaaagttcgccgtatctatggtgttctagaacgtcaattccgtaactactataaagaagcagcacgtctgaaaggcaatactggtgcaaacctgttgcaattgcttgaaggtcgtctggacaatgtagtttaccgtatgggctttggcgcaactcgtgctgaatcacgtcagctggtgagtcataaagctatcatggtaaatggtcgcgttgttaacatcgcttcttatcaggtatctccgaatgacgtagtcagcatccgtgagaaagctaaaaagcagtctcgtgttaaggcagctttggagctggctgaacagcgtgaaaagccgacttggctggaagttgatgctgtcaagatggaaggtgtgttcaaacgtattcctgaacgtactgatctgtccgcggacattaacgaacacctgatcgtcgagctttactccaagtaa

SEQ ID NO: 42101 - DNA, 990 bp, Yersinia pestis
atgcagggttctgtgacagagtttctaaaaccgcgcctggtagatatcgagcaagtcagttcgacgcacgccaaggtgacccttgagccgttagagcgtggctttggccatactctcggcaacgcactgcgccgtattctgctttcatctatgccgggttgcgcggtgaccgaggttgagattgatggtgtactacatgagtacagcaccaaagaaggcgtacaggaagatatcctggagatcctgctcaacctgaaagggctggcggtgagagttcagggcaaagatgaagttattcttaccctgaataaatctggcattggccctgtgactgcagccgatatcacccatgatggtgatgtcgaaatcgtcaagccgcagcacgttatctgccacctgaccgatgaaaacgcatctattaatatgcgtatcaaagttcagcgtggtcgtggttatgtgccggcttctgcccgaattcattcggaagaagatgagcgcccgattggtcgtctgttagtagacgcatgctatagccctgtagagcgaattgcctacaatgttgaagcagcgcgtgtagaacagcgtaccgacctggacaagttggttatcgagatggaaaccaatggtacgatcgatcctgaagaggcgatccgccgtgcggcaactatcttggctgaacagcttgaagctttcgttgacctacgtgatgtacgtcagccggaagttaaagaagagaagccagagttcgatccgatcctgctgcgccctgttgacgatctggaattgactgtccgctctgctaactgccttaaggcagaagctatccactacatcggtgatctggtacagcgtaccgaggttgagttgctgaaaacgccgaacctgggtaaaaaatctcttactgagattaaagacgtgctcgcttcacgtggtctttctttaggcatgcgcctagaaaattggccaccagctagcattgctgacgagtaa

SEQ ID NO: 42102 - DNA, 390 bp, Yersinia pestis
atgcgccatcgtaagagtggtcgtcaactgaaccgtaacagcagccatcgccaggctatgttccgtaacatggccggctctttggttcgtcatgagatcatcaagacgaccctgccgaaagcgaaagagctgcgtcgcgttgttgagccgctgattactcttgccaagaccgacaacgtagctaatcgtcgtctggcattcgcccgcactcgtgataacgagatcgtggcaaaactgtttaacgagctaggcccgcgtttcgcgagccgcgccggtggttacactcgcattcttaagtgtggcttccgtgcaggcgacaacgcaccgatggcttacatcgagttagttgatcgtgctgcatcgcaagcagaagtagttgctgcagagtaa

SEQ ID NO: 42103 - DNA, 990 bp, Yersinia pestis
atggcatgtggcgaatttgacctcattgcccgctactttgaccggtttagaagtaaccgccgggatgtggagctgggtattggagacgactgcgcacttcttacagtggcagagaaacagctgttggccatcagtaccgatacactggtgtccggtgttcatttccttccggatatcgatccggccgatcttggttacaaatctctagcggtaaacctcagcgatttatctgcgatgggtgccgatcctgcctggttatcgcttgctttgactctgccatcggtaaatgaagattggctacaggcattcagtgacagcttatttgatcaactcaattactatggtatgcaattgatcggtggtgataccacccgtgggccattgagtctgacactgactattcacggttttgtccccgaaggccgtgcattggcccgtgctggtgcgcggattggtgactggatctatgttactggcacattgggtgacagtgctgcgggtctggctattttgcaaaatgagctgcgggtagataacgaaaccgatcgagcggcattaattcatcgtcatttacgaccacaaccccgagttttacaggggcaagcattgcgtatgcttgctagtgctgccattgatatttctgatgggttaatttctgatctgcagcacattctgaaagccagccattgtggtgctcgtattgagctcgatatgttgccgtattccgatgcattaaaaaatcaggttgatactgagcaagctctccgctgggcattgagtgggggtgaagactatgaactgtgctttaccgtacccgagatcaaccggggcgcgttggaagtggcactcagtaataccggagcgggttatacctgtattggccaaataggccctcaatcggaaggcgttaaattcttccgtgaaggtaaaatagtcaaactggatttccgcggttttgatcatttctcaacaggtaaatctcatggatga

SEQ ID NO: 42104 - DNA, 1344 bp, Yersinia pestis
atgaatggtttagtttctttggagtcatttctagaatcgttacaacggcgtgatgccaaccaaccagaatatctccaggccgtacgtgaagtatttacgtcgctctggccctttctggaacagaacccacattatcgtgaacaaagcctgctagagcgcttagtcgaacctgaacgtgttatccagttccgcgttgcctggactgatgataaaggccatgttcaggttaaccgcgcatggcgcgtgcagttcagctcagcaattggtccttataagggcggaatgcgtttccatccctcagtaaacttatcaattctgaagttcctcggttttgaacaaaccttcaaaaatgccctgactaccctgccaatgggcggtggtaaaggcggttctgattttaatccgaaagggaaaagtcaggctgaagttatgcgtttttgtcaggccttgatgactgaactttatcgccaccttggcccggatactgacgtgcctgcaggcgatattggcgtgggcggccgtgaagttgccttcatggctggcatgatgaaaaagttatccaataacaccgcttgcgtctttacgggtaaagggctgtcattcggtggtagtttgattcgcccagaagcaaccggttacggtttggtttatttcaccgatgcgatgctaaaacgccatggtttaggctttgaaggtagaaaagtgtctgtttcaggtgctggcaacgtggcgcaatataccattgaaaaagcgatggagctgggggctaaagtggttactgcctctgattcaggcggtaccgtagtggatgaagttggcttcacgcctgaaaaactggctcatctggctgaaattaagaataagcgttatggcactatcgaagactatgcccgcgaacgtaatttggtctatttagcgggtcaacaaccgtggagcgtccctgttgatattgccctaccttgtgcgacacaaaatgaattggacctgccagcagcacttcagttgattgccaatggtgtgaaagcggttgctgaaggcgcgaacatgccaaccaccatccaggcgacagatgctttccttgaagcaggcgtcttgtttgctccgggtaaagcggccaatgcgggcggtgttgccacatccggcctggaaatggctcagaatgcagcccgtatgagctggaaatcagaaaaagttgatgtccgtttacatcacatcatgttggatattcaccagtcctgtgttgaatacggcggtgaaggcaagcaaacccactatgtacacggcgctaatattgccgggtttgtcaaagtggccgatgcaatgctggcccaaggcgtgctgtaa

SEQ ID NO: 42105 - DNA, 417 bp, Yersinia pestis
gtgaaacctgctgctcgtcgccgcgctcgtgagtgcgctgttcaagcgctttactcttggcagttgtctaaaaacgacatcgctgatgttgaattacagttcctgtcggagcaggatgtcaaagatgtagacatcgcctattttcgcgaattgctgtcaggggttgcggttaatgcagcatctctggatgcattaatggcaccttttctttcccgtcagctcgaagaattaggtcaggttgaacgtgctgttttgcgtattgctctgtttgaactgagcaaacgtgatgatgtcccttataaggtggcaatcaatgaagcgatcgaactggccaaaactttcggcgcggaagatagccataagttcgttaacggagtgctggataaagtcgctccgacggtacgtaagagaaaataa

SEQ ID NO: 42106 - DNA, 471 bp, Yersinia pestis
atgaacgttatcgaaggtgttgttgctactcctaatgcccgtgtggcgattgcgattgcgcgttttaacaactttatcaacgacagcctgctggatggtgcaatagatgccctgaaacgcattggtcaggtgtccgatgacaacattaccgttgtctgggtgccaggcgcttatgagttgccgttagttgctaatgtattagcaaaaacaaatcgttatgatgcggtgattgcactgggtacggtgatccgtgggggcacagcgcactttgagtatgttgctggcgaagcaagttctggtctatcaagtgttgctatgaacagcgatattccagtggcgtttggtgtgctgaccacagaaagtattgagcaggcaatcgagcgtgctggtactaaagcaggtaataaaggtgcagaagctgccctgaccgcgcttgaaatgattaatgtaatcaaagctattaaaggctga

SEQ ID NO: 42107 - DNA, 1110 bp, Yersinia pestis
atgcagcccgatgagttctatatggcccgagcttttgaactggcgcgtttggggcgctttacgacgtcgcctaaccccaatgtaggctgtgtcttggttcgtgatggcgagatcgtcggcgaaggttaccacttacgtgctggagagccgcatgctgaagtgcatgcgttacgtatggcgggtgagaaagcgcgaggagccacggcttatgtcactcttgagccgtgtagccattatggtcggacgccaccttgtgctgatgcgttggtcgccgcaggtgtgatacgggttgttgctgccatgcaggatcctaatccagaagttgccgggcgagggctgtataaattaaaacaggccggtatcgctgtcgatcatggcttgatgttagctgaggccgaggctgttaaccttggtttcttgaagcgtatgcggactggtttcccttatgtgcaattgaaaatggcggcatcattggacgggcgtacagccatggcatcaggtgagagccagtggattacctcaccacaggcacgccaggatgtgcaacgctttagggccgagagttcagctattctcagtaccagtgccacagtattggcagatgacccttcgctgacggtacgctggcaggatttagatgccgaaacgcaggttttgtatcctcatgatagtgttcgacagccagtaaaaattatactcgatagccataaccgcgtgactccacggcataaagtgatacagcaagacggcccatgctggctggctcgcgtagatgccgatgatcagccatggcctggcaatatcgaacaactgttgctaccacgttatggtaatggcgtggacttggttgtgttgatgatgcaattggggaaacggaatattaactctgtctgggtagaggctgggccacaactggcgggtgcattgttacaagccggagtggtggatgagttaatcctttatatcgcccccaaactcttgggcagtgatgcgcgtggattatgcgagctagctgggctgacgaatttatcgcaagcgcctgagtttgcatttagcgatgtacggctggtcggtccggacttgcgtttacgcttgaagccaaagtattaa

SEQ ID NO: 42108 - DNA, 894 bp, Yersinia pestis
ttgcgctatgcttttcctacacaacagttgaaggataacgtcatgcaaacagtaaaactgaacaacggtattgcaatgcctctgctgggctttggtgtcttccagatgactaataccgcggaatgcgagcgcgcagttatcgatgcgattgaaacaggctatcgcctcatagacaccgccgcttcctaccagaatgaaacgcaggtagggaatgcgcttaagctgagtggtattgcacgagatgaactgtttatcacgactaaattgtggttgcaggatacctattatgaaggtgcgaaagcgcagtttgaacgctcactgaatcgcctacaactggattatgtcgatctgtacctgattcaccaaccctatggcgacgttcatggcgcatggcgtgcaatggaagaattacaccaggcgggcaaaatccgtgccattggcgtcagtaactttcatccggacagactggctgatctcatggcatttaataagatcattccagccgtaaaccaaattgaagttaatccgttcaaccaacaactccacgctgtgccatggatgcaaagccgaggtattcagccagaagcatgggcaccgtttgcggaaggaagaaacggtctcttccagaatccggtattaaccgctatcggcgaaaaatatggcaaaagcgtgggacaggttgtattacgctggattttccagcgcggcattgtctcgctggcaaaatcagtgcgaaaagggcgaatggaagagaatattaacattctggacttcgagctcagtgctgaagacatgctgcagatagcggctcttgataccgcaacgagcgccttcttctcacatcgcgacccggcaatggtggaatggctgactggccgtaaacttgatgtctaa

SEQ ID NO: 42109 - DNA, 843 bp, Yersinia pestis
atgttaagttatcgccatagttttcatgctggcaatcatgccgacgtccttaaacataccgttcagagcctgattattgaggcaatgaaagagaaagaaaaacctttcctttatctggatactcacgcgggtgcagggcgctaccaactgagtggcgagcatgccgagcgtaccggggaatacctcgacggtatcggcaagctgtggcagcgcgatgacttacccgcagatttagccccgtatatgagcgcaatcaactattttaaccgtggcgaaaaactgcgctactaccctggctcgccgttaatcgcacgtcatttattacgtgaagacgacaaaatccatctgaccgaattgcattccagcgattacccactgttgcgcaatgagtttgccaaagacgaacgtgcaaaagtacagcgtgccgatggttatcagcagcttaaatcacaattaccgccgctatcgcgccgtggctttgtgctgatcgacccaccgtatgaaatgaaaactgattatcaggatgtggtgaaaggtattcaggagggctataaacgattcgcaacgggtacctatgcgctctggtatccggtcgttctgcgccagcaaattaaacgtctgttacgggatctggaagccacgggtatccgccgtatcctgcaaattgaactggcggtacgcccagatagcgaccagcacggtatgaccgcatccggcatgattgtgattaatccgccgtggaaattagaacagcaaatgaattcattattgccgtggctgcacaacgtgttggtcccatcaggccacggtcatacgctggtaaaatgggtagtacctgaataa

SEQ ID NO: 42110 - DNA, 990 bp, Yersinia pestis
atgcaaaaacgttatctcggtaaatccggacttgaagtatcggcactgggtctgggctgtatggggctgagctatggctacggcccagcaacagatactcgtcaggccgtcgaactgatccgcgcggccgttgagcgtggtgtgacatttttcgataccgccgaagtgtatggcccttatctgaatgaagaggttgtcggcgaagccttaaaaccctttcgcgaccaagtcgttattgccaccaaatttggttttaccttcggtgaagacaataaacagcagattttaaacagccgcccagagcatatccgcgaagcggtggaaggatcactgcgtcgactcaaaactgacgtgattgacctgttgtatcaacaccgcgtcgaccctgatgttcccattgaagacgttgcgggtaccgtgaaagacttgattgctgaaggcaaggtcaaacatttcgggctttccgaagccggtgcacaaactattcgtcgtgcgcatgctatacagccggttgccgcgctgcagagcgaatactcaatgtggtggcgtgaacctgaacaggagatcctgccgctgctggaggaactgggtattggctttgtgccgttcagcccgttaggtaaaggcttcctgaccggggccatcaaggccggagcgacattcggtgaggatgacttccgaagcaaagtgccacgttttgccgcagaggctcttgaagccaatgaaaggctcgtggccttgctgggtattcttgccgcagaaaaaggcgtgacgtcagcacaaattgctctggcatggttgttggcacaaaaaccttggattgtgccaatccccggaaccacaaaactgcataggctggaggagaacctgggggctgcagatattaccctttctcaggatgatatctggaatattactcaggcacttgcaacggtgaaaattgtgggagagcgttatcctgcggccatgcaggctcgagtgggtcgttaa

SEQ ID NO: 42111 - DNA, 1353 bp, Yersinia pestis
atgaccaaacattacgattatctggcaattggcggtggcagtggcgggatcgcatcgatcaaccgggcagccatgtacggtaaaaaatgcgcattgatcgaagctaaacagctcggtggcacctgtgttaacgtcggttgtgtgccaaagaaagtgatgtggcatgcagcgcagattgcggaagccattcatttgtacggcccggattacggcttcgacaccacagtgaaccacttcgattggaaaaagctgattgctaaccgtactgcttacatcgatcgtatccatcagtcctatgagcgcggtttaggcaataataaagtggatgttatccaaggcttcgcccgctttgtggatgcccacaccgtggaagttaacggtgagacgatcaccgcagatcacattctgatcgctaccggtggccgcccaagccatcccgatatccctggtgctgaatacggtatcgactccgatggtttcttcgaattagatgagatgccaaaacgtgtcgctgtcgtgggcgcaggttatatcgcggtagaaattgctggcgtactcaacgggttaggtaccgagacacacttgtttgtccgcaaacatgcaccgttgcgtacctttgatccgctaattgttgaaaccctgttggaagtgatgaacaccgaagggccgaaactgcataccgaatcggtaccgaaagcggttatcaaaaacgccgatggcagcctgacgctgcaattagaaaatggtactgaagtcactgttgaccacctgatctgggcgattggccgtgaacccgcaaccgacaacctgaacctgtctgtcaccggtgttaagaccaatgacaaaggctatatcgaggttgataagttccagaacaccaacgtcaaaggcatctacgccgtcggtgataacactggcgtagttgaactgaccccggttgccgttgcggcgggccgccgtttgtccgaacgtctgttcaataacaagccggatgagcatttggattacagcaatatcccaaccgtggtattcagccatccgccaatcggtactatcggcctgaccgagccacaagccagagagaaatttggcgacgatcaggtgaaagtgtacacatcctcgttcaccgcgatgtacagtgctgtcactcaacaccgccagccatgccggatgaaattagtctgcgtgggtgccgaagagaagattgtcggtattcacggcatcggtttcggaatggacgagatcctgcaagggttcgcagtcgccatgaagatgggcgcgaccaagaaagatttcgacaacactgtcgctatccaccctaccgccgcagaagagttcgttaccatgagatga

SEQ ID NO: 42112 - DNA, 1128 bp, Yersinia pestis
atgccaaccagctatcttaaggaagacaccgctcgccaaatcgttcagcgcaccatgagcattattgattactcagttaatgtcatgaatgaatacggcgtcattattgcgtctggtgatcctcgtcgtttacatcagcgtcatgaaggtgccgttttagcgctgacggaaaaccggatggtcatgatcgacgaagccgtggctggcaggcttaaaggcgttaaaccaggaattaacctgccgattatttttcgtcagcgaatggtaggcgttattgggatttcgggtgaacccgataaagtgcaggcctatgctgaactggtgcgcatggcggcggagctgattttagaacaagctgaaatgttagagcaaaatcagtgggaaaaacgctatcgcgaacagttaacctctcagctcattgctcagcaaggcagtgcggcttcagtggcatcgatggcagcctatttaggattagacctcacactgccacgcattgcgctgatcgtcagtctgcgtgaacaagagcacactcagcagcgggatctggtcgaaatattaagcaaccacagccgtgaaacattggtcaccttacatgggtttgagcgggttgtggtgctattgccgctgaaccttgcacacagtgacgatcgtgaagtgacggccagaaaggctttgcgcaaattgtatgcgctgctacagccgcgttttagtctgaatatttatgttggtggcatttttgatggcctggatgggctgcaacgctcctatcttagcgcacaagcgatgcaagaaacggcattgcgacaaaagctcacgcaaccggtcatgttctatcaagaccattttttgaccgttcttctgaatgattttgccgggagttggcaggctggtgaactgagctctgcctggcaaacactgcgtcaggcagataccaaagacgttctgtgtcacactctgcgttgttactttgtacagaattgtgatctgtctcaaacgtcaaaacaactgcatatccatgtcaataccctacgctatcggttacagaagattgaagctataacagctttaaaaatcaatgaattaagttcaattattcagctctatattggcatgaaaatagagagataa

SEQ ID NO: 42113 - DNA, 1920 bp, Yersinia pestis
atgcgcatttggcaaaaattcttgctgctcttctgctgttgggtgttatctggtccgctagtgtgggcttcaacagactactcactgtgggttaatgatattcaatcccggttagataaaacggctcagttgtatcaacaacaaaaaactgatgaagcgagagcaatggtacagatggcgtattttgaggtgtttgaaaaccttgaggggccgattcgtatcaacatctccgcgcaaaaaagcttccagatggaggcggcctttggcgaaataaggcggatgattggtgaaggcaaatcacaggctgatgtcgataataaaatcaattggttgaaaggcgaactaacgggtgtcttgcccgtgttagttgatggacacaaactcactgctgagcagcaacacgctgcttatgaaaacagcgatattgccgtatattggcaacagagctttagaattattgatgatttattggcgcaagctatcagtgaatatcaggacggcaaatatgccgaagccagtaaaagtgtgcagcaggcgcattatcaggggtttaaaaactctgaaatggagatgtcggtgcggggaaatcgctcggcacagcaagcagcggagataaatcagcaatttaccgccttgatcgatttggcgcgccagcccgataaaatgaccgaagtggcctatcgtgtcaccgggttgctacacaccattgaagacatcttaccgggcttaccaaccactcgcgaacaacaacaaattactgttgaccaacccatctcttccgacgccatccccgatacacaagctaatgctgattgggcgcaggtatccagcaaaatcaatcaagcggttactgaggctatcgggcaataccagcaagggaaaataacaccggcaatgatggcggtgcaggatgcctactttgacttgttcgaagccagtggcatggaaaacaaggtgggatcgcgtgatgcagcatttaaatcaacgttagaaggccacttcacccgcttagttggtttaatgaaagctgagaaaccggttgagcaactacaagccgaagcggttgccttgcaaaaagatctggtcaatgcagccgagatgctgggtgatggcggagagaccgactggagtctgttcgtttacagtttgttgatcattgtacgtgaagggctggaggcattactgattgttgcggccattgtcgcttatttggtgaagaacaaccatcaggacaaattgccgttgattcgtcaatcggtggtggtggcactcatcgccagcgtattaacggcattcatcttccaatggttgtttgccaactctggccaaagccgcgagttgttggaggggttcaccatgatgattgcggtggtgatgctgttctccatgagttattggttgttatcgaaggctgaagcccgtaattggaaggcgtacctcgaaggaaaattcgctaaatcacttagcagtggatcaataataggtttatggctcactagcttcctggcggtataccgagaaggggcggagaccgttctgttctacctcgcattgataggcgatgccaataccaccagcggccacttatcggttctggccggttttggcgttggttgtgtgatcttgctggtggcttatttggtgatgcgctttaccgtggtcaaactaccacttaaaccattctttatatttaccggtggctttatgtacctgatggcatttgtttttgccggtaaaagtgttctggaactgatcgaaggtaaattgtttgaacccactttactgccgggtgtacctgaaattagttggttgggcatctatccttatgtggaaacgctgatcccacaaggcgtgttactgattgcagcattagttgccctttgggttatgcaatggcgtagtcggacggttcaccgctaa

SEQ ID NO: 42114 - DNA, 1377 bp, Yersinia pestis
atgaaaataattattcttggggcagggcaagttggcgggaccctggcagaaaacttggtgggtgaaaataacgatatcactgtagtcgatatcgactctggtcgactacgccaactgcaggataagtttgatttacgtgtagtacaagggtatggctcacaccctagagttctacgagaggcaggagctgaggatgccgatatgctggtagccgtgactaattctgatgaaaccaatatgattgcctgccaaatcgcttactcattattcaatacaccaaatcgcattgctcgcattcgatcaactgaatatatacgtgaagcagataaactctttctgcccgaagctgtaccgattgaccatttaatctcacctgaacaactagtcattgactatatctataagttaatcgaataccctggagcactacaggtcgttaactttgctgaaggtaaagttagcatcgcagcagtcaaagcctactatggcggcccattggtagggaatgcattgtcatccttacgtgaacatatgccacatattgatactagagtcgcggctatatttcgccaagatcgaccaatccgtccacagggatcaacaattattgaagctggtgatgaagtcttttttgtagcggcctctcagcatatacgagcggtaatgagtgagttacagcgcctggaaaaaccgtataaacgcattatgattgtcggtggtggtaatgtcggtgcaggtctggcactgcgtctggaaaaagactacagcgtaaagttaattgaacgtgaccaacagcgggcagctgaattagctgaaatgctacacgatactatcgtattttatggtgatgcatcagaccaagaattacttgcagaagaacatattgaacaggttgatgtatttatcgccattacaaatgatgatgaagccaatattatgtcggctatgctggcaaaacggatgggtgcgaaaaaagcgatggtacttatccaacgcagtgcttacgtcgatttggttcagggaagcgttattgatattgttatatcaccgcagcaagccactatttcagcactattaggtcatgtccgtaaagcagatatcgttagtgtatcctcgctgagacgtggcgttgctgaggcaatagaagctattgctcatggtgatgaaagcacttcaaaagttgtcggccggatggttgaagacataaagttaccaccaggaacaactattggagctatcgttcggggggatgaggttattattgcaaacagtaactccataattaagcaaggggaccatgtaataatgttcattacccacaaaaaatttgtacccgatgtggaacggttgttccaaccaagcccattcttcctataa

SEQ ID NO: 42115 - DNA, 1320 bp, Yersinia pestis
atggttgagtccgcactcacgcagaacaaatacagcctctggaaacagggggtgtgctggttgttgctgttggggccgctgtttttcctcagctacgggcaggtgaatcaatttacagccacaaggtacgatgtagggagcagggtgtttgcctgggaacacgcgatcccctttatgccgtggaccatcgtgccttactggagcattgacctgctatatggtatttcgctttttatttgcacttcaaagcaggaactgacacgccacggctgtcggctgcttgcctcctcacttatcgcctgtgcgggatttttactcttcccgctgaaattcacttttgtacgtccggaaacacaggacatgtttggctggttgtttcaccagctcgaactgtttgatttgccttataaccaggctccgtcattgcatatcattctgacgtggctactgtggctacgctttcgtcagcatctgaaccgtggggcaaggatggtctctggtgcatggtttttgctgatagccgcttcggtgttgacgacctggcagcaccattttgtcgacgttcttagtggatttattgtggccgtcgttatcagctacgccattccgattgaaggccagtggcgctggaaacgcccgtcacctcacgcgctgcgccttgcggcaaaatatacactcggtggcatcatctttttactggccggggtgctgatcccaggcagctattttttactgtggcctgcgggcgctctactgatggtctctgcgggttatgtgggccttggcacgagcctattccagaaaaacgaacacgggcatttatctctttcggcccgtttattgctctggccttatttaacgggtgcaaggctttcaaagatgtggttttctcgccacattcccaaaacttccgccattttagatggggtatcgctgggctgttttcctgataaatcgctgcaacagaccgcggtgctcgacctgacggccgagtttcatcacagaacccgcgtgcctggtgtctggtatgcttatccgttgatggatttagtggtgccagatgtacaggatattgcgcaggcggtagcaaaactcactgagctacggcagggacatctaacggttgtggtgtgctgcgcactgggtttatcccgcagcgcaacggttgttgccgcctggcttctggctcagggccacgtttcttgtgttcaggaggctattgaccttatcaaaagccaacgcccgcaggtggtgctgacacctgcctatatccacgcactggaacagtttcagggaacgctatgccagatatcgctctga

SEQ ID NO: 42116 - DNA, 1290 bp, Yersinia pestis
atgaaaaatacatataatctccgcagtatcgctgctaaagcaattagtcaggtattggatcagggccaatcgctcagtgccgttttgcctgaattacaaaaaaatatttccgataaagatcgcgcattgctgcaggaactgtgttttggcactctgcgagtcttaccacagctagaatggtgtattcaacaacttatggcacgcccgatgacgggtaaacaacgtgtttttcattacctgattatggttgggctctatcagttgatttacactcggattccgccacatgcggcgttggctgaaacggtcgaaggcgcaacagtactgaaacgtccacaattaaaaggacttatcaatggtgtattacgccaatttcagcgtcaacaagtggaattactggaacgtgctgtaaataacgatagccactatctgcatcctagttggttgttggcccgcattaaacaagcctatccagcacagtggcagcaaattttggatgccaataaccaaagaccgcccatgtggctacgtgtaaatcgcctgcatcattctcgtagtgaatacctcgaactgttaacacaggctgatattaatgcggagcctcaccctatttatcgtgatgctgtgcgccttatcactccttgtgccgtcaatcatctacctggctttgaacttggttgggtaaccgtacaagatgcttcggctcaaggttgtgttgacctactcgatccccaaaatggtgagcagatccttgatttatgtgcagcccctggaggtaaaaccactcatattctggaagccgcaccaaaggctcatgtattagccgtagatattgatgaacagcgactcagccgagttaaagagaatttacaacgcctgcaattacaagccgtagtccgtgttggtgatggccgagcacctgacacatggtgcggtgatcagcaatttgatcgtattctattggatgcaccttgttctgcaaccggtgttattcgccgccatccagatattaaatggctgcgtcgggaccgtgatatttccgaattggcccaactacaatcagaaatcattgaggctatttggcctaaactgaaacatggtggagtactagtttatgctacctgttcaatattgccggaagagaaccaacagcagattgccgctttcctacaacggcatcccgaagcacagttgaccgaaaccggtactacagcagcgcctggtaaacaaaaccttccacatcctgaggacggtgatggtttcttctacgcaaagataatcaaaaaatag

SEQ ID NO: 42117 - DNA, 822 bp, Yersinia pestis
atggatcagaagtttgcagtatttggtaatcctattagtcatagtaaatcgccgaggatccatacgcttttttccgagcaaacaggcattgaacatcgatatggtaaggtattagctccttctgaagcctttgagaacacattagtatctttttttgctgatggtgcccagggagcgaacattaccacaccgtttaaagaacgcgcatatgaccaatgtgatgaattaaccgaccgtgcatctctggcaggggctgttaatacgattaagcgtttggaagatgggcgcttgttgggtgacaacacagatggtattggtttgctcagtgatcttgaacgacaaaacttgatccgaacaactgatcatattttgttggttggggctggtggcgctgcccgaggagtgatccttcctctactttcttatgggtgtactgtggttgttaccaaccggacacatacccgggcgcagcaactggccaaagtatttaaccatattggtgatattgatgtttgtgaaatgtcggagttggctggacaacgattcgatttggttataaatgcgacggcatcaggccttcatggagaggtacctaacttaccagcagctatacttacttctcaaacacgttgttacgatatgttctatcaggcgggaaccacaccattcttggcttgggcacaacgattgggtttagcagattatgccgatggtttaggaatgctggtagggcaagcagcacatgctttcaaactttggcacggtgtgatgcctgaaattacgccagtattagcccagctacgcagtgagttaggtaaatag

SEQ ID NO: 42118 - DNA, 1125 bp, Yersinia pestis
gtgaagtacgaattacaaaaaacggatgggcgcgcccgccgtggtcggctggtgtttgagcgtggcgtggtcgaaaccccggcctttatgcccgttgggacgtatggcaccgtgaaagggatgacaccggaagaagtaaaagagaccggtgcgcagatcctgttaggtaacaccttccatctatggttgcgtccaggccaggaaatcatgaagctgcacggcgacttacatgatttcatgcaatggcacggcccgatcctgaccgattccggcgggttccaggtctttagccttggcgcgatgcgtaaaattaaagaagaaggggttcattttaaaaacccaatcaatggcgattcggtgttccttagccctgaaaagtcgatggaaattcagtacgatctcggttctgatatcgtcatgatatttgatgagtgtacgccttatcctgccgattgggattacgctaaacgttcgatggaaatgtcactgcgctgggctgcccgtagccgccagcgctttgatgagctgaataacaagaatgcattattcggtatcatccaaggcggggtttacgaagatttacgtgatgtgtcagtaaaagggctggtagatatcggctttgatggttacgctgttggcggcttggcggtcggtgaaccaaaagaagatatgcaccgtatccttgaacatgtctgcccacagatcccagaagataaacctcgttacctgatgggcgtagggaaacccgaggatctggttgagggggtgcgccgtggtattgacatgtttgattgtgtcatgccaacgcgtaatgcccgaaatggtcatttgtttgtgactgatggtgtggtaaaaatccgtaatgcgaagcataaggatgatacggcaacactggatgagcactgtgattgctacacgtgtcgccattatagccgtgcctacttgcatcatctcgatcgttgcaatgaaatactgggtgcacgattgaacactattcataacctgcgttattaccagcgcttaatggcgggtttacgtcaggctattgaagagggtaaattagaacactttgttgaagatttctatggtcggatcgggaagccagttccaccattaaacgtttga

SEQ ID NO: 42119 - DNA, 1071 bp, Yersinia pestis
atgcgtgttgccgatttttcttttgagctaccggaagctctgattgcccattaccctcagcctcagcgcagtggttgccgcttgttatcgctggatggccctacggggacgttaacgcacggcattttcaccgatttgctggataagctggcgccgggtgatctgctggtgttcaataatactcgggtgataccggcccgtttatttggtcgtaaagccagtggtggcaagctcgaagtgctggtcgagcgtgttttggatgaccatcgggtattggctcatgtcaaagcctctaaagcaccgaaaccgggcgcagaactgctattgggcgatgatgaaagtatccgggcaaccatgttggcgcggcatgacacattgtttgagttgcgttttgacgatgagcgggatgttttcaccatcctaaatgcagtcggtcatatgccattgcctccttatattgatcgtcctgatgaagatgctgaccgcgaactgtatcaaacggtttatagccaacgtccgggcgcggttgcagcaccaactgcgggcctacacttcgatgagccaatgctggcggcactgcaggaaaaaggcattgagatggcttttgtgacactgcatgttggcgcggggactttccagccagtgcgtgtcgataccatcgaagaccacatcatgcactctgaatatgcagaagtcccgcaagaggtggttgatgcggttctggcctgtaaagcccgtggcaagcgtgtagtcgctgttggtacgacatcggtacgttcgttggaaagtgcagcgaaggccgctgaaaacgggttaattgcgcctttcttcggtgatacccgcatcttcatttatcccggttatcactatcaggttgtggatgcgttagtgactaacttccacctacctgaatcaacattgataatgttggtctctgcttttgcaggttacaaaaacaccatgaatgcttatcagcaggcagtggcagaacaatatcgttttttcagttacggcgatgccatgttcatcagccgtaatccacgggcaccgcaagagaaggttagcccgtaa

SEQ ID NO: 42120 - DNA, 1764 bp, Yersinia pestis
atgagtcaggaagtgcgtttatttcaagaaggcatgttcaccgccagcgatgaaacatcgttgtattttcgccactggtctgccacggaaggtaacagcaagaaagttattgtgttgtttcatcgcgggcatgaacactcggggcgtctgcaacatattgtggatgaactgatgatgcccgatacccatttttacgcgtgggatgcgcgtggacacgggcagtcgccaggggctcgtggctacagccccagccttgctcgctcggttttagacgtggatgagtttgtgcgttttgtggcacaggatgcgcaggtcaacctcgacgatatcgtggtgattgcgcaaagcgtgggggccgtgctggtatcaacctgggttcatgactacgcgccgaaaatccgtggcatggtgctggcgtccccggcatttaaggtcaagctgtatgtgccgtttgcccgcctggggctgggattaatgcagcgtatacgtggcctgttttacgtgaattcctacgtgaaagggaaattcctcagccacgaccccgagcgcatcgccagctttgagcaggacaaattaatcacgcgccagatcgccgtcaatattttgctcgatctctacaaaacggctgaacgtattgtttcagactcgacggcgattactctcccgacccagttgcttatttccggcgatgattttgtggtgcatgagaaaccgcaaaaacaattttatgccggtcttcgcagcgcgataaaagagcaacatattctgccgggtttctatcacgacacgctgggtgaaaaagaccgctctattgcttttgataaaatgaaaaactttatcgaccgactctatgcaactgcgccttatgcctttgattatagccatgaagatcgctggagtccgagtgccgatgcgtatcgtgaattgcaggctccaccaaaatcacgctcgctggaagggatgttttatgctgcgctaagtttcggcatgaagaccatcgggcgacagtccaaagggatgctcctgggttatgaaacaggttttgactccggcagtacgctggattacgtctatcgtaatcagcctgaaggtaatggcattctggggcgtatgattgaccacaactatctgaacagcgttggctggcgtggtattcgcgtgcgtaaagtgaatatccagcagatgattgaacaggccgttgcgaagattcagctcagtcacatgccggtgcgagtggtcgatatcgccgccggacatggccgctatgtgctggatgcactggaaaaacagcagggtatcgaaagtatactgctgcgtgattacagcgatttgaatgtagaaaaaggtcaggcgatgatcgaagagcgtgggctaagccacgtcgctcagttcagaaaaggcaacgccttcgactatgattcccttgccacgctcgatcctgctccgacgctgggcattgtttccgggctgtatgagctcttcccggataacgacttaatcaaaacgtcgttggccgggctggctgcggctattccaccaggcggcatgctggtatacaccgggcaaccgtggcacccacagttaaaaaccatcgcgtataccttaaccagccatcaaaacgggatcccgtggatgatgcgtgtgcgcagccagaaagagatggacacgctggtggagcaggccggctttgaaaaatgccatcaggtgattgatgagtttggcattttcaccgtgtcgctggcggtgagaaagcagcatggttga

SEQ ID NO: 42121 - DNA, 3213 bp, Yersinia pestis
atgaaaacaaaccgctctacgctttccccgtgctttcgtaaaacaatgatagccagtttgttggtgcctctttgcagccccctgtatagctgggcggtacaaacggccagcataacagatggcagcacgatggttatctctgggggttatgacactgaggctaataaccactcggcggtatttgtgcaaggttccggtagcaccattaatggtggctccgatgtcgttattgaaaccacgggggttggtgcaattggtgcctatgcctctgaaggtgggtcgttggggctgacgggttcgactatcaataccgagaatggtgtggcttttggtgtcttaaatgacaaaggtacggtgaatttacaaggtggtacgattaccacgaaaggtcagacggcatatggcgtgtattcctctggtttgggcagtaataccgatattcacagttcggcgatcacgaccagctactcgttaacccacgctatttatggtgccggagggacgggattgacattgaacaataccaccctcaataccagtggcagtggtagctatggcatttatctggatggttccggagggagcttaacgggcgcgaataacaccattaatagtactcatgcgaccaagggtgcgggtatctatatttcagcgggtggctcaaatgcgactttagataacaccacactgaatatcactaaaggtgctgttggtgtgaatgtgggggagggttcatctattacgatggatggccttattgccaccggtaatatcaccaacctatttaaagtgaatgggaatgcctcggtcagtaatgccaatatcgaattagccgcgggtggcgtattaatggcacagggcagcagtgcgtccaatcaagcggtcatcatattaaataatgtcaatgttatttctaacagcggcagcacgacactggttgatgttaataaggacgctgacgtcaccattaatgggggggcttaccactcaaaaggtaacaatgcgaagggaatctgggttcgagataataactcatcgctgaatgtcgataacgccgtgattatcaccgagggcgtgaatgcaacggcgattgaaaatcgtggcaccgctatcgtaaaaaataccacggtgataactaaagggaataactctcacggcctctactctgagcaaagccttgatgccaccaatatggcaatttccactgcggggattggcagtattggggtggcggcagctaaaggcggtaacctaaatctgaatgatgcattcatcgagacgacgggtaattcaggtatggtgctgggtacttttgccgactcatccatcagcgctaaaaatattacagggatctcgaccggcgctggtgcttatgccttgtgggtagatgatggtagctcaattctgctggaagagagccaaattaccactcaaggccagggcgcgggagggatttatgcctcaaataccgggaccggctctcacaccgcttacactcaggttacgctgaacaactcacagattcatagtgagcaggggccgggtatctgggctaatggtgctgacattaatgttgatgtgaagaatggttcgcagttaacgggaggcaatgggttattggtctatgcctcaagtaatgcaggggccgccagcaatgtcaatgtgaatggcgataaccacgccgttctgttgggtgatattcacgccgcagaaaacagcaatattaacctggcactgaataataattccgtttggacgggggcggcgactaacgccaaacaggttgatatcgacagcagcagtatctggaatttaacgggtgatgcagatgttgagtcaatgcatgtattgggccagatgaactttatctcaaatagcagtgacactaattcacgggctccctacgataatttcagcaccttaacgatcaacagtaatgtcaccgggagtggcagttttacctttaatgtgcaattgggtgataacgactcaccagtggatagactctatgtgattggtaatgcttctggtgaccatggggttcaggttattaaccaaggcggtttgggggcattgaccacgggcgacgggattaacctgattaccgttgatggggagacccattccggctcatttactatgagtaactcggtgagcgcaggggcctatgaatatttcttgtataagatagatgactaccgttggaacctgcaatctaatctcatcaatcccggtcctggtcctgaaccagaaattgaaccagaagagatagcttaccgccctgaagttcctggctatattgccgcaccttggttaaatgcattttatggttttactactttgggtagcttgcacgaacgccgtggctcggccgagggagcagccgaagggtttaatcaagactcatggggccggatccgtgggcagcataataattttgacgcgggccgttttagctacgattcaaatatctggtttatgcaattgggtcatgatgtctatcaggccaaaaatgccgcaggcactcaagtgactggcggtatgatgatcaccctaggtaagcagaatagcgatacacgggatcgggcgcgggcgataaatccggatttgtcgatcgataccggcaagatcaaaaccgaggcttatgggtttgggggctattacaccctgatgaccgaggaaggcggttaccttgatatcgttagccaggcgacgctataccgcaacaactatgagagccaacataataccaagcataatggctacggtgttgtgatgtctgccgaagtgggtcagccgtatccactggctgctggctgggtagtggagcctcaggggcagctaaaatatcaatacctgcacctgagtccgaagaatttcaacgatagcatttcagagatcggggggacggattactctgttggtcaggtacgtggcgggctgcgtctgttcagtgacgcgagtgagaagcgggacattaagccttatttgaccaccgatgtgcttcaccagttaggccgaaacccacaggtgacggtagcgacggtggatatccgtcctgacttcacaaaaaccttctggcaggggggcgcaggggtgaccgccaaagtgaatagtcaggttgatctctatgctgatgcgaaataccaaaaatcctttgatggcaaattagatggctacttaggtaatttgggcgtgaaagtcagtttctga

SEQ ID NO: 42122 - DNA, 603 bp, Yersinia pestis
atggttctggtaactcgtcaagcccctgattttacagcggctgctgttcttggtaacggcgaaatcgttgaaaactttaacctgaaaaagcacctgaacggcagaccagccgtcctattcttctggccaatggactttactttcgtttgcccttcagaattgatcgctttcgaccatcgttatgaagaattccaaaaacgtggtgttgaagttgttggtgtttctttcgattcagagtttgtgcataacgcatggcgtaaaaccccagtggataaaggcggtattggcgaagttaaatacccaatggttgcggatatcaaacgtgaaatccagaaagcttacggtattgagcacccagatgctggcgttgcactgcgtggttcattcctgatcgacaaaaatggtattgttcgcagccaaatcgttaacgacctgccaatcggccgtaacatcgacgaaatgatccgtaccgttgatgcactgcaattccacgaagaacacggcgaagtttgccctgcacagtgggaaaaaggcaaagcaggtatgggcgcatccccagacggcgtagctaaatacctgtctgagaacgcatctaagctgtaa

SEQ ID NO: 42123 - DNA, 633 bp, Yersinia pestis
atgaaccgtatgttgcgctggatttttacgctgtgcatcgcttatcccgtggtctggatttggctcggtgtccgggttgctggccgcaaaaagttaccaagagacggcccggcgattattgtagcgaaccacaacagccatctggacgtactgacgttattcaccctgttcccgctctcgacgctggtgaaagtgcaacccgttgctgcagcagattattttctgaagaataaagtgattagttggtttgccctgaaggtgattggcattattccggtttatcgcggcgctcatcaggcgaatccattgcaggcctgtgtggatgctctggcggaaaaaaagatcgtgattatttttcccgaaggtacgcggggagagccgggtaaattctcggagataaaatccggtatctggcatttaagtcagcggtgcccggaagtccccattattcctgtctacatgcacggccttgaccgttcgatgggtaaaggccagaaaatccccgtcccgtttttcatcgacatatttatcgacgacccgctgttttacgatgcggagaaagtgacttttaagcaattactcttaaatcgttttgtcgctttacagcaacttgccacaaggaaaacctcatga

SEQ ID NO: 42124 - DNA, 1830 bp, Yersinia pestis
atgcttagtggttggcaccttccggtctcgccttttgttcgtttggcagacgacgcattacatatcacgctctggttgcaaggtgatagtttacctgcgcaagtctttctgcgttgtgagccagataatgaagagtggctgctcactatggaggggcatgagagccatgatcgttggcgctatagcgtttctttaccgttatatgaggggcagccaacccggcgctactgcttcaaactattatgggatgaccgccaacagtggtttggcccgttggggttctcggtgattcctccagcacagttggcacagtttgctgtagatgtacccgatagcgggcctgattgggtcgcggaccaagttttttatcagatcttccccgatcgctttgccagtagtcaggcagatcatggtgtgcaggaggggagttatattcatcatgcggccggttgcccggtatctcgccgcgagtggcagcagccattggatgatgtgcatgccgcatcgacattttatggtggcgatctggccggtattagtcagaaaatcccttactttcaacaactgggggttacggcactgtatttgaaccctatttttaccgctcccagtgtgcataaatatgatactgaagattattatcaggttgatccctacttggggggagagcgtgatttcttgcaattgcgagccgctacccgtgaagtaggaataaagttggtgctcgatggcgtgtttaaccacacgggtgattctcatcgctggtttgatcgctatcaacaaggggaaaacggcgcctgccatcacgaagattcgccttatcgtggttggtttacgttcctccctgatggacgagcattagattggaaaggtaatgccagtttgccaaaacttaattttgccaatgaagaggtcgctgaacgaatctatcgcagtgatgacagcgtcgtgcgttattggttacggccaccatacagtattgatggctggcgtctggatgtcgtacacatgctcggggaagatggcggcgctaaagggaatttgcaccatctgcacggtatctatcaggcagcaaaagaagaaaatccgcaggcttatattctgggcgaacattttggcgatgcacgtaattggttgcacgctggagtggaagacgcggcaatgaattatatgggttttgctttgccggtccgcagttttctcgccgagctagatgtggcttgccatcctataaaattggatgctgcggattgcgcctactggatggatgagtaccgcgcaggattgccccatagccagcaactccgtttatttaatcaattagatagccatgatactgcccgttttcttaccttattaaagggtgataaaacccgtatgcaaatggcgctaatatggttgtttagttggattggtgtgccttgcctattttatggtgatgagattgggctggatggagggaatgatccgttctgccgcaaaccgttcccgtgggatgaggctcagtgggatcatgacctattatcactgtgtcaacgtatggcggctttacgccacaaaagcatagcgttgcggcgcggggggtgtcaggtgatccatgccagtggtgattccctggtctttattcgtagctatcaaactgagcgtgtgatggtggcgatacaacgttccgatgatgcggatattttcctgcccgcctctcctttactcaatgtggctgagtggcagcgtctggaaggtggaggagacctggctgtcagtgagactggggtaaacatggggctggagggtaagagtgttaccttgtggtgtggtgttggtgagtgctaa

SEQ ID NO: 42125 - DNA, 2022 bp, Yersinia pestis
atggcgaagctattaatttttatcaaatcgctcattgttgggatgatgatcgtgtccactatggggtgtgcggagaagccaacgttcgttccgcctgcacaacgtgcattgccgcaaagtgaaagaccgtggcaaaagaatacatttgttgtgattgcttatcatgacgttgaagacgattcagccgatcaacgctatctgtcggtaagaagcagcgcattaaatgagcagttcgtgtggttgcgtgataacggttaccacgtggtttctgttgatcaaattttggcagcccgtaatggtggccctacattgccggataaggcggtgctcctcacctttgacgatggttacagcagtttttatcggcgcgtttatcccttactgaaagcatacaaatggagtgccgtattagcgccagtgggcacttggattgatactgccaccgataaaaaagtggattttggtggcttgagcactgatcgggatcgttttgccacatggaagcagattactgaaatgtctaaatcagggttggttgaaatcggggcgcatacttacgcttctcactatggtgtgattgctaacccacaggggaataccgaaccggcggcggccaatctgcaatatgatcccaaaacaaaacagtatgaaactgttgaagcctttaagcagcgaatggagaaagacgttgcgttgataactcagcgtattgtccaggcaacagggaaacaaccacgggtttgggtttggccatacggtgcgccgaatggtacggtgctaaatattttacgccagcatggttatcaactcgccatgaccctagatcctggtgtggctaatattaatgacttgatgaatataccgcgcattttaatcagtaataatccgtcactgaaggactttgccctcacggttaccagcgtgcaggaaaaaaatatcatgcgggtggcgcatgttgatttggattatctctacgatccagacccggctcaggaaaaagagaatcttgataagttggttcagcgaatttctgacctacgtgtcactcacgttttcctgcaagcattttctgatccgaagggggatggcaacattcgccaggtttacttcccgaaccgttggatcccgatgcgtcaggatttgtttaaccgggtggtatggcaattggcttcacggcctgatgttgaagtctatgcctggatgccggtattggcgtttgatatggacccgtctttacctcggatcacgcgtattgaccctaaaaccggtaaaacgagtatcgacccagatcaatatcgccgtttatcaccttttaaccctgaagtaagacagcgcattattgatatctatcgtgatatggcctatagcgcgccgattgacggaattatctatcacgatgatgcggtgatgtctgattttgaagatgcttcccccgatgctatccgggcctatgaaaaagcgggcttccctggttcgattaccacgatacgccaagatccagagatgatgcagcggtggactcgttacaagagtaagtatctgattgattttactaatgagttgacccgcgaagtccgtgatatccgtggcccacaggtaaaatcggcgcgtaatattttcgctatgcctattttagaaccagaaagcgaagcatggtttgcacagaatcttgatgatttcctcgctaactatgattgggtcgcaccaatggccatgccgttaatggagaaagtgccgctatctgaatctaatgaatggttagcggagctagtcaataaagttgcgcaacgccccggtgctttggagaaaaccgtgtttgaactgcaatctaaggactggacccaacctgagggcaataacgccatcagcggcccaatactggcgggatggatgcgccagttgcagttaagtggtgcgcaaagttttggttactacccggataactttattactggcgaaccaccgctaaaagatgtccgccctgtgctgtcttctgcctggtaccctttatatgatcgatag

SEQ ID NO: 42126 - DNA, 627 bp, Yersinia pestis
atgaagatcgttgaggtgaagcacccgctagtaaaacataaacttggtttgatgcgtgagaatgatatcagcacgaaacgttttcgcgaattggcttccgaggtggggagtttgctgacttacgtagcaaccgctgatctggaaactgaaacagtgaccatcgaaggttggaatgggccggttgaaatagaacagattaaaggtaagaaaattacagtggtgccaatcctgcgtgcgggtctggggatgatggaaggggtgttggaaaatgtgcccagtgcgcgtatcagtgtggtaggtgtgtatcgcgatgaagagacgctgaaaccggtaccgtatttccagaagttggtttccaatatcaacgaacgcatggcgttagtggttgacccaatgttggcaaccggtggttctatgattgctactatcgatttgctcaagaaagcaggctgccagagcattaaggtattggtgttagttgctgcaccagaaggtatcaaggcgctggaagaagcgcatccggatgttgaattgtacaccgcctccatcgatcagggcctgaacgaacacggttatattatccctgggttgggtgatgccggggataagattttcggaactaaataa

SEQ ID NO: 42127 - DNA, 1335 bp, Yersinia pestis
atgatcgatagaattattgctttactcatcctatgtctggtgctgagtatccctgcgggaatgattttgctctttaccggcgatgtactgttgaactttgttttcttctatccactttttatgtccggtatttggataaccggggggggctatttctggctacgccgagagaggcactggccgtggggcgatgatgtacccgcaccagagctgaaaggtcatccgctcgtgtctatcttagtcccttgtttcaatgaggggttgaatgcacgggaaaccattcacgcagcactggcacagacctacaccaatattgaagttattgctattaacgatggctccagtgacgataccgcacaagtcctagatgcgctgcttgctgaagatccacgcttgcgcgtcattcatctggctcataatcagggtaaagcgattgccctgcgtatgggggccgccgccgcccgcagtgaatatctggtctgtatcgatggtgatgccttgttggacaagaatgcggtgccttatctggtcgcgccactgattgcgaatccgcgtactggcgcggtgaccggtaacccacgtattcgtacccgttcgacattgattggccgcgttcaggtcggggagttctcttcgatcattggtttgattaagcggacacagcgagtctacggccaagtgtttaccgtctccggtgtggtcgccgcttttcgccgtagagcactggcggatgttggctactggagcccggatatgatcacggaagatattgatattagttggaaactacagctgaagcactggtcggtattcttcgaaccccgtgggttgtgttggattttgatgcctgaaaccctgcgcggcttgtggaaacagcgtctccgctgggcgcaaggcggtgcggaagtatttttgaaaaatatgttcaaactttggcgctggcgtaaccgccggatgtggctgctgtttctggagtattcgttgtcgatcacttgggcattcacttacctgtttagcatcacattatacctattggggctggttatcactctgccgccgggtattcatgttcaaagtgtcttcccgccagcctttaccgggatggtattggcactgacatgtctattgcaatttgctattagtctggtgatcgaacgccgctatgaacctaaactgggtcattccctgttttggattatctggtatcccatggtttattggatgcttaacttgtttaccacggtggtgtcgttcccgaaagtgatgcttatcaccaagcgtaagcgtgcgcgttgggtaagccctgatcgcggcattgggagggtgaaatcatga

SEQ ID NO: 42128 - DNA, 1959 bp, Yersinia pestis
atgagccaaatacataaacatcctattccagctgcaattgcagagcatgctctaattaccccagaaaaataccaacattattaccaacaatccgtgcagaaccctgatgaattctggggcgaacaaggcaaaatcattgattggattaaaccctataaaacggtaaaaaatacctcctttgaccccggtcatgtgagtatccgctggtttgaggacggtacattgaacctcgcggcgaattgccttgatcgccatttggcagagcgtggtgatcaaacagccatcatttgggaaggtgatgaccctaatcaatcaaaaaccgtcacttataagcaactgcaccatgatgtgtgccagtttgctaatgtcctaaaaagtttaggcgtcaaaaaaggcgatgtggttgccatctatatgccaatggtgcctgaagctgccgtggcgatgttggcttgcgcgcgcatcggcgctgttcattccgttatctttggtggattttctccagatgccgttgccgggcgtatcatcgattctcactctaaactggtgattactgccgatgaaggtatccgtgcaggccgtgctattccactgaaaaaaaatgtcgatgaagcactgaaaaaccccgctatcaccagtattaaaaatgttgtggtcttccaacgtactggtaacgccagctattgggaagatgggcgcgatgtatggtggcatgacctgataaaagaggcatccgctgactgcccgccagaagagatgaatgcagaagacccgctgttcatcctttatacctctggctctaccggtaaacctaaaggggttgtacatacgacgggcggttatctggtttatgctgcactgacattcaaatatgtctttgattatcaccctggcgatatctactggtgtactgcagacgttggctgggtaaccggacacagctatctgttatatggaccactggcttgtggggccatcactctaatgtttgaaggcgtgcctaactaccctggcgtcaatcgcttaagccaagttgttgataaacataaagtcaatattctatacaccgcgcctacagcgattcgggccttaatggccgaaggtgacaaagccatcgaaggaaccaaacgcgactcactgcgtattatgggatcggtcggcgagccgattaatccagaagcctgggaatggtattacaacaagatcggtaacagtaaatgcccgattgtcgatacttggtggcagactgaaaccggtggtttcatgataacccctctgccgggtgccaccgagttgaaagccggttccgcaacgcgtccattctttggggtacaacctgcgttggtagataacctgggcaatcctcaggaaggggtggcagaaggtaatctggtcataaccgactcatggccggggcaagccagaacattatttggcgatcatgaacgtttcgaacaaacctacttctcaacctttaaaggcatgtatttcagtggcgacggcgcacgtcgtgacgaagacggttactactggataaccggtcgagttgatgacgtactaaacgtttcaggccatcgcttaggaacggctgaaattgaatctgcattggttgcacacccgaaaattgccgaagcggctgttgtcggtgttccacataatattaaaggacaggctatttatgcctatatcacgctaaatcacggtgaagaaccaacgccagagttatataccgaagtacgcaactgggtacgtaaagagattggcccactcgcaacacccgatattttgcattggacggactcattacccaaaacccgttcaggcaagatcatgcgccgtattttacgcaaaattgcgacaggagataccagcaacttgggcgatacctcaacacttgccgatccaagcgtggtagaaaaattactagaagaaaaacaatcaatgcagacaccgtcgtaa

SEQ ID NO: 42129 - DNA, 1392 bp, Yersinia pestis
atggaattaccagttaaaaataagcttaaacgtggcctgacgacacgtcatattcgttttattgcattgggttcagcgatagggactggcctattctatggttcggctgatgcgataagaatggccggaccaagcgtgttgttggcatacctgattggtggtgtggtggcatttgtcatcatgcgtgctttgggtgagatgtcggtcaataacccacaagccagctctttctctcgttatgcgcaagattgtcttgggccgatggcaggttatatcaccggctggacgtattgttttgagatcttgattgtggctattgctgatgtgacagctttcggtatctatatggggctctggttcccagatgttgctcattgggtatgggtgctgagtgttgtcttgatcatcggcgcggtcaatatgatgagtgtgaaagtcttcggtgagcttgagttctggttctcgtttttcaaagttgccaccattatcatcatgattttagccggtatcggtatcattgtttggggtattggtaacggtggtcagccaacgggtatccataatttatggactaacggtggcttcttcagtaatggctttgttggcatgctcctgtcattacaattggtgatgtttgcctatggcggtattgagattattggtattactgccggtgaagccgaggatccgaaaaaatcgattccgaaagcaatcaactcagtaccatggcgtattttagtcttttacgtcgggaccctgtttgtgattatgtccatttacccatggaatcaagtgggcacgaacggtagtccgttcgttctgaccttccagcatatggggatcactattgctgccggtattttgaactttgtggttatcaccgcttctgtatctgcaattaacagcgatgtgtttggtgtcgggcgtatgctgaatgggatggcagaacaaggccatgcaccaaaagcttttactgctatttctaaacgcggtgtgccgtgggtcacggtgctggtgatgatgtgtgccatgctaattgcggtttatctgaactacatcatgccggaaaatgttttcttggttattgcgtcattagcgacgtttgctactgtctgggtctggatcatgatcctattctctcagattgctttccgccgttcactgagtaaagatcaggttaaagcactggatttcccactgcgtggtggaacctttacttcggtgctagccatcattttcctggtatttattatcggtcttattggttggttccctacgactcgaatctcactgtatgtcggattagtgtggatcgtgctgttgctggtggggtattactttaaggtcaagtatcagaaaaaacaggctacgctgatcaagaatgctgattaa

SEQ ID NO: 42130 - DNA, 1320 bp, Yersinia pestis
atgagtcatcgtttatcatctaaagatattatggcattaggttttatgacctttgccttattcgttggggcgggcaacatcatcttcccaccgatggttggattacagtcaggagaacatgtgtggtgggccgctctgggcttcctgattactgccgttgggttaccggttattaccgttattgctctggcccgggtcgggggcggtattgatgctctgagtacgccaattggtcgtagtgctggtttggtgctggctactgtctgttatttggcggtaggcccattatttgccattccgcgcactgctaccgtttccttcgaggtcggcattgcgcctttaacgggtaatggcccgttaccgctgtttatctatagcgttgtttattttgcattggttattggaatttcactgtacccagggcgcttgttggatacggtcgggcatattctggctccgttgaaaattttagcgttagctattttggggattgcggccctgatctggcctgcggggccgttgattacagcaacagatgcttatcagcaagctcccttttcctccggtttcgttaatggctatctcaccatggataccttgggtgcattagtcttcggtattgttatcgtgaatgcagcccgctcgcgtggtgtggtttctgccgtgttactgacgcgttataccatttgggcggggttgattgccggtattggcctgactctggtttacctaagcctgtttaaattaggctctagcagcggtagtttggtacctgatgcgcaaaatggcgcggtcatcttgcatgcttatgtccagcacacctttggtggcttgggcagtatgttcctggcggcactgatctttattgcctgtatggtgacggcagttggcctgacctgcgcttgtgctgaattctttgcgcaatacctgcggctgtcataccggacactggtgtttatcctcggtatcttctcgatgctggtctctaatctggggctgagccaccttatccagatttctattccggtcctgacggcgatttatccgccttgtatcgtgctggttttgatgagctttaccttacgctggtggcagcatgcatcacgtatcgtcgcgccagttatgttgattagcttggtattcggtattcttgatgccgtgaaagcgtctacttttgcgaattttttaccggcatgggctcatcatctgcctctggcagaacaaggtctggcatggttaccgccttccttgctggtattcgtcgtcatagggttgtacgatcgcattttctgtcgccagaaaattgtggttaaacaatag

SEQ ID NO: 42131 - DNA, 1317 bp, Yersinia pestis
gtgttagaacgcttatcatggaaaacgctggctttagagctggctcttttttgtttgcctgcattattactgggggcgtttattggttatctcccttggttattgctggtttcagtggtcgccgcgctgacgtggaacttttataatcaactcaaactctctcattggttgtggcttgatcgcagtatgacaccgccgtcggggcgttggagttgggaacccctattttacggcttatatcagatgcaattgcgcaaccgcaggcgtcggcgcgaactggcgcttttaattaagcgttttcgcagtggtgcagagtcactgcctgatgccgtggttatcaccacggttgatggtaatattttctggtgtaatggtttagctcaacaattgttggggtttcgctggccagaggataatgggcagcatattctcaatttattgcgctacccggaatttagccaatatctgcaacaacaaacgttttcccgcccactgaccttgcaattgaataacggttactacgtggagtttcgcgtgatgccttattctgaagggcagttactgatggtggcccgtgatgtgactcaaatgcgccagttggaaggtgcaagacgtaacttttttgccaacgtcagccatgaattacgtacgccgctgacggtgctgcaaggctatctggaaatgatgcatgaccaagagttggccgggccgttacgcgataaagctttggggacgatgcaagagcagactaagcgtatggatgggctggtgaagcaacttttgacattatcacgtatcgaagccgcaccaaatgtggatttaaatgagcgggtggatattccgctgatgttgaaaatattgcagcatgaggtacaggcactgagcaatggccgccatgagattactttcagggttaacgatcaattaaaggtattcggtaacgaagaccaactgcgtagcgcggtatcgaatctggtctacaacgctgtaaatcatacgcctgaagggacgaaaattgaggtctgctggcaacaaacaccacaaggtgctcaatttcaagtcagcgacaacgggccggggatccctcctgagcatgttcctcgccttacggagcgcttctatcgggtcgataaagcccggtcacggcaaacggggggcagtgggttggggttggcaatcgtgaaacatgctctgagtcaccatgatgcgcgtttggaggtgatgagtgaaattggtctgggtacccgttttatttttaccttaccgaacaggttgattgttccaactgttttagtcgagaatgcagtcaaatcttaa

SEQ ID NO: 42132 - DNA, 1290 bp, Yersinia pestis
atgaaagtctctatttttaaaacgctttattttcaagtgctaacggcgataactattggtgtgttgcttggccatttctacccggaaatcggcgctcagatgaaaccactgggtgatggatttgttaaattaattaaaatgattatcgcgcccgtcattttttgtaccgttgttactggtatcgcgggcatggagagcatgaaggccgttggccgtactggtgcgattgcactgctctattttgaaattgtcagtactctggcgctgctgattggtttagtggtggttaacgtggcgcaacccggtgttgggatgaacatcgatcctgcgacactggatgctaaagcggttgcactttatgctgagcaagcctcacaacaggggattattccattcttgctggatattattcccggtagcgtagttggcgcatttgccagcggcaacattctgcaggtcttactgtttgcggtcttgtttggttttgctttacaccgtttgggtgaaaaggggcagttgattttcaatgttattgaaagcttctcccgtgttatttttggtgtcatcaatatgatcatgcgcttggcaccgctcggggctttcggtgcgatggcctttactatcggtaaatatggtgtaggaagtctggtgcaattggggcaattaatcctctgcttctatttgacctgtattctgtttgtcgttttggtacttggtacgattgcgaaattcaatggttttaatatcttcaaatttatccgttatatcaaagaagagctgttgatcgtgttaggcacctcctcttctgagtcagtgctccctcgcatgttggataaaatggagaacgccgggtgtaaaaaatcggtagtgggtctggttatcccaacgggctactcatttaacctggatggcacctctatttacctgacgatggccgcggtatttatcgctcaggcaactaacacccatatggatattatgcatcaggtgacattgctggtggtgctgctgctctcctcaaaaggtgcggcaggtgtcacaggcagtggctttatcgtgttggccgccaccatttctgcggttggacatttacctttggctgggctggcattgattctggggattgaccgctttatgtccgaggctcgcgccctgactaatctggtaggtaacggtgttgccaccattgtggtcgctaaatggtgtaagcaactggacaatgaccaactgcaagcggtgctatccaataaagtgctgcctaatgtaaaaagcagtgtttctgtgtcctga

SEQ ID NO: 42133 - DNA, 1245 bp, Yersinia pestis
atgcgtattattcatacctctgactggcatttggggcagtattttttcaccaaaagccgtgctgctgaacatcaggcatttctgcactggttgattgagcagatcaaagaacaccaggttgatgcgctgattgtcgcaggggatatttttgataccggtgccccgcccagctatgcccgtgagctctataaccgttttattgttgagctccagcctaccgcctgtcaattagtggtactgggtggcaaccatgattcggtagccacactgaatgaatcacgagatttactttcatacctgaatacctcggtaatctcatgtgccagtcgtgatctgaaacaacaagtgattatcctgaaaaatagacagcagcaacccgcagcggtgctatgcgccattccgtttttacggccccgtgatctggtgaccagtcaagcgggtgagtctggtgaccagaaacaactggcattacaagaagctattgctggccactatcaaacgttatatcaacgcgccctagaactgcgatctcagcttggcttgcctctgcccattatcgccaccgggcacctgaccaccgtgggtgtgacaaccacagactcagtacgagacatttatattggtacactagatgcctttccggctcaggcttttccacccgcggattacattgcccttggtcatatccatcgcgctcaacaggtcgctaaaactgaacatatccgctacagcggctcacctatagcgctcagttttgatgaactaagcaaagagaaaagtgtgtatttggtggagtttgaccagcaaaatctgtcatcagttaccccactcttcattccacaatttcaaccgatgcaattgatcaaaggtgatttgcgccaaatagagcagcaattagcggcatttgctggccatgaaggcttacccgtgtggttggatatagaagtggcaacccaagactatctcaccgatattcaaagacggatccaggcactggcagcgaacttgcccgttgaagtggtattactacgccgtagcaaagaacaacgtaataacagcatccaccggcaggaaaaagaaacgctaaacgaattgaccgtcagtgacgtatttgaacgtaggctggcactggaggcagatttacccgagcctcgccagcagcgaatgcgccaaatgttcaattacgtggttgatgaaatagcacaagatggcagtaacggtgtggcggaggagccagcccaatga

SEQ ID NO: 42134 - DNA, 2016 bp, Yersinia pestis
ttgcgggtaaggcgctcattaacgattaaacaaatggcagcggtggcagtagttgcactggtgactatctgtatttttatcatccttcagttgttccactttgtgcaacagcgtaaagatgattatgccaaccagttggaaagtattgcttattcggttcgccaacccctatctgaggccatactcagcgttgatattccacaagctaaaaaaatcctcaacagcctattacctattggtattcttagccgtgctgaagtgatattaccgaaccaaatacaggtattgcacgcaaactttccaacagagcggcccattccacactgggccaagcgggttttctccttgcccgtacagataaccgtgcctttatatgcgttggaacgggtacccgcaaaccctcagcccttagcgcatttagtcctgcgtgctgactctttccgtatgtatcaatttattctcagcgctctgtcagccatgctctcaacatatttgttactggcattggtgttatcggtatctatcgcttggtgtattaatcgcctgattattcacccgctgcgggcaatggccaaagagctggaggatattggtgaccacggggtgctgcatcatcaactgacgctaccggcgcatcatcaggatgatgaactgggtgtgttggtgcgtaattacaaccgcaatcagcaactgttagcggatgcctatgctgatatgggccgcattagtcaccgtttcccggtgactgaattgcccaatcggtcattatttatcagcctgctggagaaagaaattgcctccagtacgcgtacagatcactttcatctgttggtgattggtattgaaaccctgcaagaggtttctggcgccatgagtgaagcccagcaccaacagttattgttgacgatagtacagcggatcgagcagtgcattgatgacagcgacctgttagcgcaactgagtaaaactgaatttgccgtgttagccagaggtacccgccgctcattcccagccatgcaattggctcggcggattatgtcgcaagtgacccaaccgctgtttttcgacgagataacattgcgccccagtgccagtattggtatcacccgctatcaggctcaacaggacactgccgaatccatgatgcgcaatgccagtacagcaatgatggcggctcatcatgaggggcgtaatcagataatggtatttgagcctcatttgattgaaaaaacgcacaagcggctgacgcaggaaaatgacctcttacaggcgattgaaaaccacgatttcacgttattcttacaacctcaatgggatatgaagcgccagcaggttatcggtgcggaggcgctactgcgttggtgccaaccagatggcagctacgttttaccgtcaggctttgttcacttcgccgaagaggaggggatgatggtgccactggggaactgggtgctagaagaagcctgccgtattctggctgattggaaagcacgcggtgttagcctgccgttatcggtgaatatatcgggcttacaggtacaaaataaacagttcttgccgcatttgaaaacgctcattagccactatcatattgatccacaacaattgttactggaaattaccgaaactgcccagattcaggatctcgatgaagcattgaggctactgcgtgagttacaggggctggggttattgatcgcgttagatgattttggtattggctactcaagcttacggtatcttaaccacctgaaaagcttgcctatccatatgattaagttggataagagctttgtgaaaaatttgccagaggatgacgcgatagcgcgcattattagctgtgtttctgatgtactaaaggtacgtgtgatggccgaaggggtcgaaacagaagagcagcgccaatggttgctagagcatggcattcaatgcggccaaggcttccttttctctccgccactgccacgtgcagaatttgaagcccagtatttcagcagcgctcaccacgtaagttaa

SEQ ID NO: 42135 - DNA, 1782 bp, Yersinia pestis
atgaaacgttatctgaccccattggttaatcagattgctttgttgatgatactgctgggcatgctagggctggcgggtatggttatttcatcatggatggcacaaagcattcagggcaatgcccacgccatcaaccaagcaggctcattgcgtatgcagagctacaggttactttcaatgatccctttggatagcaatgagttatcttatctggtggcattggagcaagacaaaaccagtcacgacctgcaacaagcgctactgcgggaagggttaatgggtcaatatcagcaaattgaacgttactggcaagacacgctgaagcctcagttacaacaggccaaacaccctgatgaggtggcggccagtgtggcggattttgttcaccaacttgatgctttggtattagccattgaccataaaactgaacaacggctgttacaggttaccctgatcccgctggtattcagccttctgacactcagcctattgttggcaatgatctattatttgcgccgccggttactgcgcccttggctgaagttaatctcaatggcgaatgccattggccgaggtgattttagccaacgctatacgctggactatcagcgtgacgaaatggggatgctgggtacggcattgaatcgaatgtcgcaagaattgtcattgatctacggcgatcttgagcagcgagtcgtaaataaaaccgctgatttacaacagaaaaatcaggttttggcgttcctttatcacagtagccgccaactgcatactcatcagccattaagtgagcgtttagcccctgtcattgaacagctacaagcgttaaccacgctagaaaatgtacaaatttgtttgtatgaaaaccatctgtatcgtgaccatgtcaatcacaatgcggatgcagaatatctgatgcctaaaaaccgcccggcgtcattaacgatcagcggccctgttcgccccatcagccaccctgagttatggcaatcactgagttggagtttaagcgataaactcggtcaatatggtttattactggcaaaacaacccctcgataaccccctcaattctgaccagcagcaactggtcgatatgttagttgagcaactgaccagcacactggcgttagagagccaagccaaacatcagcaacagttattgttaatggaggagcgttccgccattgcgcgggaactgcatgactcaatcgctcaatccctttcctgcctgaagatacagatcagctgtttgcaaatgcaaactccggacttaccggaaaacagcaacctattgataaaacaaatgcgtgatgaactcaatatcgcctaccgtcaattacgtgagttactgaccacattccgtctgaaactaaatgaagccactctggaggccgcgttacaggctctggtgaatgagttcagcgaaagagctggtctatcgattaccttcaaatatcaattacctccagatcaggtaccaaaccatcaagccattcatatggtaaatattgtccgtgaggcgctgaataatatctataagcacgcccgtgccagcgaagccacggttaacgtccacttagaacaaggcgatgtggtgatgtccataaccgataatggttgtgggatagggcaagccagtgaacaacccaatcattatggtctgatgatcatgcaagatcgcgccaacagtttacatgggcactgtagtatcaatcagaaagagggaggcggtactgaggttcgagtgcaatttacccccgagaataatgaccttgactga

SEQ ID NO: 42136 - DNA, 1422 bp, Yersinia pestis
atgacacgatatgaacagctagcgcagcaaatcagagcacaaatacaatcgaaggtctggcaagcgggcgataagctcccttcgctgcgagaaagttgtaaacaatcagggctaagcctgatgaccgtggtgcaatcgtatcagttgttggaaagccaggggtggatcgttgcccgcccacaatcgggctactatgtggcctcacggcccacgcagttaccgcaaccacagcggggtaataagctccatctggatgaacaggttgatatcaatacctttatttttaatgtgttacaggcagggaaagatccggcaatcatgccgttcggttcagcatttccagatccgagtttattgttacaaccgcgtttgtcgcgggcgttggccagcgtcgctcgcaagatctcgccacaaagttctgtaacgaatttgccaccgggtaatgaaagtttacggcgcaatattgcgcaacgttatgctgcctgcgggatgaatgtatcacccgaggaaattgtgattacggcgggggcgatggagtcactgagccttagcttacaagccgtgacacagcccggtgattgggtcgttattgaatcgcccgcgttttatggtgcattacaggcgattgaacgcctacgacttaaggctattgccattacgacggatccccagcaaggtgtggatttggaggcccttgagcaggttatcagccagtatccgataaaagcgtgctggttaatgccccattttcaaaacccaatgggggccaccatgccgtggtcacagaaacagcgactcgtcaccctgctacagcagaaggctatttcactgattgaagatgatgtatatggcgaactgtattttggtgctgaacgcttgctaccggcaaaagcgcttgaccagcatcggcagattttacattgctcctctttttctaaatgcctggcgccggggttccgtgtggggtgggtggcagcaggtgaacatgctcagcgtattcaacatttacagttgatgagcaccgtttcggccagcgtcccgacccaactggcgattgcggattatctgagccaagggggatacgatactcacctgcgccgcttgcgtcgggtaatggaacagcggatgagcacgttgcatcaggccgttgttgaacacttccccaaaaacatcaaaatcagccaccccgctggcggctatttcttatggttagaattggagccaccttttaatgccagtgaactgtaccgacgggcactggagcagggggttagcattgctcctgggagaatgttcaccacagggagtcagtttgatcattgctttcgccttaatgcctcctttgcctggtcagaacaaagcgcaaaagcgattcgtattttggcgaagttaatcggccaattgacgaacgaacgtcgatag

SEQ ID NO: 42137 - DNA, 1008 bp, Yersinia pestis
ttgccagcagagacgggtaaaaagccgttattacaggcgatcgatctgaaaaaatactacccggtgaaaaagggtttctttacaccagaacgtttggttaaagcactggatggcgtttcattcacattggagcggggcaaaacattggcggtagtgggtgaatcaggttgtggtaaatccactctgggccgtttactgacgatgatagagatccctaccggcggcgaactatactatcaagggcaggatctgctcaagcccgatgaaagtgcggaaaaactgcgacgccagaagattcagattgtcttccagaacccctacggttcgctgaatccacgtaagaaggtggggcagattttggaagagccattgcagatcaatacccagctcaatcgcaaggagcgccgcgaaaaaaccttggcaatgatggcgaaagtgggcctgaaaactgaacattatgatcgctatcctcatatgttttccggtggtcagcgtcaacggatcgccattgcccgtggattgatgttaaaccctgatgtggtgattgccgatgagccggtatctgcgctggatgtctccgtgcgggcgcaggtactgaacctgatgatggatttacagcaggaattggggctgtcatatgtgtttatttcccatgacctgtcggtggttgaacatattgctgacgacgtgatggtgatgtatttggggcgctgcgttgaaaaaggcagcaaagaggctatttttaacaacccccgccatccttatacgcaagcattgctatcagcgacaccgcgtctgaacccagatatgcgtcgtgagcgtattaaattgactggagaactacccagcccaatgaatccaccgccaggttgtgcattcaatgcccgctgtcgtagagcatttggcacctgtagccagttacaaccgcagcttaagcagtatggtgaccagatggtggcgtgttttgccgttgatcaggatgaagcagagaaggtcgtttctgtttga

SEQ ID NO: 42138 - DNA, 1245 bp, Yersinia pestis
atggagcagccaagtcctgtcactcgtcagtcttttgatgaatggatcgtacccacctatgcgccagcagattttatcgtggtaaggggggaagggtcgacattgtgggatcaacaaggtaaatcgtatatcgattttgcgggtggtattgcggtaaatgccttggggcatgggcacccggcagtaagggccgcattgattgagcaggctgataaagtctggcatttgggcaatggctacaccaatgagccggtattacgtctggcgaagcagttgatcgatgcgacctttgcagaaaaagtgtttttctgtaattccggtgcggaggccaatgaggcggcactgaagctggcgcgcaagtatgcgctggataattttgccaataaagcgggtcagcaaggtgagaagaaccaaattgtggcgtttagaaatgcgtttcatggccgcacgctgtttacggtctcagcgggtgggcagcctaaatactcgcaagattttgctcccctgccaggcggtatccatcacggtatttttaatgaccttgcttcagcggaacacctgatcaccgatcaaacctgtgcggttattgtggaacccattcagggtgagggcggcgtgctacctgcggataaagagttcctgcacggtttgcgggcgctgtgcgatcgccataatgcattgctgatttttgatgaaatacaaaccggggtggggcgtaccggagaactctacgcttatatgcactatggggtgtccccagatgtgctgaccagtgccaaagcgttgggaggcggttttcccattggcgcaatgctgactaccacaaaatatgccagtgcgctcagtgtcggtagccatggcacgaccttcggggggaacccgctggcctgtgccgtcgcgggcaccgttctgtcattgattaatcaacctacgctattagccggtgttaaagcacgccaccagtggtttatcgatgaactggctgaaatcaatgcccggcataacgttttcgctgaaatccgcgggcgtggtctgctgatcgggtgtgtgctcaatgcccaatatgcgggcaaatctaaagagattgttcaggccgcggctcaatacgggcttattgccctgattgctggccctgacgttgtacgttttgctccatcactgattatttcgccgaaggagattaaagaaggcttagctcgactcgccatggggattgaacaggtttgtcaaaaagttacgtcgtaa

SEQ ID NO: 42139 - DNA, 1518 bp, Yersinia pestis
atgagccagcacgtcatgtttaacgcggtattgtctagccatccggccctgtttatacaaggtgaatggcgcatcggtaacggtgtgtctttcgaaaaacaggatcctatgagtcagcagcggctatggcaggcgcgtgcagcagaccatacggatgtgactctggcctgccatgccgcaagagcggcttttccggcatgggcacgagcttctcttgaacagcgggccacggtgatacagcagtttgcggccttactcgaacagcataaacaatcattagcgcgaactatcagtctggaaaccagcaagccatattgggagacgctaacagaggtgcaggcgatgatcggcaaggtggctatctctttgcaagcctatcaaacccgcaccggccatagccaaaccccaatgggggacagcatgtcagtgctacgtcaccggcctcatggcgtattagctgtctttggcccctataattttccaggccatttgcccaatggtcatattgtcccggccttgctcgcggggaataccgtggtattcaaacccagtgaattgaccccatggaccgcagaagaaaccgtcaaattgtggcaacaggcggggattcctgacggcgtgcttaatttggtgcagggcgggcgtgaaacgggcgaggcattggctgcccagcctgatattgatggcttgttgtttactggcagcgcccataccggctaccacttacatcgtcaactggcgggtcagccggaaaaaatgctggcgctggaaatgggcggtaacaatgcactgatcgttgaacaggtgaaagaccgggatgcggttgtcaatcttgccattcaatctgcctttatttccgccggtcagcgctgtacctgttcacgtcgtttgctggttaaaaccggggctgagggcgatgcttttttactgcgctttaccgccgttgcgcaagcattgcgaattggccgctgggatgagcaaccggccccctttatgggtgccgtcatttcatctcaggcggcagaacggatgttggcggctcagcaacatttgctgttgttagggggggaatcattattaaacatgactcggccagatagccaaagtgcgctactgacaccgggtatcattgatattaccaatatcagcgaggtacctgacgaggagtattttggcccactggtcagtgtgatccgctacacagactttactgaggcgctgaaaatagccaatcagacccgatttggtctggccgtcggcttggtttctgaagatcgccagcaatttgaacaattgttactggaagccagagcagggattgttaactggaacaaaccattgacgggggcttccagtgctgcaccctttggcggtgtcggggcatcgggtaaccatcggcccagcgccttttatgccgcagattattgtgcgtggcccatggcatcactggagtgtgagcacttgacgttacccgcaacattatcccccggtatctcttttgatttgcccaaggtgtga

SEQ ID NO: 42140 - DNA, 948 bp, Yersinia pestis
atgttgcagttcatactccgacgtttggggttagttatcccaacgtttatcggcattactttgctgacctttgcttttgtccatatgatccccggtgacccggtgaccatcatggcgggggaacgcggtatctctgccgagcgtcatgctcaagtcatggcggaaatggggctggacaagcctctctatcaacaatatttccgctatgtaaatggcgttttacatggtgaccttggcatttcgctgaaaagccgtattgcggtatgggatgagtttgtcccgcgctttaaagcaacactggaactggggatctgcgcgatgctgtttgctatcgcagtcggcattccggttggtgtgctggcagcagtgaaacgcggttcaatatttgatcacaccgccgtggggatctcccttaccggctattcgatgcctatcttctggtggggcatcatgctgatcatgctggtctcggtgcaatgggacctgaccccggtttccgggcgtgtcagcgataccgtgttccttgatgacagcctgcctctgacggggtttatgttgattgataccctcatctggggggaacctgacgattttaaagatgcggtaatgcatatgattttaccggcaatcgtcttggggactattcccttggcggtgatcgtgcgtatgactcgttcctccatgttggaagtgttgggggaggattatatccgtactgcgcgggccaaagggctgagccgcatgcgggtgattgtggtccatgcgttacgcaatgccttgctgcctgtcatcacggtgattggtttgcaggttggtaccatgctggctggggctatcttgacggaaaccatcttctcgtggccgggtctgggtcgttggctgatggatgcattgcaacgccgtgattaccctgtggtgcagggggggtgttgctggtcgcgatcatga

SEQ ID NO: 42141 - DNA, 1608 bp, Yersinia pestis
atgacgatttccttgagaagaacagggatactgaaattcggtattgggctggttgcactgactatagcggccagtgtacaggcaaaaacgctagtatattgttctgaggggtcaccggaaggtttcaacccacaactctttacttctggcacaacttatgacgcaagctcggtacctatttacaatcgtttagtggagttcaaaatcgggactaccgaaattgaacccagcctggcggagcggtgggaagtgagcgaagatggtaaaacctacactttctacctgcgtaagggtgtgaaatggcaggataataaagatttcaaacccacccgcgatttcaatgctgatgatgttatctattcattcatgcgtcagaaagatgataaaaacccgtaccataaagtctctggtggcagctatgaatacttccagggtatgggaatgggcgacttaatcaccaatgtggtgaaagttgacgacaataccgttcgctttgaactgacccgtccggaatcgccattcttggcagacctggcgatggatttcgcctctatcctgtccgctgaatacgccgacaatatgctgaaagcaggcaccccggaaaaagtggatttgaacccaatcggtaccggcccattccaactgcaacagtaccaaaaagactcccgtattctgtataaagcgtttcctggtttctggggcaccaaaccaaaaattgatcgcctggtcttctctatcaccccagatgcctccgttcgctatgctaaattgcagaaaaacgaatgtcagattatgccttacccgaacccggctgacatcgcccggatgaaagaagacaaaacgattaacctgatggaacaaccgggtctgaacgtcggttacctctccttcaacattgagaagaaaccactcgataaccttaaggtccgtcaggcactgaccatggcggttaacaaagacgcgattattgatgcggtttatcaaggcgcggggcaagcggccaaaaacctgatcccaccaacgatgtggggctacaacgatgatgtgaaagattacgcttacgatcccgctaaagcgaaagaactgctgaaagaagcgggtctgccagatggcttctccatcgacctgtgggccatgccggttcaacgtccgtataacccaaatgcgcgtcgtatggcggaaatgatccagtctgattgggcgaaaattggtgtgaaagccaagatcgtgacctatgagtggggcgaatacctcaagcgtgccaaagatggcgaacatgaaactgtgatgatgggttggaccggggacaatggggacccagacaacttcttcgctacgctgttcagttgtgatgcggccaagcagggttctaactactctaaatggtgttataagccgtttgaagatttgatccaaccagcccgtgctgaagctgaccatgacaaacgtgtcgcactttacaaacaagctcaggttgtgatgaacgagcaggccccggcgctgatcattgctcactcaacggtgtacgagccagtgcgtaaagaagtgaaaggctatgttgtggacccattgggtaaacatcatttcgataacgtgtccctggattaa

SEQ ID NO: 42142 - DNA, 993 bp, Yersinia pestis
atgctggattttttagcgataaccctatcgggtaaacctccacaagtcatacagggtgaaaccgttaatctgaaatggcaatggctcggtgaggggatattgacactggttccgcaccgcagctacacacaatcggtggtgatctctgccggtatccacggcaatgaaacggcacccattgaaattttgaatcaattagtcaccgatttattagcgggtcaactgccgctgtccgtccgtctgttagtgttattgggaaatccaccggcgatccgcaaagggaagcggtacctcagcaatgacattaaccgtatgtttggtgggcgttatcagcactatacacccagtgacgagacgcgaagggcgagtactctggagcaacgggtgatggcatttttccaggcaagtcacacatcagagcgtttgcattatgatctacacaccgcaattcgggggtcctatcatcctcgctttggtttgttaccctaccagcagaccccttattccgctgctatgtttcgttggttgcgggacatcgaactggatgctttggttatgcacacctccgcaggagggacattcgctcactttagcagtgagcgctgtcaggcagccagttgtacgttggagttaggcaaagcattaccttttggtgagaatcaattatcacaattcagtgcgatcacccaaggattacgctccttagtcagtgatagtgccttgcctgcacgtaagacagagaacatgaagtactaccgggtcgttaaatcactgcttaggcaacaccctgattttaaactacgggtggctgaggatacggtaaatttcacacgcttcgcacaaggcactctacttacagaacaacccaatgataactatcgtgttgaacacccctatgagtggatcttatttccaaatccacatgttgcgttgggattacgggctgggatgatgttggtaaaaatgtgtgaaagtgaattaccgattacatga

SEQ ID NO: 42143 - DNA, 1260 bp, Yersinia pestis
atgaacctgttagaacatatgggaaaagcggccaaacaggcttcctggcaattggcgatgttgagtacggccaaaaaaaatcaggcactggcggtcatagctaacctattagaatcagagagccaaactattttgcaggccaatgagcgggatatggctgcagcacgcgagagtggcatgagcgaggcgctactggatcgcctgttattgacgcccgcccgcttagccgccattgctaatgatgtacgtcaggtatgccgcctaaacgatcctgtagggcgtgttattgatggcagtttgctggacagtggtttaaaactggaacgtcgacgtgtcccgctgggggtgattggtgtcatttatgaagctcgccctaatgttactatcgatgtcgctagcctgtgtctgaaaactggcaatgcggtgattttgcgcggtggtaaagaaacgcattataccaatcaggcgacagtaaatgttattcagcgggcgctggagcaatgtggtctaccggccgctgcagttcaggccattgaaagcccagaccgccaactggtgaatgaactgttacgtctggatcgctatgtggatatgttgattccacgcggcggcgcaagcttacataaattgtgccgagagcaatcgaccatcccggttattaccgggggtattggtgtttgccatacctttgttgatgaaaacgcggattttgaaaaagccttattggtgatcgaaaacgcgaagatacaacggccaagtgcttgtaactcactggagacgttgctggttcatcaggcggttgccaaaactttcctgccgctattaagtgccagaatgcacgcgtttggcgtgacattgcatgccagtccgctggcgatgccctatctggcagatggaaaagccaaagttgtggcagtagaagccgctgattacgatgatgaatggctatcactggatctaaatgtggatatcgttactgatattgatgccgccattgaccatatccgtgagcatggcactagccactctgatgctatcctgacccgttccctgagtcatgctgagtattttgtccgcgctgtcgattcatcggcagtttatgttaacgcgagcactcggttcaccgatggcggtcagtttggtttgggtgcagaagtggcagtgagcacacaaaaactccacgcccgaggccctatgggactggatgcgctgacgacgtataaatggataggttacggcgacgatttagttcgtagctga

SEQ ID NO: 42144 - DNA, 768 bp, Yersinia pestis
gtggcagaacaatcaacggttttacaattgagcgcagcaatggacgacattcctgcaccaatttaccaacgggttaaattggccattattcgccagatcagaacaggaacctggcagccccaccaacgcgtgccatcagaaagtgaactggtgaccgagttaggggtcagccgtatgacgatcaaccgtgctctacgtgaactcaccaatgaaggtttccttatccgcatgcaaggtgttggtactttcgttgctgaagcgaaagcccacagtgctctacttgaagttcataatattgccgatgaaatcgccgcccgtggtcaccgccatagcagtcaagttctgcatctggaggctcgccctgcaagccccgaagaagccatcgcgctaggcattcaaccgggtcaacaactgttctattcacaaatagtgcactatgagaatgatttccccgttcaggttgaaaaccgttgcgtaaacccaagtaccgcccccgattatatgaaacaggatttcaaccaaatcaccccgtacagctacctgacacaagccgccccgctcaccgaaggtgaacacattgttgaagccgtaatgccaagcccaatcgagcgacaactactggaactgagtgaacatgaaccttgcttgttgatccgccgtagaacttggtatgggaaagccatcgtcaccgccgcacaattgctctatccaggccctcgttatcagctctatggtcgttttaccccacaaggtacggtgacgtcctga

SEQ ID NO: 42145 - DNA, 1371 bp, Yersinia pestis
atgccagtttattttaccaagcgtgcttttttacctgatggatgggctgcagacgtgcaaattgcggtagatgagctgggggatatacagcgtatcagcactggcagtagcagcagtggttgtcaggttttatccgggccagtattacctggtatgcctaatctgcactctcatgcttttcagcgcatgatgtcggggctggcagaagttgccggtgatccacaagatagcttttggacttggcgggatctcatgtatcggttggtgcaacaactgacgccggaacaggttggtgttattgcccggcaactttatatcgaaatgctgaaaggcggatatacccaagttgctgaatttcactatttacatcatagccctgatggttccccttacaatgacataggggaaatgacggcccaattgagtcaggcggcacaagacgctgggatcggaatgactttattgccagtgctgtatagctacgcaggatttggtgctcaacccgcacagcaaggccagagccgttttattcaggataccgagagttatctcagacaacagcaggttatccgtcggcagttggctaatcagcctttacaaaatcaggggctatgttttcactcattacgtgctgttgagttaagtcaaatgcagcagattttacacgtatcggataaacagttaccggtacatattcatattgctgaacagcagaaagaagttaatgactgcctggcatggtgtggccagcgcccagttgcctggctatatggtcacttaccggtcgatagccgctggtgccttgtccacgcgacacatttggatacgtcagaattggttatgttagccaatagtcaggctgttgccgggttgtgtccaacgacagaggccaatttgggagatggtattttccccggtgttgactatatacatcatcagggccgttgggggataggttctgatagccatgtttcgctggatgttgtggaggagctacgttggttggaatatgggcaacgcttgcgtgatcaacggcgtaaccgtttgacctgtgagcggcaacccgccgtggcggatctattgtacagccaagcattagccggagggcgtcaggcttgcgggcgtcaaattagccagctagccgtaggctatcgtgccgattggttagtactcgatggcgatgatccttatattgccgggacaagatcggcatctttgttgaatagatggttatttgcggggggtaaatcgcaaattcgagatgtttatgtggcaggcaaggcggtaatcgtggatagatatcatccattgcaacagcaaactgcgcaagcttttctggctgtactgaaagcctgccaacaggaggtctga

SEQ ID NO: 42146 - DNA, 1287 bp, Yersinia pestis
atgtctgaaatctcgtcttcaaaatctgaattaaaaaagctctataaatcggttccctttacacagtatgatgtcggttgggtcatattatgtatcgggatggctatcggatcaggtatcgtatttatgcctgtacaggttggtattaaggggatttgggtctttattgctgcggttattatttcgtatcctgcaatttatttactgcagaatctctatctgcgtacactttctgaatctgataactgtactgattataccagtgtcattacgcaatatttaggtaagaactggggggtaggtctcggtattgcttattttttaatgttattgcacgggatgttttcttattccctggccgtcacctttgatagtgcctcttacatcaaaacatttggattaactgaaggcttattatcagattcaatatggtacgggttaattatcttgacagttttggttgccattgctgcacaaggtgaaaaaattctatttaaagtttcgggacccatggtttgtgtgaagtttggcatcattgtggtgttgggtgttgtaatggttccttattgggattttaacaatatctccgcttttcctgaactcttctcctttttacgcgatgtcctgttaacactaccgttcacattattctctatcttatttgttcaaattcttagcccaatgaatattgcttatcgtaaagtggaaagcgataaaagaattgccacctaccgggccatcagagcaaaccgtgttgcttatatcattttggctgttgcagtgctgttctttgccttctcttttactttctcgattagccatgagcaggctgtctcggcgtttgaacaaaatatctctgccctggcgattgccgctcaggttattcccggttcgattgtccgtatcatgactgcattattaaatatttttgctatcttgacggcgttcttggggatctatttaggatttcaggaggcgattaaaggtattgtcgttaatattatcagtcgctttatccctgaagagaatattaatcagaaagtgctacacatcggggtctgtgtcggtgtgatattaacgttatggctatgggtctcaacccggttctctattcttttcttcttacaacttggcggcccgttattcggggtggtctcttgtttaattccttgctacctggtttataaagttcctgttttacataaattaaaagggccaactatttggtttatcagctttttcggtattcttctttgtctttccccattctttaaattctttgagtaa

SEQ ID NO: 42147 - DNA, 1005 bp, Yersinia pestis
atgaatggtcgtgttcagccacgactgatgctgggcttcttactgatattgctagtcattctggcgctgggctcagctaatatgggggccttatcgctctcatttcgcacgctatggaacacctccaccaatgatgccatgtggcacatttggttgaatatccgcctgccacgggtgttattggctgtcgtggtggggtgtgcattggcggtctccggcaccattatgcaagggttattccgtaacccgctggcggacccaggtttgttgggcatcagtagcggcgcagcgctttgcgtcgggctgattatcgtgatgcctttcagcctaccgccgttactcgcgctgtatagccatatggttggggcctttatcggcagtctggctatttctactattatttttaccctcagccgttgggggcatggcaatctagctcgtctactgctagccggtattgcgattaatgccttatgcggtgcggcggttggggtgctgacctatatcagtgatgaccaacaattacgccagttctcgctatggagtatggggagtttagggcaagcgcagtggtcgacactgctggtcgcatcctccctgatcctgcctacctgtattttggggctgctacaggcccgccaactgaatttgttgcagttgggggatgaagaagcacactaccttggcgtcaatgttcggcaagccaaactacgcttactgctactcagtgccatcctgattggtgccgcggtggcggtcagtggcgtgatcggctttatcgggttggtggtgccacatctgatccgtatgcgtatcggcgcggatcatcgttggttgctacccggcgcggcgttggggggggcctgcctgctactgacggccgatacactggctcgcacactggttgctccggcggaaatgcccgtcggtctgttaaccagcctgttgggtgggccttattttctgtggctgattttacgtcagcgggagcaacgcagtggttga

SEQ ID NO: 42148 - DNA, 1038 bp, Yersinia pestis
atgaacgcatcattataccaacaatatgtacaggctaaagcagagcaccctggcaaatatgcccgtgatttagccaccctgatggggatttcagaagcagagctgacccacagccgcgtcgggcatgatgcaaaacgtttacaaagtgatgctcgtgcattattggccgcattggaatccgtcggcgaagtcaaagccattacccgcaacacctatgcagttcatgagcaagtgggccgctatgagaaccaacacttaaatggtcatgcagggttaatcctcaatccacgcgccttggacctccggttattcctgaatcagtgggcaagcgcctttacactgaccgaagagacccgccacggcgtgcgccatagcatccaatttttcgaccatcagggcgatgcattacacaaagtgtatgtgacagaacagacagatatgtctgcctgggaagccttgctggcacaatttatcatcccggaaaacccggcattgcagttagaacctttgagcaccccagaagcggtagaacctacagccgatgatgcaaccgtggatagcgaatggcgtgccatgaccgatgtacaccagttcttccaactgcttaaacgcaataatctgacccgtcagcaggcgttccgcgctgttggtgatgatctggcttaccaggtcgataacaactcactgactcagctgttgcacatcgcccagcaagatcagaacgagatcatgatttttgtcggcaaccgcggctgtgtacaaattttcaccggcctgattgaaaaagtcacaccacacaacgaatggattaatgtcttcaatcagcgctttacactgcatctgatcgaaacggccattgccgaaagctggatcacccgcaaaccaacaaaagacggttttgtcaccagcctagaactgtttgctgctgatggtactcaacttgcccaactctacggccagcgcaccgaagggcagccagaacaaaaccaatggcgtgaacagattgcccgcctaatcaacaaggatatcgccgcatga

SEQ ID NO: 42149 - DNA, 1692 bp, Yersinia pestis
atggacagagtgaaatctttatcacagcaaagtctttctttgttgttggctgtttatattggtattttcctgaatatatctgtcttttatcgtcgttttgactcattcagtcagggtatccaagggataaaagtggtatcagcaatcaccgaagtgatcgcgattattctgtttaccttttttgttatgcgattgatctcacttggtggaaggtttttttaccgagtggttgcctcgttgctggtacttatctctgtcgctgccagttattacatgacatttttcaatgtggtgattggttacggcatcgttatttcagtcttgaccacagataccgatctttctaaggaagttatcgggctgcattttattatttggatggtgttggtcagtggattgcctctgctgcttatctggaagaatagcctgcggttaacgttgctggagcaatgtttaacgcctgggcaacgtattaaacccgtattgttgatgatggctgttgtggcgctggtttggctgccgttgcgctatctggataaagctcaagctctggacgaacagctaaaaacggtggatttacccagttatggtggggtggttgctcactcttatttgccatctaactggttggccgctttaggtttgtacgcttatacccaatataatgagaagtatgacgcggcggtattgtataaccccgctgaacatcatacttatgttgcccccgcaggtattgatgatacctatgtcgtgtttattatcggcgaaacgacccgctgggaccacatggggttgttgggatactcacgtgatactacccctcgtctgagtaaagaaaagaacttagctgctttccgtggtgagtcctgtgatacctcaaccaaactttctctacgctgcatgtttgtccgtgaaggtggcgttgaagataacgcacaacgcacactgaaagaacaaaacgtttttgctgtcatgaaatcgttgggattcacatccgagttgttcgccatgcagagtgaaatgtggttctacaacaacgtgaacaccaataattactcatttcgtgagctgattgcatcagagaaacgtaacgatggaaaaccggtagatgacatgttgctggttgatgaattaaaagagtcgttagggcgttatccggtgggtaaacatttagtggtgctccataccaaaggctcacattatctttattcccaacgctaccctcgcagctatgcccgttatcaaccggaatgtatgggagttgatgagttttgcagtaaacagcagttgattaatgcttttgataacagcgtgttgtacacagattcgtttattgccaatgtgattgaccaaatgagggataaaaaagcgttggtattctatgctgccgatcatggtgaatctatcagtgataactctcacttccatggtactccgcgtgaaatggcacctccggaacaattccgagtgccattgatggtctgggcatcagataaattcctggcacagccagagcatcttgctgcttttgaacaactacaggtagaacagcgggtaggtaaaacacatcgccacgcagaactctttgattctgttttggggtgcatgggctatacctcaccggatggtgggattgatgctaaaaataactggtgccaggcccctgatcgccatcttacacccgcaatttag

SEQ ID NO: 42150 - DNA, 1533 bp, Yersinia pestis
atgaagacaataacactacgtcctggtcagatgacgctggctgacttacggcatatttatcaacatcccgtacatatcacattggatgaaagtgcctatgtacccattcagcaaagtgtggattgtgtgcaagccatattggcagaacagcgcacggcatatggcattaacactgggtttggcttgctggcctctacccgtatcgccaccgaagacttggaaaacttacagcgctcaatcgtactctctcacgcggcaggagtcggagaagcgaatgatgatgcgattgtgcgtctgattatggtgctgaaaatcaatagcctggcgagaggtttctcaggtattcggctggaggtgattcaggcgctgattaccttggtcaatgctggggtttatccgcatatcccgttaaaaggatcagtgggcgcttctggcgatttagctccgctggcacatatgagcttgctgctattaggtgaaggaaaagcccgctatcagggtgaatggttgcccgcacacacggcactggcgcaagcgggtttgcagcccctcacactggcggcgaaagagggtttggcactacttaacggcacccaggtctctgccgcttatgcattgcgtggtttatttgaggccgaagatctctatgcggccgcttcggtgtttggctgcctgacagtggatgcagcattaggatcccgtagcccatttgacgcccgtattcacgccgttcggggccaacgtgggcagattgatgctgccagcacttatcgtcatctgcttggtgaacgcagtgaaatctcagaatcacacaagaattgtgacaaagtgcaggatccatattctttacgctgtcagccacaggtgatgggcgcatgtttaggccaaatacgtcaggcggcagaggtgctggctattgaatccaatgccgtttcagataacccgttggtgtttgctgaacagggtgatgtcttgtctggtgggaatttccatgctgaaccggtcgctatggcagcagataatctggcgttggcgttggcagaagtcggttcattatcagagtgccgtatctcgttgatgatggacaagcatatgtctcagttacctccatttctggtagagaacggtggcgtaaattctggttttatgattgctcaggttacggctgcggcgttaaccagtgaaaataaagggctggcattccccgccagtgtcgatagcatcccaacatctgctaatcaggaagatcatgtctctatggcccctcgggcgggtaaacgcttgtgggaaatggctgaaaatgtacggaatatactggctatcgagtggctggctgcgtgtcaggggcttgatttgcgcaaagggctaagaacttccgccatactggagcccgcccgccaactattacgccagcacgtcacttactacgataaagatcgtttctttgcccccgatattgaagttgctagccagcttattgcacaacgtcatatgaatgagttgatgccagcaaaattactgccaagtctttaa

SEQ ID NO: 42151 - DNA, 1692 bp, Yersinia pestis
gtgacgactcaaaacagattccgagataatgagattcgagccccgcagggtacgcaactgacagcgaaaagctggctgactgaagccgcgctacgcatgctgatgaataacctcgatcctgacgtggctgagaatccaaaagaattagtggtctacggcggtattggtcgcgcagcccgtaactgggaatgctatgacaagattgttgaaagcctgatcaatttaaacgatgacgaaactttgttaattcaatcgggtaagcctgtcgggatattcaaaacccacagtaatgcgcccagggtattgattgccaactcgaatttggtacctcattgggctaattgggaacattttaatgaattggacgccaaagggctggctatgtatggccagatgacggcgggcagttggatctatattggtagccaaggcattgtacagggtacttatgaaacctttgttgaagcgggtcgccagcattttggcggtagcctgaaagggcgttgggtcttgactgctgggctaggaggaatgggcggcgcgcaacctttggccgcaacgttagctggtgcatgttctctgaacatcgaatgccaacaaagccgcatcgattttcgtctcaaaacccgttatgtggatgagcaagcaaccgatctggatgatgctttagcgcgcatcgagaaatataccgctacaggtgtcgcggtttctattgcactgtgcggcaatgcggctgaaatcttacctgagctggtgcgccgtggtgttcggcctgatatggtcaccgaccaaaccagtgctcatgatccattgaacggttatctgccgaagggttggaattgggaagagtaccgccaacgcgctcaacatgagccagcgctggtgatcaatgccgcgaaaatctccatggcagagcatgttgaagcgatgttagccttccacaacatgggtatcccaacctttgattacggcaataatatccgtcaaatggcccacgatatgggggttattcgtgcctttgatttccccggttttgttccggcgtatattcgtcctcttttttgtcgtggtattggcccattccgttgggtcgcgttgtcgggtaacccagacgatatttataaaaccgatgctaaggtcaaagcactgatccctgatgatgcacatttgcatcattggctagatatggcgcgtgagcgtattcgttttcaggggctgccagcacgtatttgctgggttggtctaggccagcgtgccaaattaggtttggcatttaacgaaatggtgcgcagcggcgagctctctgcgcccgttgtgattggccgcgatcatctggattctggatcggttgccagccctaatcgtgaaacggaagcgatgcaggatggctccgatgcggtgtctgactggccgctgctcaatgcattactgaatacggctagcggtgcgacgtgggtatctctgcatcatggtggtggcgtagggatgggcttctcgcaacattcaggcatggtggtggtttgtgatggcagtgatgaagccgctgaacgtattgccagagtactacataacgatccggctacgggtgtgatgcgccatgcagatgcgggttatgacattgcggttaactgcgcgcaagagcaaggacttaacctaccaatggttgccgcaactcaggggaaaaaatcatga

SEQ ID NO: 42152 - DNA, 1017 bp, Yersinia pestis
atgaaagtcttagtgacaggggcaaccagtggattggggcgcaacgcagcacaatggctgttggaggcagggcacgaggtctatgctatcgggcgggatcaactggcgggggaagaactgcgcaagttgggcgccacctttatcccgctggatctgaccatgaccacgatggaggtctgccagcaatggctcaaaacgtgcgatgtggtttggcactgtgccgccaaatcagcgccgtggggtaacccacaggattttcaccagaccaatgtggtggtgacgcataaacttgctcaggccgccggtcgcgagggggttaaacggttcattcatatctcatcacctgccgtgtatttcgattttcgccatcatcatgatctgcctgaaacataccgggccagccgcttttccagccactatgccagcagtaaatatgcggcggagcaggtgttgcatgaatgtatcgctcattatccggacaccacgtatgtgatcctgcgcccacgtgggttatttggtccccacgatagggtgattgtgccgcgtttgctgcaacaactgagcagggatcgcaatgtgctgcgtttaccgggaggagggcaagcgcagcttgatctcacgtttgtgttgaatgtggtacatgccatgatgttagccactgataacgacgggctacgctccggtgcgatttataatattaccaatcaggagccacaacggctggtgacgatgttggattctctgttgaatcagcagcttcacattaactataccttgcagccggtgccctactcgttactttctgtcgtggcggcagggatggaactggtcgccagtatgacccagaaagaaccactgttaacccggtacagtgttggcgcagtctattttgatatgacccttaattcagaacgtgccattaatgaactgggttaccggcctcgttactcgatggcggaggggattgtgctggctggcgagtggcttagcgcgcagaggagtggccagcatggctaa

SEQ ID NO: 42153 - DNA, 960 bp, Yersinia pestis
atgaaaaatttaagctttgtcgcaggcctggtgatcctactgggcctgatgatatgcagcctattcatcggggccgggcatgttacgttcgctaatctctggtcggatcccgatatgcgcgacatcttcttcatcagtcgtgtgccgcgaacgctggcattggttctggctggcagtgccatgagcgtttccgggctgattatgcagatgctgacacagaatcgcttcgttgagccctcgattgctggtaccacacaatcggccagtcttggcttattgttggtgatggttttcagtccatcagcctcggtgatgatcaagatgctagtggccacgttattcgcgatgggtggcaccgtcctgttcatgatgttattggcacgcatgagaatgaaatctgcgctgatggtgccactgaccggcattatgttaggggcagtttttagtgccgtaaccacattcctggcgatggaattcgacctattacagtcgttaggcagttgggagtccggtgatttttctggtgtattacagggccgctatgaattgctgtggattgtgggcgtcctgacgctggtagcgtgttttatcgctgaccgcttcacggttgcgggtatgggccgggatttctcggtcaatgtcggcttgaattatcaaagagttatgttgattgggatgtccatcattgccatcatcagtggcgtcgtggtagtcgtgattggtgtgctgccttttcttggtttgattatccctaatattgttagtatggcgatgggcgataatctgcgccgaaccataccttgggttggcctttgtggtggcggcttggttgtattatgcgacattattggccgattaatcagttacccttttgaaatccctgccagtgttattctgggcgttattggcgcactcgttttcctgttattaattgttaggacaaaacgtcatgcgggctga

SEQ ID NO: 42154 - DNA, 246 bp, Yersinia pestis
atgatgcgttgtcctgtgtgtaaacatgcgtctcatacccgcgccagtcgctatttatcagagcagaccaaagaggcgtattatcagtgccaaaatatagaatgttcttgtacctttaaatcgattgagagtgtggataaaataattactcgccctccggttaaagagcctgaaataatacctaatgttattctaccagagcgaaaagtattaaatcgctacggttctaacgcacgaattcattaa

SEQ ID NO: 42155 - DNA, 1854 bp, Yersinia pestis
atggcggataagtcagttgaattaacacccgtggtagaggcaccagttgtgttttcattgccttactttgagtttttggtctgtacccggcgttatgaagatgcgggcagattattgatactgatgttggagaagctagatactcaatatgggcgctgggatgttttttctctgaataaacagccaatacagcaacaagagtattattgtaatcggctagccgccgctatcggatgcttattttctgatcccggatttgtgatttcggaaaccggtttccttcagctaatcaacttccaccgttggattgcgttgatttttgcagcatcgacttttggccatgccgatcatgtgatcactaaccttaatgaagccggaaatgggtgctcgcacccattgcgattcgagcgaaataacttccttaaattttgtgtgatgtatttacccgaatcaggtattccgctgcaaccggatatattatggcaatttaatccgcaggcaacagccgcattatttctggcgttattatctccccgaattttaccgagtgcggcggggcatgaaaagcgtgagactttattagcgtggttacctgaaaaactcttaacactgatcagtcttgaggggttacctgagcgtattttgcatgatgtgtatatgcattgcagttatgccgacatggcgaaaaaacacaccataaagcggagtattaattttcatttacgtaaaaccatgctcaaaaatggattatctgatatgaatgaactgccaccattgcgtagcaaaccattgatgttagtgattttagagtggtttaacagtggtcattctatctatcgaacgcactccagtactctgcgggcggcccgtgatcagttttcgactcatggtgttgcgattgcagaggcaacagatgatattacccgaaaagtatttgatgatttcactgaggttagccgaacgggggcggtcgaaacgattatggcgctggcacaacagttacgcccggatgtcatttattttcccagtgtggggatgttcccgatgacggtggcgttgactaatttacggttggcccccttgcaggtgatggcgttaggccacccggcaaccacccattctgactatattgatgcggtgttggtggaggaagactatttgggcgatatcgcatgcttctccgagaaggtggtttctttacctaaagattgcctaccttatgtgccgccagccaatatcactcaaccggaacccatacagcaatttgttcagcgcgaagcggtacatattgccgtttgtgcttcagcgatgaaaattaaccctcgttttttagctgcctgtgccgaaatcgccttacgatccccgctacctatcatatttcattttctggttggtttttgctggggtataactcatagggttatggaaaaagcggttaatgagatggtgacttcagccaaagtttatgaacacttaaattatcagaattatttacaggtaattaatcagtgcgatctgtttattaatccgtttcctttcggcaataccaatggcatcgtcgatacggtgcggcaggggttgcctggtgtttgtctgagtggggaggaagtccatgagcatattgatgaagggttatttcgccgtctgggtttggctgaagaactgattacacataatgtggagcaatatattacggcgacggtacggttaattacggatacaaactggcgcaatggtctacgccgtcagttgttacaaactcaacccgataatgtgctgtttaccggtaaacccgagcaattcgggcagatcgttcgtgccttgctggataacggccatcaggatgtgaattag

SEQ ID NO: 42156 - DNA, 1194 bp, Yersinia pestis
atgccactatcagatagacagattcgccgtgctaaaccacaagaaaaagcctataccctgagtgacgggcaagggctatcactcttaattgaacctaacggcagtaaagggtggcgctttcgctatcgttttgccggtaaagcccgattaatgtcattagggacttatgatcttgtttctcttgctgaagctcgctctaagcgagatgtggcacgtaaacaggttgcagatggaacagatcccgcagaggtgaaaaaggctgagaagttggcgcagcggctttcatcggaaaactcttttgaggccattagccgtgagtggcataaagccaaagccgatcgctggtcattgggctatagggaagaaatcatgagtacctttgaggcggatatattcccgtatattggtaaacggccaattgcagaaatcactccgctggagttacttgatgtgcttcaacgtatcgaaaagcgtggagcgttagaaaaaacgcgcaaagtacgccagcgctgtggtgaagtatttcgttatgccattattaccggccgtgctgaatataatcccgcccctgaccttgccagcgcattaagtacaccaaagaaacagcactacccgttcctgtctgccgaagagatgccatattttattcgtgatctagagggttacaccggcagcatcataaccaagaacgcggcaaagatacttatgctaacgggtgtgcgaactaaggaaatgcgttttgctacttggcaggaaatcgatcttgagggcggcttgtgggagattccagcagaacgaatgaagatgcgccgcccccatatcgtgccgctgtctacacaagttatagcgctatttaaacagctcttacctatcaccgggcattacccttatattttcattggactgaatgaccgtaaaaagcccataagtaaagaaacagtcaatcaggtcattgaattactgggttataaaggccgtgcgacgggtcacggatttagacataccatgtcaacgatattgcatgagcagggctatgatagtgcatggattgagctacaattggctcacgttgataagaacagtattcgtggtacttacaatcatgcgcagtatcttgaaaagcgaagagagatgttgcagtggtatgctgatctcatttttaattttttcaggaaaaattatgagcgcatctaa

SEQ ID NO: 42157 - DNA, 1038 bp, Yersinia pestis
atggaatccacccatattggctttcccattgagacagtagccgtgttcatcctgctttctgtcggtgccatttgtatcgatcttttcatgcaccgccatgataagccaatctctctgaaaagtgcggcgttgtggtctctcttctgggtcgccatcgcttttgtattcgcaggcttcctttacctgcatcacggtgctgaggcagccagtttgtttgttactgggtatgcgcttgaaaaagtgttatccattgataacctgtttgtcatgatggctattttctcttggtttgcggtaccagaccgtttgcgctatcgcgtactgtattgggggattatcggggctatcgttttccgtggcattttcgtcgccattggtacgggcttgctgatgctagggccgtgggttgaggttgtcttcgcgatagttgttgcctggacggcagtaatgatgctgagaaaaggcgatgatgacgacgccattgaggattattcccaacatatcgcctatcgtttagtgaagcgtttcttccctatttggccaaaattgagaggcaatgcctttatattgagccagaaagaggttgatgcagaactggctaaacctgaaaatgcggatgtgcaagtaggccgtaaaggcggtgttgcacgttatgccacgccattgatgctctgtttggccgtggttgaactgtcagatgtgatgtttgcttttgactctgtaccggcggtgattgcggtcagccgcgaaccgttgatcgtctacagtgcgatgatgttcgcaatccttggcttgcgtacactgtattttgtacttgaagcgctgaagcagtatctcgtccatctcgaaaaagccgttattgtgctgttgttcttcatcgccgctaagttgggcctgaatgcatctgaccactttttcaatcacggctatgatatctcggccaatgttagcctgttcgtggtcattggtgtactggcgatcggtattgttgccagcttcctgttccctgaaaaggattcaaaggaaggacagcactaa

SEQ ID NO: 42158 - DNA, 996 bp, Yersinia pestis
atgaaatttaagaacattttactctccgcatgcgctgcactggtaatgtttagtcagcctggatttagcaaagaaattaaaatcggtatggcgattgatgacttacgtcttgagcgctggcaaaaagaccgcgatatttttgttaacaaggctgaatccctcggtgctaaagtttttgttcaatcggccaatggcaatgaagaaacacaaatggcgcagattgaaaatatgattaaccgtggtgtcgatgtcctggttattattccctacaacgggcaagtattaagtaatgtgatcgctgaagcaaaacgggaaggcataaaagtgttggcttatgatcgcatgataaataacgctgacattgatttctatatctcctttgacaatgaaaaagtaggtgaattacaagctaaaaatttggttgaacgggtacctcagggcaattatttcctgatgggcggttcaccagtggataataatgctaaattattccgtcaggggcagatgactgttcttaatccattgataaaggacggtaaaatcaagattgtaggtgaccaatgggttgatgcctggctaccagaaaatgcgttaaaaatcatggaaaatgccttaacggcaaacaataacaatattgatgctgtggtggcctctaatgatgcaaccgccggtggtgccattcaggctttagccgcacaagggctagccggtaaagtggctatttctggtcaagacgcagatttggccgctatcaagcgtattgttgccggtacgcaaaccatgacggtatacaagcccatcagtaaattggccaatgatgcggctgagatcgccgtgacattgggtaatggtgagcaaccgaaagcaaacagcacgttaaataacggtatgaaagatgttcctgcttatttgttaacacctattcaggtcgataaaaataatattgatagcaccatcatcgctgacgggttccacaaaaaagcagatatttactaa

SEQ ID NO: 42159 - DNA, 1320 bp, Yersinia pestis
atgcaatcttattttaatgaattagaacaagtgcgctacgaaggtagccagagcacgaatcctctggcgtttcatcattacaacccggatgaaatgatccttggtaagcgaatggctgaccatctgcggtttgccgcctgttactggcataccttctgctggggtggggccgatatgttcggtgccaatgcttttgatcgcccatggcaacaacctggggatgcactggctctggctaaacgcaaagccgaggttgcatttgaattcttccataaactgaatgtaccgtattactgcttccatgatgtggatgtctcgccagaaggcgcgtcactacaggaatatctgaataacttcgccgtaatgaccgatgtactggctgaaaaacaagcagccagtggtgtgaaattattatggggcacggctaactgctttacccatcctcgttatggtgctggtgccgcgaccaatcctgatccagaagtatttagctgggcagccacccaggtctttacggccatgaatgccacccgccaactcggcggtgaaaactatgtgttatggggcggacgtgaaggctacgaaacactgttgaataccgatttgcgacaagagcgtgaacaaattggccgctttatgcaaatggtcgtcgaacataaacacaaaacgggtttccaggggacactccttattgagccaaaaccgcaggagcccactaaacatcaatacgattatgacgtcgcgacagtttacggcttccttaagcagttcggcttagaaaaagagattaaagtcaatattgaagccaaccatgccacgctggcggggcactctttccatcacgaaattgccagtgccatcgccttaggtatttttggctcagtggatgctaaccggggcgatccgcaactgggctgggataccgatcaattcccaaacagtgtagaagaaaatacactggtgatgttcgagatcctcaaagcaggcggttttaccaccgggggcctgaattttgatgccaaagtgcgccgccaaagtaccgataaatatgatctgttctacggtcatattggcgcaatggacaccatggcactggcgctaaaatttgccgccaaaatgattgaagatgggcaattagatcagatcgttgccaaacgttatgccggttggaatagcgagctgggccaacagatcctgcaaggtaaaatgtcgctggaagagctctcccgctatgccagtcaacataatctgaacccgcagcaccaaagcggtcatcaagagttgttggagaataaggttaaccgctatttatttggttga

SEQ ID NO: 42160 - DNA, 558 bp, Yersinia pestis
atgtctaacgttaagaaaagcacttttattattgctttagcaactttatctgttatttatcaggctttagctgctgatgcagggaatgggcgtattaagttcactggaacggttattaatgcaccgtgctcaattgcattagattctactgatattaatgtagacctagggcaggtcgcgaatagggttctggagacgggtaacaaatactctcagagcgtacggtataacattaatctgcaagattgtagcctgacggctcaagggagtgggggggccacttatcctgcactgtctaaagtcaatgtcaccttcagcggtattgctgatgcggcggctccagccctgctggctaacaccggtagcgcgaaaggcgtgggtgttcgccttattggcactgatgacgcgctactcaaagtgggtgatacgagtcctgatattaatctgacatctggtccgaatcagattgtattttctgctcgtattgaagccaccagtgcgccagtaactaccggtactgttgtctctcaggcaacctatgctctgaattataaataa

SEQ ID NO: 42161 - DNA, 2481 bp, Yersinia pestis
atgagaataattaaaaaaattcctatagcaatgactacatcattgatcatgctcagtggagcagtcagtgctattgattttaatactgatgcaatggatgctaacgacaaacagaatattgatctttctcattttacgaacgttggctatatcatgccgggtgagtatcggttggagatcaacgtcaataatcaccgtattcccgagcaggtgatcgctttttatgcccgtgatgatgaaccgaatagcagtgaggtgtgcctaccggaagcggtggtggaacagtttggtctgaagcctgatgtgctgcaaaagatcacattctggcatgaggggcaatgcgcagatttgcgtgagctggcgggattaaccacggaggttgatttagcgaccagcacgttagctatcaatgttccgcaagactggatggaatacagtgacagcaattgggtgccgtcttctcaatgggatgaggggatccctgggtttctgttggattacaacgtgaactcgctgtttagtaagccgaaagagagtggttccacccggaatatcagtctcaacggtacgtcgggtctgaatgcgggcccctggcggttacggggcgattatcaagggaactacagccacaacagtggcgagcagaactcgtctaccagtacatttgactggagccggatctatatgtatcgggcgatcaagtcactggcagctaccttgagcgttggtgaaaactatttcgcctccagccttttcgatacgttccgttatgccggagccagtttgtccagcgatgaacgtatgttgccacctaatttacgcggttatgcccctgaggttagcgggatagccagaaccaacgccaaagtgacggtctcccagcaggggcgcatactgtatcaaaccacggtggcctccggtccttttcgtattcaggaactgagtgattctgtttccgggcggctggatgtcagcgtggaggagcaggatggcacggtacaaacttttcaggtggagacggctgcggttccctatctgacccgccctggtgcaatccgctataaaacgtcggtgggccagccctcaacgctgaatcatgggacggaaggcccggtctttgccagtggcgaattctcttggggggtcagtaatcgctggtcactgtttggcggggccattggctcgggtgattacaatgccgtgtcggttggggttggccgtgatttatatgcatttggtgccatttcaacggatatcacccaaacccgtgcatcgggccttcccaaccaagagacgcagagcgggaaatcgttgcgcgtcaggtatgccaagcgctttgatgaactgaacagtgatatctcgctggcggggaaccgtttttttgaacgtgaattcatgtcgatgaatcagtatctcggcacccgttatttcgataatgaccttgggcgcaacaaggaaatgtatacggtgacggcgagtaaaaattttcctgatatccagaccaatatcaatttttcatacagttaccagaattattgggatcagcccacgtctaacagctacagcgcgacggtcagccacgcttttgatgctttttctctcaaagatatgacggtcaacctttctgccagccgtagcaaaaataacggcgtgaatgatgatgtgctgtatctgagtttttcggtgccattaggcaatcaacaaaccctcagctacagcgggcaacataatggtcaagggaacaaccagaccgtgaattattctaacagctcggctatcgatagcagctaccggttatccgcaggggttaacaacagcaatgataatggtgcgcgcggccagttcagcggtttttatattcatcgcagcagcattgctgaaaccagccttaatgtcgcttatgcgcaggatgattttacctcgaccggggtttctatgcgcgggggcgcgacagttactgcgaaaggtgcggcattacacggccccggtatgagtggcggcacccgcctgatggtcaataccgatgatattgctggcgtcccactggaagagcggaatattcgttcaaaccgttttggtattgctgtgctgaataatattaacagctactaccgtacagatacgcgtatcgatatcaatcagttggctgatgatgttgaagttaagcagtctgcggtggagttcgccctgaccgaaggggctattggttatcgccgtttcgccatgatgaaaggggagaaggtactggcaaccatcagcctgaccgacagtagccatccgccttttggtagtttggtcatcagtgccaaagggcaggaactggggatcgttagcgatgacggttttacttacctgagtggagtggagccaggagaaacactggatgtcgtttggagtggtgctaagcagtgccaggtggcgatcccagcagtaatacagccgcaggcgcaaatattattaccctgcatatccgttaactaa

SEQ ID NO: 42162 - DNA, 720 bp, Yersinia pestis
atgaagaagctctcattaatcgcgttgaccagcacagtggtattcaccagttataccgccaatgctgcgattgcattagaccggacgcgaattatttataacgggcaggataagtccattagcctgaatatcagtaatgaaaataaaacactgccctatttagcacaggcgtggattgagaatgaacaacagcaaaaagtcaccaccccgttagtggcaacgccaccagttcagcgagtagaagcgggtaagaaaagcgcggtgcgtatctctgccacccctgaggcgctgaaattgccacaagatcgcgagtcactgttctacttcaatctgcgtgaaattccgcctcgcagtgaaaaatctaatgtcatgcagattgccttacaaaccaaaatcaaactgttctaccggccagaagggattacccctgctacgggccaaatctggcaggaacaactggttctgcataaaacggcgcaaggttttcggctagagaaccccactccctattacattacggtcgttgggctggcggagaaaggtaagtcatcggctgacagcaattttcaacctttgatggttgcgcccaaatccagtgctgagctgaaatctgccagtttcaccgcccccgtcctgacctacattaacgattatggtggccgaccagaactgagtttcagttgcagcggcagtacttgccgggcagctaaagcgatttaa

SEQ ID NO: 42163 - DNA, 1107 bp, Yersinia pestis
atgaaaaaaaatatattcctcacgttacgcagtgagaggtataaggcgggactgctgttgttgctgctactcctgttatgtaccaccagtaaaccgagttttgccgcactgcaagttaactcttgttctcttgctgtatcgggggccggaggggaaacaccgtttgtcataaaagcactgccagtcacgttgacgaatggttttgtcttggggagcatgaacttcagtgtcgtcacgacattcacaaaaacagggacgacagcagattatttatacctcggtggttggtcgatgcttgctgggggggcggttatgcctgtttctaccggtgttccaggggtgaagatgtcggtgaatgtcagtgacgctttattcgggggatatgaatgggggaatacagagaaggcaactcagtccttgtttgtaccagggacaaaaataacgattgctaatcgagtcacggtccaactcattgtgactgatgccagtgtttatcaagggggagtgattaattggtttaatgtggcgagaagttttgcgttagtttcaggtaatgctcaggtctggtcgactaaaagtgttgctactggtggctcacgttgtggggatatggtgacttttaatatcgggtcaacaaatatcgtattgccacctcccactgtggcgacgtgtgatctgggggcgaccgatattgtggttgcactggacccgattgatacctcttccctacaaacgcaaggtgaccgggcgggcggacaagctttttcgatcccactgggcagttgcgctaaagatgctaaaccctatatcacttttaccgacagtagtaacaaggctaaccgtaccaatatactgagtttatcaccgagcagcacggcgaccggtgtgggccttgtgcttgaaaaaagtgacggcaatctggtgacatttggcgcagaaaacgccagtgtcagcgccagtaatgtggggcaatttttgattggtacctcaactgccgcaggagggagcatgcctttaaatctaacggctcgctatattcgcgctgaaggggtgttaaagagcggtaatgtgaaagcggatgcaatctttaccgtcgcctacccttaa

SEQ ID NO: 42164 - DNA, 1014 bp, Yersinia pestis
ttgggtcttattttatctctttccggctgcgaacccgcagaggaaaccaacttccatccattccctatcgatgagaatcacagtacatcatcgccgtggtcccgtaccgtagacacagtgaaaggcccggtgacactcacccataagccagcccgtatcgtctccaccagcatcaccattacgggtaccttgctggcaataaatgcacctatcattgccagtagtgctaccgaacccaatacgacgctagccgataataaaggattctttactcaatggtcggatattgcacgggcccgtcacttaatcccgatgtaccagaccgaacccaatattaaagctgtcgctaagatgcggccagacttaattattatttccgccactggtgacgattccacattggaattgtacgatcaactgtcggccatcgccccgacattggtgattaattacgatgataagagttggcaagaactgacactacaattaggccaggcgacgggccatgaaggggatgccgaacaggtgattgataaatttgcccgccgactcaatgaagtaaaacagaaaataaccctaccaccgcaacccgtttcagcatttgtctatcaggaggtgagtggtagcgccaaactgtggacggaaaattccgcacagggaagattgttattggagctgggtttcacgctggccaatgtgccagacacgctgaaggacaacacccatacagagcaccgtaaagatatcattcagttaggtggagatgagctagcacagggcctgaacggtaagactattttactcttttctggcgttcattctgcaattgacgcattgaaaagtaataagtttttaaccaatcttccagcgattcagcacgataacgtttatgcggcaggttatgatactttccggttagattactacagtgcgaataatttgttgacgcgaattgagtcaatgtttaagggaaaaaaggacagcgaacccacctatcatgagagcagaacctaa

SEQ ID NO: 42165 - DNA, 2478 bp, Yersinia pestis
atgtcaggttggcgtaaaatatattataagttactgaatttaccactcaaattgttggtaaaaagcaaggttatccctgcagatccggtctctgagctagggctagacccttctcgtcctattctgtacgttttaccttacaattctaaggctgatttgctgacgttacgggcacagtgcttggcgcaagatctgcccgatccattgattccattggaaatcgatggcgtgcaattgcccagccatgtgtttatcgagaacgggccaagagtctttcgctactatgttcctaaacaagaatcggtgaagctattccacgattatctggatttacatcgtaataatccggcgctagatattcagatgttacccgtttccgtgatgtttggccgttcccctgggcgcgaaggccacggtacgccacatctgcgggtgcttaacggtgtacagaaattctttgctgtattgtggttggggcgcgacagttttgtgcgtttttctaccaccgtatcgctacgccgaatggccagtgaacacggtaccgataaaaccatcgcccataaactggcacgtgtggcgcggatgcacttctctcgtcaacgtttggccgcggtaggtccgagtttacctgcccgtcaggatctgtttaaaaaactcttggcctctaaggctatcgagaaagctgtcgctgacgaggcgcggtcgaaaaaaatctcccatgaaaaagcacagcaaaacgccatcactctgatggaagagattgcggctaatttctcctatgaagccgtgcggttgtctgatcgggtacttagctggacgtggaaccgtttgtatcaggggattaacgttcataatgcagagcgggtccggcaattggcacaagatggccatgagatcgtctatgtaccttgtcatcgcagccatatggattacctgctgctctcctatgtgctctaccatcaggggctggtcccaccgcatatcgccgcagggattaacctcaacttctggcctgccgggccaatcttccgccgtttaggcgcattctttatccgccgtacctttaaaggcaataaactctactcaacggtgttccgcgaatatctgggtgagctatttactcgtggctattccgttgaatactttgttgaaggggggcgttcgcggactggccgcctgttggagccgaaaaccggcaccttgtcgatgacgattcaggccatgttacgtggtggcacccgccctatcacgttggtgccgatttacatcggctacgagcatgttatggaagtggggacttacgccaaagagttgcgcggtgcgataaaagaaaaagagaacctgttacagatgctacgtggcttacgtaagttgcgtaatctcggccagggctatgtgaactttggcgaacccctgccattgacgacctaccttaatacccatgtgccacagtggcgggatgccatcgatcccattgaagcacagcgcccaagttggctaacaccggcagtgaatgatttggctaatcagattatggtccgaatcaacaatgcggcagcagcaaatgccatgaatctctgttcaacggcgttactcgcctcacgtcagcgttcactaacccgcgagcagctacttgagcaacttgattgctatctgcaattaatgcgcaatgcaccctatgcaaaagatactaccgtgccggataaaacaccggaagagttgcttaatcacgccttgaatatgaataagtttgaggtggagaaagacaccatcggtgacatcatcatcctgccacgggaacaggccgtgctgatgacctattatcgcaataatattcagcacttactgatattgccatcgctgattgccagtatggtcatgtaccaccgccggattacccggacggagttactgcacaaaatcagcatgatctatccaatgctaaaagctgaactgttcctgcattacagcaaagagcagctaccagagactctggatacattgatcgatgagctggctcgtcagcagttaatttgtgataaaggcagcgaattggtcctgaatccggcacgcattcgcccactgcaattgctggccgcaggtgtgcgggaaacgctgcaacgctacgcaatcacactttcactcctcagcgccacccccagtatcaaccgtggggcgttggagaaagagagccgcattatggcgcagcgcttgtcggttctgcatggtattaatgcgccggaattctttgataaagcggtcttctcaacgctggttgcgaccttgcgtgaagaaggctatatcagtgatagcggtgatgccattcaggaacatacgctggaagtttacaatatgctgagtgcgttgatgaccccagaagtgaagctgactatcgaaagtgtcagtatgccagcggagaccagcaatcagccagaagctccagagacaccagagcctgagggtaaaacggaatcctaa

SEQ ID NO: 42166 - DNA, 372 bp, Yersinia pestis
atggcgaatcaatcaacaggacttacccggatctataaagccgcgggttatacggtgaaagggttaaccgccgcctggaataatgaagcggctttccgtcaagaaagcgttgctgccgtcatcgctatcatactggccttctggttggatgtgggtgccatagcgcgcattttattaatttgcagcgttgttttggtgctcattgttgaagtcattaacagtgcgattgaagcggtagttgataggatcggtagtgaatttcatgcgctttctggacgggcaaaagatatggggtctgctgctgtgtttttgaccattttgatggcgctattcgtatggataacagtactctggcagcatgtcgctcgctaa

SEQ ID NO: 42167 - DNA, 1398 bp, Yersinia pestis
atgaagcctgcctcatcactcactatcagcgagatccaacaagccctgcacaagggcgaattatccgcacaagcgatcgcacagcagacgttggacgccattaccgtcgccaatccgctcatcaacgcttatacccatatcaccgctgaccgtatgcttagcgaagcttgtcggctagatacgctacgcgccaaaggccagccgctgccagcactggcggcagtcccttatgcggtcaagaatctgttcgatgttgccggagaaacaaccctatcaggtgccagcttattttgtgatcaagcccccgccaaacaggatgcctgggccatttcatgcctgagccgccaaggagccatgctctccggcatgttaaatatggatgcctatgcttacggttttactaccgagaacagccattatggtgccacccataatccacacgatctgaaccgcattgcagggggatcttctggcggatctgcggcagcggtcgccgcagggctcgtgcacttttctctcggcagtgatactaacggttcgatccgggttccctcctcactgtgtggtatttttgggctgaaaccaacctttggccgcctgtcacgccgcggcacccacccatttgtcgccagtctggaccatatcggcccaatggcacgctgtacgcaagatttggcggtggtttatgacgtgatgcaaggcatcgatactcaggataattttcaagccgatcaacccgtcacgccgtgccaaaatttactgacgcgtggtcagcaagggttaagaagcgcggtgctgggcggttactttcatcaatggagtgatgatgacgccaaagccgcagtgctggcggtcgcaaaggcgcttgaggctaacgcggaggtcgagatgccgcagagtgatttagcccggtcagcggcatttattatcagtgccagcgagggcggcaatcaatatctgcccgccttgaggaaatcacctcaacgttttgaacccctatcacgggagcggttattagccggagccatgctaccggcaacttggtacgtacaggcccagcgtttccgtcatcattttcgccaacacattttgccgctgttcgagcactgggatattttgattgccccagcaacgccatgcagtgccacgcttatcggccaggacacgatgaggattaatgatatggacctaccgatccgcgccagtatgggcatattaacccagccaatctccttcctgggtctgccagtcgtgagcgtacccttgaaaaccacccgcggcttaccaattggcattcagttgattgccccaccatggcgagaagatttatgcctgcgcgcggcttatgcgctggagcaacaagggttggtcagcgcgccggtgagtactgttatttga

SEQ ID NO: 42168 - DNA, 513 bp, Yersinia pestis
atggaaagttcattctcccccatagaacagatgctgaactctcgagcaaaacgtcagaaggatttcccctaccaggaaattctactcacccgcttgagtatgcatatgcacagtaaattgctagaaaatcgcaataaaatgctgaaagcgcaaggaattaacgaaaccttgtttatggcattaattacgctagacgcccaagagagtcgcagtatccaaccatcagaattgagtgccgcgttgggttcttcgcgcacgaatgcgacgcgtatcgctgatgaattagagaagaaaggctggattgagcgtcgggaaagccataatgaccgccgttgcctacatttgcatctcaccgaggctgggattgagtttttacatcaacttctcccgccacaacataaatgcctgcattttctttggtcgaccctgacggagcaagagcagcaacagcttgaaatgctgacccgtaagttgttaacccgtttagatcagatggaaatatcggaacagtaa

SEQ ID NO: 42169 - DNA, 1038 bp, Yersinia pestis
atgcacgaagctcagactttttccagtacgccggccaccaagccgcaataccccctgcaacgcttctccgtcgcgccgatgctcgattggacggatcgtcattgccgttattttcaccgtctgctcactaagcaagctctgttgtataccgaaatggtgaccaccggcgcgattatccacggtaaagccgattatctggcttatagcgagcaggaccatccggtcgctttgcaattagggggcagcgatccacaggcattggcgcactgtgccaagctggctgagcaacgcggttataacgaaatcaatctgaatgtgggttgtccgtcagatcgagtacaaaatggccgctttggtgcttgtttgatgggggaggccgatctggttgccgattgcattaaagctatgcgtgatgcggtagctattccggtgacggtaaaaacccgtattgggattgaccaactggatagctatgagtttctatgcgaattcgtgcaaaccgtcgcagaacgtggcgaatgcgaaattttcactattcatgcccgtaaagcctggctctcagggctaagcccgaaagagaatcgtgaagtgccgccactggattatgagcgtgtttatcagcttaagcgtgatttccctgcgttgacgattgccattaatggtggggtgaaaacattggctgaagctaaagagcacctcaagcaccttgatggcgtgatgatgggccgtgaagcctatcagaatccgggaattttgacgcaagtagaccgcgagctgtttgatcctaacgcgccagtggttgatagcgttaaagccattgaggcgctgtatccttatattgagcaggaattgtctcaaggggcctatttgggccacataacccgccatattctgggtattttccaaggaatccccggagcgcgccaatggcgtcggcatttaagcgaaaatgcccataagcccggagcgggggtttctgttgtggaggaggctttagcgctggtatccccttcgtactacgaatccgtagggggttag

SEQ ID NO: 42170 - DNA, 1407 bp, Yersinia pestis
atggcagcgaaaaaaccaaccaacaagatgaccgagccacgagaccgccagatggaagggctgaagcttccgccgcattcgctggaggctgagcagtccgtgttgggcggtttgatgctggataacgaacgttgggataacgtatcagaacgtgtcgccagcaaggactttttcagccgcccgcatcgccggatctttactgaaatgcagcgcttgttggaaaacagcaagccgatcgacttgatcaccttgtccgaatcgctagagcaaaaaggcgatttagactcggtggggggctttgcctatctggccgaactatctaaaaacacgccaagtgcggcgaatatcggtgcttatgccgatatcgtgcgtgaacgtgccgtggttcgtgaaatgatctctgtggcgaatgagatcgccgatgccggctacgatccccaagggcgcagcagtgaagatctgctggatttggcggagtccaaagttttccaaatcgcagaaagccgcgccagtaaagatgaaggtcctaaaagcgttgatcgcattctggaagataccgtcgcccgtattgaacaactttatcagcgcccacacgatggcgtcactggtgtttcaacgggctttactgatctcgataaaaagaccgctgggctacaaaaatccgatctgatcattgtggcggcccgtccatcaatggggaaaaccacctttgcgatgaacctgtgtgaaaacgcggcgatgatgcaggacaaaccggtgttgatcttcagcctggagatgcccggcgatcagatcatgatgcgtatgctggcatccttgtcacatgtcgatcagacccgcatccgtaccgggcagttagatgatgaggattgggcgcgtatttccagcaccatgggcatattgatggaaaaacgcaatatgtacattgatgactcctcgggtctgacaccaacggaagtccgctctcgtgcgcggcgtatcttccgtgaacacggggggttgagcctgatcatgatcgactacctgcaattaatgcgggtgccgtccttgtcggataaccgtacgctcgaaatcgcggaaatttcacgctcactgaaagccttggcgaaagagctgcaagtgccggtagtcgcgctttcccagcttaaccgtagtttggagcagcgtgccgataagcgcccggttaactccgacttgcgtgagtccggatcgattgagcaggatgccgacttaatcatgtttatttaccgtgatgaggtttatcacgaaaacagtgatgagaaagggatcgcacaaattattttgggtaaacagcgtaatggcccgatcggttccgttcgtctgaaatttaacggtcagtggtcacgttttgataactatgcgggtccgcaatatgacgacgagtag

SEQ ID NO: 42171 - DNA, 1080 bp, Yersinia pestis
atgaaagcggcaacagcagtcatcgaccgccatgctctgcgacataacttacaacaaattcggcgtctggcaccgcaaagccggttggtggctgttgtgaaagcaaatgcttatggccacgggttattagccgcagcacacacattacaggatgctgattgttatggcgtggcccgtattagcgaggcgctgatgttgcgagcgggtggaatagttaaacctattttgctgctggaagggttctttgatgcagaagacctgccggtattggtggctaaccacattgaaaccgccgttcacagcctggaacagctcgtggcattggaagcggctacgctttctgcgccgattaatgtctggatgaaattggatacagggatgcaccgcctgggggttcgcccagatcaggccgaagcgttttatcagcgtttgagcgcatgccgtaacgtcatccagccggtcaatatcatgagtcactttagccgtgccgatgaacctgaagtggcggccacgcaacagcaactggcgtgttttgatgcgtttgctgcaggtaaacctgggaaacaatctatcgctgcttcgggcggtattctgcggtggccacaagcgcaccgtgattgggtgcgcccagggattgtgctgtatggggtttcgccgtttgatgcgccctatggccgtgatttcggtttattgcccgccatgaccctgaaatccagtctgatcgcggtgcgtgaacataaagccggtgaatcggtcgggtatggcggcacctgggtcagtgagcgcgatacgcgtttaggtgtgatcgcgataggctatggtgatggctacccacgtagcgccccgtcagggacaccggtatggcttaatggccgtgaagtgagcatcgttggccgggtatcgatggacatgatctccattgatcttggcccggaaagtacagataaggtgggcgatgaagccctgatgtggggagccgaattaccggttgaacgcgtggctgcctgcaccggtatcagcgcgtatgaattgatcactaatctgacctcccgcgtagcgatggaatatctaggggaataa

SEQ ID NO: 42172 - DNA, 2844 bp, Yersinia pestis
atggataatattgaagttcggggcgctcgcacccacaatcttaagaatatcaacctgattatcccgcgcgacaaactgattgttgtcaccggcctatcaggttcaggcaaatcctcactggcttttgataccttgtatgccgaaggtcaacgccgttatgttgagtctctctccgcctatgcacgccaatttctgtcgctgatggaaaaaccggatgttgaccatattgaaggcctgtctccggctatctctatcgagcaaaaatcaacctcccataacccacggtcaactgtcggtactatcactgaaatccatgattacctgcgcttgctgttcgctcgagtcggcgagccgcgctgccctgatcatgatgtcccattagcggcgcaaacagtcagccaaatggttgataacgtgataagccagccggaaggccgccgtctgatgctgttggcaccggtggtaaaagatcgcaaaggtgaacacactaaaatactggaaaatctggccgctcaaggttacatccgggcgcggatcgatggcgaggtttgtgatctgtctgatccgcccaaattagagctgcaaaagaaacacaccattgaagtggtggttgaccgtttcaaggtacgcgaagatctggcgcaacgtttggcagaatcatttgaaaccgcattggcgttatccggcggtaccgccgtggtagccgatatggacgatccgcatgtggaggagttattattttccgctaactttgcctgcccgatttgcggttacagcatgagagagttggaaccacgcctgttctcctttaacaacccggcgggtgcctgcccaacgtgtgatggcttgggtgtccagcagttttttgatccagaccgcgtgctgcaaaaccctgagctctctttagctggcggagcgattcgcggctgggatcgccgtaacttctattacttccagatgctacgttcactggccgagcattataaatttgatatcgaagcgccgtttaactcactggacagcgccgtccagcaagccgtgctatacggttcaggcaaagataccatcgagttcaagtacattaatgatcgcggtgatactaccgttcgccgccacccttttgagggggtgttgcacaatatggaacgccgttataaagagacggaatccagtgcggtgcgcgaagagttagccaaatttatcagcaaccgctcctgtgcgtcatgcagcggtacccgtctgcgcagagaggctcgttatgtcttcgtggaaaacaccaccctgccagagatttctgaactgagcatcggccatgcactgagtttcttccagaatatgaagctcagtggtcagcgtgcacaaatcgctgaaaagatactgaaagaaattggcgataggctgaaattcctggttaacgtcgggctgaattatctgtctttatcccgatctgccgaaaccctgtccggtggcgaagcacagcgtatccgtctggctagccagattggcgcgggtttggtcggcgttatgtatgtgctggatgagccgtctatcggtttacatcagcgcgataacgaacgcttgctggagacattgattcacctacgtaatctgggtaacaccgtgattgtggtggaacatgatgaagatgccatccgggccgcagatcatgtgattgatatcggccctggggccggcgtgcacggaggtgaagttgtcgccgaaggaacggtagatgacatcatggccgcaccggcgtcactcacgggccagttcctcagcggtaagcggagcatcgccatcccagagaaacgggtcagtgctgatccgagcaaagtcttaaagctgataggggctacgggcaataacctgaaagatgtcactctgacgctgcctgtcgggctattcagttgcatcaccggggtctccggctcggggaaatcgacgctgatcaacgatactttatacagtattgcccaacgccaactgaacggcgcgaccatcaccgaacccgcaccataccgcgagatccaagggctagaacatttcgataaagtcatcgacattgatcaaagcccgattggccgtacgccgcgttctaacccagccacctataccggcatctttacccccattcgcgagttatttgccggagtgccggaatcacgcacccgcggttatacgccaggccgtttcagttttaacgtcaaaggtgggcgctgtgaagcctgccagggcgatggggtaataaaagtagaaatgcactttctgcctgatatttatgttccttgcgatcactgtaaaggtaagcgttataaccgtgaaacgctggaagtaaaatataaaggtaaaagtattcacgaagttctggcgatgactattgaagaggcccgcgagttctttgatgccgtacctgctctggcacgtaagctgcaaaccctgatagatgttggcctgtcctatatttgtctgggccaatcagccacaacgttatctggtggggaagcacagcgagtgaaactatcgcgcgaactgtcaaaacgcgggaccggccagacattgtatattctggatgagcctactaccggcctgcattttgccgatattcagcaactgctagcggtattgcatcagttacgggatcagggcaataccattgtagtgattgaacacaatctggacgtaattaagacggcggattggattgtcgatctggggccagaaggcggcagtggtggcggtgaaattttggtctccggcacaccagagacggtggcggaatgcgcggcatcacacacggcacggttccttaagccaatgttgcagcgtaagccacaaaccgtttaa

SEQ ID NO: 42173 - DNA, 549 bp, Yersinia pestis
atggccagcagaggcgtaaacaaagtgattttggtcgggaatttgggccaagacccggaagtccgctatatgccgaacggcggcgctgttgccaatatcaccctggccacatctgaaagctggcgtgataagcaaaccggcgagcaaaaagaaaaaacagaatggcaccgcgtggtgttgttcggaaaacttgccgaagtggctggtgaatatctgcgtaaaggctctcaggtttatattgaaggcgcactgcaaacccgtaagtggcaagatcaaagtggccaggaacgttacaccacagaagttgtggttaacgtgggtggtaccatgcaaatgctagggggccgtcagggcggtggtgctcctgcaggggggggcgcagcgccacaagacggcggggcacaaggcggttggggtcaacctcagcagcctcagggtggcaatcaattcagtggcggtcaggcttcacgtccggcgcagcctgcgccagccgcaccacaaggcggtaacgagccaccaatggatttcgacgacgacatcccgttctaa

SEQ ID NO: 42174 - DNA, 2574 bp, Yersinia pestis
atgcgtctggatcgtcttaccagtaaattccagcttgccctcgccgatgcccagtctttagctcttgggcgcgacaaccagtttattgaaccgttacatttgatgagcgcactgcttaatcaggatggggggacggttcgccctttattgacctcggcagggattaatgttgcacgtttacgtagcgacattgagcaagctttaggtcgtcttcctcaagttgaaggcaccggcggtgatgttcaaccatcaaacgagctggttcgtgtattaaatctttgcgacaaattagcgcagaaacgttcggataagtttatctcttccgagctgttcgtcctggccgtacttgaagatcgtggcacgttaactgacatgttaaaggctgcaggtgcaaccgtcgctataatagataaggcaattgaaaccatgcgtggtggtgacaaagtcgatgatcagggtgctgaagatcagcgccaggcgttgaaaaaattcactatcgacctgactgagcgtgccgagcaaggcaaactcgatccggttattggccgtgatgaagaaattcgccgtactattcaggtattacaacgtcgaaccaaaaataacccagtgttgattggtgagcctggggtgggtaaaaccgctattgtggaaggtttggcgcaacgcattgtgaacggcgaagtgccagaaggcttgaagcataagcgtgtactctcattagatatggggtcgctgattgccggtgccaaatatcgtggtgaatttgaagagcgtttgaaaggcgtactgaacgacttatcaaaacaagaaggcagtgtgatcttgtttattgatgagttgcataccatggtcggtgccggtaaaggcgatggggcgatggatgccggtaacatgctgaaacctgcattagcgcgaggtgagttacattgtgtgggggccactaccctcgatgaataccgtcaatatatagagaaagatgctgcgctcgagcggcgtttccaaaaagtgtatgttgcggaaccaacggtagaagacactatcgctattttacgtgggctgaaagagcgctacgaactgcaccatcacgtgcagatcactgacccagctattgtggcagccgcaacattgtcacaccggtatatttctgatcgtcagttaccggataaagctatcgacctcattgatgaggcaggttccagcatccgtatgcaaatggattcaaaacccgaatcattggatcgtctagagcgccggattattcagcttaaactggaacagcaggccctaaaaaaagagtcagatgacgccagtaaaaaacggttggaaatgctcaatactgagttagagcaaaaagagcgtgaatattctgaactggaagaagagtggaaagcagaaaaagcttcactcaccgggactcagaatatcaagacggagttggaacaagctaaaatcaccttagaacaagctcgtcgagtaggtgatctggctcggatgtcagaacttcagtacggtacaatccctgagctggaaaaacagctggcggcggcaaccgcgctagaagggaaaaccatgaagttgctgcgtaaccgtgtcacagaaatcgaagttgctgaagtcctggctcgctggaccggtatcccggtatctcgcatgttgaaaagtgagcgggataagctgctacgtatggaacaggacttgcatcaacgagtcattgggcaagatgaagctgttgaagccgtctccaacgctatccgtcggagtcgcgcagggttgtctgatccaaaccgaccaattggttcgttcttattcttagggccaacgggggttggtaaaactgaattgtgtaaagcgttggcaacgttcttgttcgacagtgacgatgccatggtgcgaatcgacatgtccgagtttatggagaaacattccgtatcgcggttggtcggtgcacctcctggctatgttgggtatgaagaaggtggctatctgacggaagcggttcgtcgtcgtccttattctgtgattttgctggatgaagttgaaaaagcacatccagatgttttcaacatattgttacaggtattggatgatggtcgtttgaccgacgggcaggggagaactgtcgactttcgtaacacggtagtcattatgacctctaaccttggttcagatttgattcaggaacatttcggccaaatgaattacagcgaaatgaagacagtggttatggatgttgttagtcaccacttccgtcctgaatttattaaccgtatagatgaggttgttgtcttccacccacttggtcgggcgcacttggcttctattgccaacattcaactggagcgtttgtataaacgtctggaagaacgtggctatgaagtgaagattactcagcctgcattggaattcttgggtgaagctggcttcgaccctgtttatggggcgcggccattaaaacgtgcaattcagcaggaaattgagaacccgctggcacagcagatactttctggcaaactaataccgggaatccccgtgactttagatgttgaaaatgggcatattattgctaagcagtaa

SEQ ID NO: 42175 - DNA, 912 bp, Yersinia pestis
atgagaaatcatgccagtggcggggccacgaccattatcaagcgggcaaacagaaaaaagcaccatgtccgccactccggcgcttggaaagtggcgtttgccgactttacgctggcaatgatggcgttatttatggtgctgtggattgttggcgtggtatcggaagaagagcgacaagaaattgtggcgcaattgaatggaaaaaccatttttgctcaacaatcttttatttcgatcccgtcaaaaagtaaaagcggcggtggcaaattatcgaatagcattgatggcaaagagcaggctaaagagaccaaaagcaacctcgcaattgaggttcctgaaccagaacaatcattagaggaggttgtggataaatcgcgtcatgagatggaagagctatcgcggattattatgcagatcacctcggcctacaatgcgcaatcgaatctgcaaatggaagtggtgccgcaagggctgcgtattctgattcaggatgatcagcagcgggatatgttccagcgcagtagtgcggtgttaacacctttctttagtcggttattgggggaattagctcctgcttttaacgagatggataataaaattattatcaccggccataccgatgcttctcgttaccgtgatcagttgttgtacaacaactggaatctgtctggtgagcgggcgctgatggcgcataaagcgttggtcaatgggggattggatgaagggcgagtcttgcaaatcaatgcgatggcagaccaaatgttactcgacccaacggacccgctggcggccaaaaaccgccgtattgaaattatggtattaactaaaacagcctccgataccttgtatcaattctttggtcatcacggcgagaatgtcgtgaaacctgcggctgagaaagctgaaaaatag

SEQ ID NO: 42176 - DNA, 4317 bp, Yersinia pestis
atggcaatgccagcggtaaaacattttgatccggtcattgggctggatgtccatacggtcattattcctccctcaccggctcctatccctattccccatccccatgtgggatttgtgctggatttacgcgagtgcgttaacggcgttaaatcggtggtcggttcaattgtgttcagttttgccgctgaggccgctgctgatgtgatggaggacaaccctgaattattggcggcgggtatggcgctggtcagcaaggcagggagtgcactggaggccgcggcgaataatccggtagtaaaaaccggtctggcgttaaaagatgccaaagatcagctatccgggttgaaagcgggcattatcgacacgctgggtggcaatattggcggcggcggggggtctaaccgaccggtaaaagtgaatggcacattgcgcagtaccgtcgggacgcacacgtttcatattccggggctgcattttcccctcggtaccctgttcgcgccgttgatccccagcaaagattccgaatcttttatgggcagcaaaaccgttatggccaacggtgatccgctgtcttatatggccctacccgccatgagttgctggtttgtcggcctgccctcgacgccgaaaaacgcggcacatacccaacgcaagagcctgtcgttacccacctccgttatgttgccgatcccgatgggccgcccggtggtggtgggcggcatgccggtgcttaacctgctcgccctgatgatggggctgttcaagatatttcgtggatccaagttggcgaaaaagctggccgaaaaactgggattaaaatccggcttcctgaagtgcaccattttggatgcggagccggtcaactcgatcactggcgaagtggtggttgagcagaacgattttgtggtggaagggcgcttcccgctggtgtgggatcgctattatggcagccagaaagcggtgaccggtgtcattggccagcgctggcagtgcccggcagatattcggctggaggtgttggtcgatcagggcgaactcggcgtggtggcccgcttcccggatcatgaaaccgtcttctcgctgatgccgatagagcagggctgggatgagcgggtgtatgactggcagcaggggcacgccctgtatcgttcaggtaatcagttggtcctgcgcacccgccacgaggaagagtatttcttcacgttgcccaatgactgggaaagcacggtgatcccgtttacggcggcggatcgtctgacgctgcccattctgagaatggcagatcgctatggcaatggctggcaattcaaacggcagggcaattcgctgttgctggcgttgatcgaactgacacaagggttgctttcggggcgtgaagtgcatgtcattcaggatgaaaacgcccccatcagtgggatgctcaacgattttgttctcgtgaataaaaccaatggcgagcggcgttttctggtgggctaccgccacgatggcgaaggtaacctgattgccacgctggatgcggacaaccatccctaccagtttgaatatatcgctgacagccaaatggtgcgccataccgaccgcaacgggctgtcgttttactaccgctatcagcgccacagcgacgggctggaccgggtcgagcacgcctggggtgatggcgggctgttcgattaccgttttcattatgatcgggtctatcaggaaacccaaatcaccgattcattgggccacaccaccttgctgcgctacgacgaacgggggctgccgtttgcccgcgtcacgccattaggcggggtttacagttatcaatatgatgcacagtgccggaccatcgccgagattgacccagcgggcaatacccacggctggatgtacgaccaatatgccaacctgacagaagagacctttgccgaccgcagcagcgtgaaaaccgagtatggcgatgatcataaaccggtgcgcattaccgatcccggcgggcgcttctggcggcagagctgggatgcgcaaggcaaggtgatttcgcagaccacgccgggcaagatcgccacccattttacctatgatgaccttgggcaactggtggcggtggtggatgccagccagcagcgcacggaactggcctatgatgcatggggctttttgcgggtcattaccgatgcgcggggtaacgcgacgtcatttaagcatgatttttgcggtaatctgctgaaaaaagtggcggccaatggcgatatcacccgctatcagtacgataaaaaacagcggctaacaggctgtacgctgcccgatgccagaaccatccgctgtgaatatgatcgggaagataatctactgctctacaacgagaacggctcacgtatcacccgctttggctattttggtcagggccggttgcaaagccgtaccgatccggatggcagcctgaccgagtacctgtacgacaccgaagaacagttgattggggtgaaaaatcagcgcggtaaaacgtggcagctcaagcgcaacgccgaagggcggttaatcgaagaagtggattactgggggcagagccgccgttatcagtacaatgcggttgggcatttaaccggcagtcacgacccgctagggcagatattggcggtcacctgcgacaaattagggcgcatcaccgagaagaacattgcgggtgatgagcaggcgtgggagcgctacgagtataatgttcagggccagcttattggggcggtgaacccggcggtgacagtgacgcggcgctataatcaggacggccagttagcgcaggaaattcagcagcaaccgcaggtcagtgcgacggtggaatatggctataatgccgccggtcagcaggttgagcagcgccatctgttgcaatatgccgatgaggacgacattcaggtacagcaacggatccgctacggctacgatgtgctggggcagtgcatcagccagcagatcgatgaccacaggccgatggcgttcagctacgacaagattggccggttaaccgaacaacggctaacgccgagcctgtcgcaccatctccgttacagcgctgccgggcaactggcgggttaccagacacggcgcaagggcatggtctggagtgaaaccgactacttctatgatcagcacggcaatctgacgcagcgggaggacagccggcagggcagtgagcgttatcactacgatgtgctggggcagattgtgggctatcaggatccgctggggacgctgcatcgctaccgttatgatgcctgcggtgaccggttcagcacggtggctgacaatgcggagggccggcacacgcagcaagataatggcaccgcctaccagctcgacaaggcggggcagttggtatcgcgcaccgaccggtttagccagttagccctgcgctggaatacttttggtcggctggccggcatcaaaaatgagcaccatgatcacgcttatacctacgatgcgctggggcgccgggtgggcaaacggcaccttcaacggccgaccaaactgcttgatgggctgcgggtgatcgacaaagagaccccctcgcgcggtgaaccggtgtggcaggatgaaacctggtttatgtgggacggtgacgtgatggtgggcgagttgcagcgtgaagttgctccccgggtggtgacgcctgaaacctgggacaaaccggatggtatcgtctacagcggccagttttacgtgtatcagccagatagcttcgaaccccgcgccatgcagcgttatcaacagattgcggaagctgaagacggcgaaatcgcgccattaggcgaagagcagatttatttctaccagaatgacccgaacggtatgccgatccgcctgcaggatggcgaaggcgaagtggtatgggaagcacagttcaccccgttcgggcaactgagtgtcacgggtaccagccaactgcgccagccgctgcgcatgcagggccaatattacgacacggaaagcggtttacattataaccgctaccgttattatgatccggcctgcggtgtgtttatcagccaggacccaatagggttaaaaggcggattaaatccgtaccagtttgcggtgaatacactgggatgggtggatccgctggggttgtggaaaaaacgtagaaataatggtcagtttgcgaaaaaacctgggcgtaaaaaaacaaatcttgtaattcagcacatggaaatagccatgatactgataaaccagcagaagggtatactttgcgtgatcgtgatttcggtgatgttacgaaatatggtgaaacaactcaaggtgagaagagatactctcagaagtatttag

SEQ ID NO: 42177 - DNA, 2226 bp, Yersinia pestis
atgtttgctgacagtaataaagccaaagtaaaagaacgtagtgcagttaactcggcttcaacggggacagccgctatttctgcagcaattaacgcaccttccgggctacaatttaagctgaccgctgccggtttaccgcctcagacatttgccgtcgtcgatttttcattaaacgaggcgttctcctcaccttttgttttacatgttggcttggccagtgccgatcctgcggtggatttttctgcggtattggatgaagacgcgacgttgtctatctggcgcgaaggtattttacagcgcagtattactggcatgattgccagctttgaacagggcaataccgggtttcaccagacccgctacagtatggtgatccgccccgcgctgtggcgcacttctttgcgccgcaactcacgaattttccagttggaatcggttgaggccatcatttctacgctgttgaaagagaatggcattaatgattttgccttcggtttccgtcattcacatccagcacgtgagttctgtgtgcaatatcaagagtcggattttgattttatccagcgcctgacagcagaagagggcattttctactacttcgaattcagcacgggcaaaaacaccgtggtctatgccgatgatgttggctccctgccgaagggggcgtcactgccgtataacccgaatgtggcggcacaggcgcaggaactgagcatcaccacctttacccgcagcgcgcaagtacgcccggcgatggtacagctaaaagactacaccttcaaaaatcccaaatgggcggctgagttcagtgaacaagcgcgcgagttacagaatcagaggccggattacgagcattttgacttccctgggcgtttcaaagatgagcaacatggcaaggattttacccgttaccggttggaggcactgcgcaacgatgcgaataaggggcagggggaaagtaacgaatttaccttgcagccggggcaactctttagcctgagtgcccacccgcgtgacgatttaaatcatgcctggcagatcgtcagcattcagcataccggtaaacagatgcaggcactggagcaagaatctggcgatcagggcaccgtattgtttaaccagttcagctttattccaccgacgcaaacctggcggccaacgccgctgccaaaaccagtcactgatggcccacagatcgcgatggtcgtggggcccccgagcgaagaaatttactgcgacgagtatggccgcatccggctgcaattccagtgggaccgctatggtcaaagtaacgatcaaagttcatgttggatccgcgttacccagccgtgggctggccaaggctggggcatgttggcgatcccgcgtatcggccaggaagtggtggtagattttctgcacggtgacccggaccaaccgattgtcaccgggcgcacttatcatgctaataaccttcccccttcagcattgcctggggcgaaaacgcagatggcgctacagtcgaaaacccataaaggcgaaggctataacgaattgcgttttgaggatcaagacggcaagcaagagctgtcgatgcgggcacagagggacatgaataccacggtgttgaatgaccgttcgaccacggtttcaggcaatcacaccgaaacggtgaccaaagatcaagcggtgacggtttcgggtaatcagaccatggatatcacccaagaccaaaccattactgtcactgggacacaacgcattgatgtgactcaagatcgcatcattgatgtgacagcagaacaacaaacgacggtaaaagcagatgatcggttactgatatccggaaaacagaaaaccaagatagatctggatcaggaatatgaggttgtcggctcacaaaaaaagactattggggctaaccaaacactgaaggtgggcggatatcaaaaaaataccctcgagggttataaaaaatccaagattggcggcgataataccaccaccgttggggggcacgataaattaaccgtcggtgacacaatcactatcaccgccggcaccagtattacgctgcaatgtggtgcctccagtattgttatggatgaagccggtaatataaaaatcaccggggttaatatcacctctgcggcatcgacgacacatacgataaaagctaaaacagtgacatcctgcggtgatacggaaaatatcgtggaaggtggcattctaaaattaaatccttaa

SEQ ID NO: 42178 - DNA, 795 bp, Yersinia pestis
atgaaacagtatctggatttgatgaaaaaagtgctggaagaaggcacacctaaagctgaccgtaccggtaccggcactctgtcaatttttgggcatcagatgcgtttcaatttacaagacggtttcccattggtcaccaccaagcgttgccacctacgttcgattatccatgagttgttatggttcctgaatggcgataccaacattgcttatctgaaggaaaataatgtctcaatctgggatgaatgggcagatgaaaacggcgatcttggtccgatttatggtaaacaatggcgtgcttggggggctgctgatggccgaaaaattgaccagttgagtaacgtagtcaatcaactgaagcaggaccctgattcgcgccggattattgtttctgcgtggaatgtgggcgaactggatcaaatggcgttggcaccatgccatgcctttttccagttctacgtggctgatggcaaactttcttgccaactgtaccaacgctcttgcgatgtgttccttggcttgccatttaacattgccagctatgcgttattagttcacatgatggcgcagcagtgtgatctggccgtaggcgattttgtctggactggcggggatactcacttgtatagcaaccatattgaccaggcgcatctgcaattgagccgtgagccacgagtattaccgaaactggtgatcaaacgtaaacctgattcattgtttgactaccatttcgatgattttgatattgagggctacgatcctcaccctggtattaaagcccctatcgcgatttaa

SEQ ID NO: 42179 - DNA, 687 bp, Yersinia pestis
atgtctgtttactctttgcctcctgctccccccagtgatgaacatcaactttttcaacgtgcacaggcattgtctggttttaccctgggtgaattagcaacacgtgcccagtgggtcatccccgcagacctaaaacgcgtaaaaggttgggttgggatgctgttggagttctatctaggcgccagtgctggcagtaaaccagagcaggatttcgccgatatcggcatcgagctgaaaaccatcccgatcagtgcacaaggaaaaccactggaaacgacattcgtctgcgtggcaccactcaccgggaatagcggtgtcacctgggaaagtagccatgtgcgtcataagcttgccagagtgttatgggtgcccgtcgaaggcgaacggcatattccgttagcagaacgccgagtcggtgctccgctgctgtggagccctaatgtagaagaagaagagttactgcgccgcgattgggaagaactcatggatctgattgttttgggtaaagtcgaaagcatcacggctcgccatggtcaggtgttacagttgcgccccaaagcagccaatagccgggcattaacagaagccatcggcgaatttgggcagcctatcatgaccttgccacgtggcttttatctgaagaagacactgaccgcgccgatgctggctcgccactttttgctgtag

SEQ ID NO: 42180 - DNA, 1161 bp, Yersinia pestis
atgcctgttgcactactggcgttggcgctgtgtgcttttgctattggtactactgaatttgtcattatggggttattgccccaggtagcgggtgatttgcacatatcgattccaactgcgggctggttgatcagtggttatgcgctaggtgtggcaattggcgcgcccatcatggcagtgctgaccgcgaaattaccgcgcaagaagacactgttactgttaatggtgatttttatcatcggtaacctgatgtgtgccttggcatacagttatgacttcctgatgttcgcgcgagtgatcaccgcgttgtgtcatggggccttttttggtatcggcgcggtggtcgccgcaaatctggtggcaccaaaccggcgggcctcggcggtggcactgatgtttacggggctgacgctggcgaatgtattgggtgtcccactggggaccgctctaggtcaggcttttggctggcgttcgacattttgggtggtatcggtcatcggtttgttctcgttggcagccctgtatagcaagttgccctcctccagcgaggaagcaccgactgagcttcgtaaggagattgccgctttgcgtggcggtggaatttggctctccttactgatgaccgtattttttgccgcagccatgtttgcgctctttacctacatcgcccccattttgacggaggtcacacaggtttctgagcatggcgtcagttggacgttactgctaatgggggttggcttgacgctcggtaatatcgtcgggggcaggctagctgactggcgtttatcggtcagtttaaccatgacattcttgttgatcgcggtattttctgccctgtttagttggaccagttattcactgttggcggcggaagtgacactgtttttgtggtcagccgccgcattttctgcagtgcctgcgttgcaaattaatgtcgtcgcttatggcaagaaagcccctaatctggtgtcaacgctgaatattgcggcctttaatgtgggtaacgccttaggggcgtgggtcgggggggttgtgattgccaaagggcttggtttgacggcggtgccgctggccgccgcggcactggcggtcatggggttgttgctgtgtctgtttaccttttcccgcgcgcgtactattgggaataaaatggcttag

SEQ ID NO: 42181 - DNA, 1923 bp, Yersinia pestis
atgtatattagtggcaaaggaattaaatctatccatgggatgatttttttattcactctaattatgccattagacataataagtgctaatttttcagtctctttcaaagatgtggatataaaagagtttattaattcagtaagtaagaatattaataaaactattatcatagatcctacggtccaagggcttatcagcattcgcagttatgagaatttggataaagatacgtattatcaactattcttgaatgtgcttgatgtctatggttatgcggccattgagatgccacataatgtcctcaaagtgatttcatcaaaaagagccaaaggagtagtcgcaccgctcccaaaagagggggtaacattcgatggtgatgaattgataaatagagttattcctcttaggtacatatcagcaaagaaaataacgccattattgaggcaactcaatgataatacggagtctggcagtattattaattatgacccatctaatattttgttaattacagggcgtgctgcggtagtaaaccatctgcattcaatagttactgatcttgaccaagccggagataatgaaattgagctttataaactcaattatgcgattgctgctgatgttgttaaaatagtaaatgaagctataaatccaataaataatttaaaacaagaagtatcaatagtaggaaaggttattgctgatgaaagaacaaactctatattaatcagcggtgatacatatatcagaaaaaaatccattctaatgataaaaaaactcgacaagagacaaagtagcgatgggaatacaaaagtggtttatatgaaatatgctcaagcctcaaagctattagatgtcttaaatggaataagcgaaggttttcataatgagaaaaaaacaaaacaatctaatcaatggaatcagagacctgtagcaataaaggcatatgatcagacgaatgcattagttattacggcagatcctgacatgatgctagccttaggagaagtaatagaaaaattagatatcagacgtgcacaggttttggttgaggctattattgtcgaaactcaaaacggagaaggtattaaccttggtgttaaatgggaaaataagcgttctgatgatattaattttattaaaaattccgatggtttattaaataataatggatggggcatagctacgacaattactggattaactgctggtttttataaaggaaactgggatgtattgcttagcgctttatcaacaaatacaaataataatatactcgcaactcccagtattgttactctcgataatatggaggctgaattcaatgtgggtcaggaggttccagtgctcatatcaacgcaaacgacaaccacagataaggtatataattcaatttcaaggcaatctataggtgtcatgctaaaagtaaagccacaaataaataaaggtgattcggttctacttgaaatcaggcaagaggtgtcgagtatcgctgatagttctactgttaatacacataatttagggtctgtttttaataaacgagtagtgaataatgcagtattagttaaaagtggagaaacagttgttgttggtggattacttgataagaagtctagtacgattgttaataaagtccccttcttgggtgatctcccattaataggatggctatttagacaaaccaaagagaaagtggaaaaaagtaatcttattctatttataaaaccgacaatacttagggaatccgatgactatagcgttgtgacgtcaaaagaatataataaatataaaaaagataatatgaatggatatactttagccgatgatatagtcctatcagataaaaaatatttaagtgttattcctagtattaggaaagatataaataatttttatacactgttggactcagagctatga

SEQ ID NO: 42182 - DNA, 1299 bp, Yersinia pestis
atgcatcctttagaaaaactggttcagcgccataaagccggggaacaaattgggatttactcagtttgttctgcccatcctcttgtcattgaagctgcgctggagcaagcgttagaaaatgactcagaactgttaatcgaagccacctctaatcaggttgaccaatttggtggctacaccggtatgacgccggttgattttcgtgattacgtttttgctaaagctgatgctctgcatttccctctcgaaaaactcattttaggcggcgaccatttaggaccaaaccgttggcagcacttgcctgccaacgaagccatggcgcatgccgatgatctgatcgcggcgtatgtcgcggcgggcttcaaaaaaattcacctcgattgcagcatgtcctgcgcagatgatcccgttcccctctccgatgaaattgtagccgagcgtgctgcacgtctggccgccattgcagaagccacagaatatcaacacttcaatacacacaccgccgtttatgtcatcgggacagaagtgcctatccctggtggcgcgaccgaagagttggatgaaatcgaagtcacctcaccagaagccgcgcgtaaaacgattgaatgccaccaaaaagcatttgagaaatcaggtgttgctgagtgctggccacgggtgattggtctggtcgtgcagcctggtgttgagtttgatcacaccggtgtgattgatttctgtccagagaaagcccatgaactcagtaaagtcatggatgaatacgattatcaggtattcgaagcccactccaccgattatcagaccgatgatgcctatcgcgcactggttaaaggccattttgccattctgaaagtaggcccggcgctgacatttgctctgcgtgaagccctgttcagtttatgtcatatcgaagaagagttattcccggcagagcagtgctcccgcctccgtcaggtgatggaagacgtaatgctgaaatcgccggaatactggaagagatattacctcggtgatactgagcaagtgcgcttagcccgcgtttacagtttcagtgaccgcatgcgctattactggccaatggaagccgtgcaggctgcacaagaaaaactgtttgccaatctgaatagtgcaccgattccgctaccactcttgagccagtacatgccacgccaatttactgcagttcgcgaaggcactctgtcttttgaagccacggcattggtcaaacaacaaatcaaaaatacgcttattggctatgtcaatgcatgccacctttttaacgggaacacatcgaaatga

SEQ ID NO: 42183 - DNA, 816 bp, Yersinia pestis
atggccgagacgttgctcgaagtccgtaatctgagcaaaactttccgctatcgtaccgggctgtttcgccgtcaacatgttgaggcagtaaaatcggtgagttttaccttacgcgaaggccaaacactggcggtgattggtgaaaatggttcgggcaaatccacgttggcaaaaatgttgtcaggcatgattgagcccaccgcgggtgaattactgattgatgatcatcatctcgcttatggtgactatgcttaccgtagccaacgtattcgtatgatttttcaagacccaagcacctcactgaatcctcgccagcgcattggccagttgctggatgccccactgaaactgaatacagaactcgatgctccggcacgtgaacagcggatctaccaaacactgcgtcaggtagggttattacccgatcacgctaattactatccccacatgttagcatccggccaaaaacagcgggtggcactggcacgggctctgattctgcaacccaaagtgattatcgcggatgaagcattggccgcattagatatgtccatgcgctcacaaattattaatctgatgctggagttgcaggaaaaacacggcatatcctacatttatgtgactcaacacttggggatgatgaaacacatcagcgaccaggtaattgtgatgcatgaaggcgaagttgtagagcgtgggagtacggcggaagtcttggcagccccgctgcacgacctgactaagcgtttgatctccagccattttggtgaagcattgactgcggatgcctggcgtcgagataccagcaatttttag

SEQ ID NO: 42184 - DNA, 1281 bp, Yersinia pestis
atggtgcaatttcgtaggagaaataatgcccattggtatcatgagactcagtgtagcggcagcctggagcattgtagcggtagcccagtgaatatttccacgacagtgaatgttcccacgacagtgaataatgaaaacccccctgttgatattcggccacgtgatcccagcgagagtgacaacatgagcactggcagtaatataactgaacagagcatcataactgaacagggcatctttctacttggcgtgacagaaaacatcgctcctacattacaagacaccctctaccatgagcagcctattcttactgcctccgacgccatgtatcaggccctgttcccaacgattatcgagatcaaccacaccaataccttctcactttatgatcggttaagtactgcgctgacggtcgctcaggttaccgggattcagcggctatgtagccactatgctctccgtctcgcgccgctccccagcccggatgcctcaagggaaagcaatattaggctaacgcaaattacgcaatatgcccgccaattggccagccaacctacgttgatcgataggcatgctttagcgcaattgcatgacgtgggtttaactgatagcgatatcattattttatcgcaaattattggatatgtgggatatcaagcccgagtggtcgctggcatctctgcactggctggttaccctaccgtgatgctccccggtttcccccgcatggaagatgccgcccccagcccattaccagatgtcatgcccaattggcaaggttggctaccgtctcatgcggcaaacgacgatcaacccgataaagaacctgacgaaacggccagcacactgactgaactgttgggccatcaccagcaaagtttgctcgcttatcacgccattaccactcaccagcccaactcacctcaattgcaacgtgactggctggaactggtggcattggtcagcgcacgaatcaatggcagcctctactgccaagcccgtcacaggcaacatttacagcaactgacggagccgcccctgttggtcactgagctgttaaaagggattgatcacgcgttattcttgttacccgaacaacaaataccccatcagctaatcagtgtaaccgccgagctcactcgcgccccggaacgctttaatcatcagcatgttaaacgtctacagacccttggcgtcagtgatactcaagtcatgcgaattattttcagtatcgccattactggttggaccaaccgcctacgacatacgttaggaaaatag

SEQ ID NO: 42185 - DNA, 1275 bp, Yersinia pestis
atgactagcagcaacctgattaaacaattgcaagagcggggcctcgttgcccaggttacggatgaagacgcgttagcagagagactggcgcaagggccaatttcactgtattgcggtttcgatcctaccgcagacagcttgcacttgggtcatctggttcccttgttatgtctgaagcgttttcagttagcgggtcaccgcccggtggcgttggtcgggggcgctaccggtatgattggcgacccaagcttcaaagccagtgagcgtaaattgaataccgaagatacagtgaatgagtgggtcgagaaaatccgccaccaggtctcgccattcctggattttgattgcggtgaaaacagtgctattgcagccaataactatgattggtttggtggcatgaatgtgctcactttcctgcgtgatattggcaaacacttctcagttaatcagatgattaataaagaagccgtcaagcagcgcttgaaccgtgatgacagcggtatctcgtttactgagttctcatacaatttattgcaggcgtatgatttcgcttgtttaaacaaaaatcacggtgttgcgctgcaaatcggtggttctgaccagtgggggaatattacctccggtattgacctgacccgtcgcctccatcaacagcaggtttatggcctgacggtaccgctgatcaccaaagccgatggcactaaattcggtaaaaccgaagggggtgcagtctggctggatccaaagaaaaccagtccttacaaattctaccaattctggattaatactgccgatgctgatgtgtatcgcttcctgaaattctttactttcatgagtttggaagagattaacgcactggaagaagaagataaaaacagtggtaaagcaccgcgcgcgcaatatgttttggcggaaaatgtcacgggtatggtgcatggtccagaaggcttggcagcggcgaaacgtatcactgacagcctgttttcgggtgatttgcatgatatgaccgaagcagactttgcccagttggcacaagatggtatgccgacggttgagctgaaccgtgatgctgatttacagcaagcgctggttaatgctgagctggttccttcccgtggtcaggcgcgcacgatgattggttctaatgccgtggccatcaatggtgagaaacaggctgatccagaatacgtctttacggatgcggatcgcctgtttggccgttatactttgttgcgccgtggcaaaaaacactattgcctgattagttggctgtaa

SEQ ID NO: 42186 - DNA, 600 bp, Yersinia pestis
atgaacaaaatacagcatacacatgtagacacccgagaacatctactcgccacaggtgaaaggctcagtttacgcctcggttttaatggtatggggttgagcctgctgctgactaccgcgggtatcccaaaaggctcgttttatcactattttcgttcaaaagaagtgtttggcgaggccatgctccaacgctattttgaccgttatgatgcggagatggaaagcctgttagccggttcacagggtgataaacgccatcatctattgcactattttgctcaatctattgctaactattgtgggagtgaatgccacaacgcgtgtctggcggttaaactctccgctgaggtgagtgatttatccgaacctatgcgccatgcgttggatatcggcactgctcgagtgattggccgcttgcaggatgccattgaagccggaattgacgaaggctctttgcgaacggtgctctctccggcggcaaccgcagaaacgctttacgccttgtggctaggcgcgtcgctgcgggcaaaagtgaaacactctgtcgccccactgacttgtgcactgggaagcattgaactcatattacaaccagcctaa

SEQ ID NO: 42187 - DNA, 408 bp, Yersinia pestis
atgcgcttactccataccatgctccgcgtcggtgacctgcaacgttctatcgatttctacaccaaggtattagggatgcgtttactgcgtaccagcgaaaatactgaatataaatactcgttggcattcgtaggctatagcgatgaaagtaaaggttcggtgattgaactgacgtataactggggcgttgaccagtacgatatgggcaccgcattcggccatctggctctgggtgttgatgatgtcgccgcaacgtgtgatcaaattcgccaggcaggcggtaaagtcacccgcgaagctggcccggtaaaaggcggtaataccattattgcttttgttgaagatccagatggctacaaaattgagttaattgagaataagagcgcgggtgactgcctcggaaactga

SEQ ID NO: 42188 - DNA, 849 bp, Yersinia pestis
gtgagatcccaaagagagctaacatcccccatgacaccattggagaacccgggcgatatcagtgataaaccgcgtttaaccacccaaaaactgtcactgggctacggccagcaacttattatcaataagcttagcctgagcattaaaaacggcgcgttcagcgtcattatcggcccaaacggttgtggtaaatcgacgttgttgcgagcgctcagccgtagcttgttaccacaaaatggcagtatcaggttagatcaacaggatattcagcactacaaagccaaggtctttgcccgccagttatcgctactttctcagggcgcaagtatttctgaaaccttgaccgtgtttgatctggtttcccgtggccgttacgcccatcaatcattctttcatcaatggtcgacggaagatgaacgtatcgtaaaagccgctatcagcgccgttaatctggagagtctggtgcagcagagagtcagtgaactctctggtggtcagcggcaacgtgcgtggtttgccatgacactggctcaacatacaccgattgttttattggatgaaccgaccacatatttggatatcgcgcaccaaattgaaatgctggatttatgccaagaactgcaacaacaggggaaaacgctggtattggtgctacacgatattaatcaggctctgcgttatgccacccacctgattatgttgaaagaggggcaaatttatgcagaaggtttaccagaatctatcgttactgaagacagcattgccgccgtttttgggctacgttgccggatcattactgaccctgaatccggcaagcctttggtgataccccgccgtcagtcgcgttag

SEQ ID NO: 42189 - DNA, 1026 bp, Yersinia pestis
atggcaacgattaaagatgtggccaaacacgcaggtgtgtccacaaccaccgtttcgcacgttatcaacaagactcgtttcgtcgccgaaaatacgaaggctgccgtgtgggccgccattaaagagctgcattattcacccagtgctgtcgcccgcagtttgaaagtgaatcacaccaagtcgattggtttgctggcaacgtccagtgaagcgccctattttgctgaggtgatcgaagcggtagaaaatagctgctatagcaaaggttacacgctgattttatgtaattctcataataatctggataaacaaaaagcctatctggcgatgttggcacaaaagcgtgtcgatggtttattggtgatgtgctccgaatatccagatcaactgctggggatgctagaggattatcgcaatattcctatggtcgtgatggactgggggactgcccgtggcgattttactgactctatcattgataacgccttcgaaggaggctatttagcgggccgttatctgattgaacgcgggcatcgtgatattggtgcgatacccggccagttggcgcgtaataccggcggtggccgtcatcaaggcttccttaaagccttggaagaagccaatatccctgttcgtgaagagtggattgttcagggcgattttgagccagaatccggttataaagctatgcatcaaattctgacacaaaaacatcgcccaacggcggtgttctgtggcggcgatatcatggcgatgggcgcaatctgtgccgccgacgaactgggcctgcgggtaccacaagatatttcggtgatcgggtatgataatgtgcgtaacgcgcgctacttctcaccagcactgaccactatccatcaacctaaagagagattaggcgaaaccgcctttgccatgttgctggaccgcattgtcagtaagcgtgaagatccgcagaccatagaggtacaccctaaactggtggagcgtcgttccgttgctgatggccctttccgtgattatcgccgttga

SEQ ID NO: 42190 - DNA, 2262 bp, Yersinia pestis
atgagaatactagaaaaaaatcacggcaaaagccgagtgcgttttaactgcacacaccctatcaaaccagcggcatgggtgcttgctgctaatgtatcgttgttgggttgtgcatatgccgcgactgacgagaataatagtcagaaaaaagaaagagaaaacaaccctgcaaataccaccataaccgttacggcatcaccattgcgtcatgctggcgtcacagaagacagtggcagctacaacacgtcatcaatgtcgacagcaactggcctgaatatttcagcacgggaaaccccacagtcggtaagtgttctgactaaacagcgcatgcgtgatcaaaacctgaacagcgtcgaaagtgccgtgaataacatcaccggcatcagtgtgcgccagtttgacagtgatcgtttcggttttacctctcgcggcatggccgttaataatgttatgcgagatggcgtcgccaccttttacgatacccgctttaattatggtgataacacgcttgataccgatatgtttgatcgtattgaagtggttcgaggtgcggcaggcttaatggctgggccgggtaacccttccgccgttattaaccttgtgcgcaaacgccccacgcaggattttcgcggcagtgtgtcggcaggtgttggttcatgggagaaatggcggacggcgctagatatctccggccccctcaatagtgaaggcagtgtgcgcgggcgttttgtcacggcttatgaagataagaactcttttgttaaccgctatgatcaaagtaaaaacccgttttacggtatcttggagatagatgtcacccccaataccctattcacctttggtgccgatacacaacggactctaacccggggcggtatgtttggtgggcttcccctgtttaacagcgctggtgggcggacaaattatgcccaatccgccaccaccgcatcggattgggcatccgccgaaacccgaactcaaacgctgtttagcagtctgcaacacaattttgataacggctggaatattaaaggcacctttacctttgataacgataagctgcgccaagacgtgatgtggcccaccggttatcccgacccacaaaccaatataggtatgcggccaggcagtctgtcactgattgatggtgcccgccgtcagcaaaattacgatattcaagtcaatggtcagtacagcctgtttggccgccaacatcagttgggtttgggctggaatcgtcaacgacaaaatattgataacgactattatctggcgacctgtaatgccaccagaacctgtcccgaccttggggatttcacccagccgggctggcaatatcctaagcctgtttggagtgataaacgggcttatggttcgaaagggcgcagcgatcaatcctcgcagtatgtggtgacccaactctctctgattgacccgttaaccttgatccttggtggccgcctgaccacttgggaaacccgtggtgataacttcggtacgccacaaaatgctcgttataagaatgagtttgtcccatacagcggcctgacttatgacattaatcgcgatttgtcggtttataccagttataccgaaatatttaacccagaaaaccgtcgggaccgtaataacacattattggccccggtgagtgggcagaattacgaagccggtttgaaaggtgttgccttcgataatagtcttgattattcactggcagtgtttgaaatccgtcagaataatatgcccgtaccggacaccaccgccccccgcttgccggataacagccagccttacttcgccgtcgacggtactaaaacccgtggttttgaagcggaagtcagtggaaaaatgactgaagactggaatatttctgcgggctatacccagtacaacgtgaaactaccgagctcaaatacccagacacctgtcaccccagtcacaccacggaaagtcttaaaactcttcaccacctataccttaccggggcaactaagcgatctgaccctcggcggtggcgtcaactggcaaagccaaatcgccagaaacctcagtagcccaatcggtattcaacaaatcggtcaaggcagttttgccatttacagcctgatgagccgctaccagtttacccctcagctctccttaacggtcaatctggataacctgtttaatcagcattactacacacaaatcggccaatacaaccaatacttgttaggcgcaccacgcaatgtcgatgccaccgtgcgctacaccttctaa

SEQ ID NO: 42191 - DNA, 891 bp, Yersinia pestis
atgaagtgtttaaaagccgtcattcctgttgctgggcttggcacccgtatgttgcccgcgactaaagctattccgaaagaaatgctcccggtcgtcgataaacccctgatccagtatattgtggatgaatgtgttgccgcaggggtcaaagagatcgtactggtgagccattcatctaagaatgcgatagagaatcattttgatacttcatttgagctggaagccgcgctggagtcacgggttaagcggcagttattaaaagagatcaaaaatatttgcccagcggatgtcaccattatgcaagtgcggcagggccatgctaaaggtctagggcacgcagtgttatgtgctaaatcgatggtgggggacaatccttttatcgtcatgctaccggatgtactactggacgattcaacggctgatttatcaaaagaaaatcttgccagtatgattaaacgcttcgaagaaaccggtcatagccaaatcatggttgagccagtgcccaaagcggatgtctccaaatacggtattgcggattgtggccatgtggcattagcaccaggcgaaagcacgttgatgacagcggtggtagaaaaaccctctatagccgaggccccgtctaaccttgctgtagttgggcgctatgtattgtctaaaaatatctggccgttgcttgagaaaacaccacgtggtgcgggggatgaaattcaactgaccgatgccattgcgatgttaatgcagcaagagcccgtagaggcatttcatatgacgggcaaatctcatgattgcggcgataaactgggctatatgaaagcttttgtgacttatggcgttcgtcatcatactgaaggtgaaaagtttactgcctggctaaaacagcaactcgattaa

SEQ ID NO: 42192 - DNA, 657 bp, Yersinia pestis
atgtttaccggtattgttcaaggcaccgggcttgtggtggccatcgaagaaaaatctaatttccgcacgcatgttgtagagctgcctattgatatgctgcctgagttggcattgggggcgtcagttgctcacaatggatgctgcctcaccgtgacacatattgagggcaatcgtgtcagttttgatttgatgaaggaaacattacgcctcactaacttaggggatataaacgttggtgataaggttaatctagagagggcggctaaattcagcgatgaaattggtggtcatcttatgtccggtcatattatctgtactgcagagattgctaaaatatacacatcagaaaataaccgtcagatttggtttcgtatgcccagcgaagatctaatgaaatatgtgttacataaaggttttattggtattgatggcatcagcctgacaatcggcgaggtggtgggtaatcgtttctgtgttcatctcattccagaaacgttgtctcgaaccacactgggtaaaaagcggttagggcaccgggttaatatcgagatagatccgcagacccaagcggtggttgatactgttgaacgggtattggcgcagcgcaatatagctaacgcggcgttagtggacgaaaaattcgtacgggtgtcataa

SEQ ID NO: 42193 - DNA, 1410 bp, Yersinia pestis
atgtccaaacaacagatcggcgttgtcggtatggcggtgatgggccgtaacctggcgctcaacatcgaaagccgtggctattccgtttctatttttaaccgttcatcagacaaaaccgacgaagtggttgccgagaatccaggtaagaatctggtgccgagttataccgttgaagagtttgttgattcactggaaaaaccgcgccgtatcctgctgatggtgaaagcgggtgaagcaacagataaaacgatcgcttcactgacgccgcatcttgataaaggcgatattctgattgatggtggcaatacttattacaaagacaccattcgtcgtaaccgtgaactttctgcacaaggctttaactttatcggtaccggcgtgtctggtggtgaagagggtgcattgaaaggcccttctatcatgccgggtggccagaaagaagcctacgaattggttgccccgatccttgagaaaattgcggcccgtgctgatgatggtgacgcctgcgttgcctatatcggcgctgacggtgctggccattacgttaaaatggttcacaacggtatcgaatacggtgatatgcaattgatcgccgaagcctattcactgctgaaacagtctctgggtctgagcaatgaagagctggccagtacttttgctgagtggaacaaaggcgaactgaacagctacctgattgatatcaccaaagacatcttcaccaagaaagacgaagacggtaactatctggttgatgtgatcctggacgaagctgccaacaaaggcaccggtaaatggaccagccaaagttctctggacttgggtgagccgttaacactgatcactgaatctgtgtttgcccgttacttgtcttctctgaaagatcaacgtgttgctgcctctaaagtgttgactggccctaaagttcagcctttcactggtgataaagccgagtttatcgaaaaaattcgtcgcgcgctgtatctgggtaaaatcgtttcttacgcacaaggtttctctcaactgaaagcggcatctaacgagaataactgggatctgaattacggtgaaatcgcgaagattttccgtgctggctgtattattcgtgctcagttcctacaaaaaattactgatgcttatgcagaaaacgcagatatcgctaacttgctgctggcaccgtacttcaagcaaattgctgatgaataccagcaagcgctgcgtgatgtggtgtcttatgcggtacaaaacggtatcccaacgccaacattctctgctgcgattaactattacgacagctaccgttcagccgtgctgcctgctaacttgatccaggcacagcgcgactatttcggtgcgcatacgtataagcggacagataaagaaggtgtattccacactgagtggatggcgtaa

SEQ ID NO: 42194 - DNA, 1413 bp, Yersinia pestis
atgaaaaagactaaaattgtttgtactatcggtccaaaaaccgaatccgaagaaatgctgacaaacctgctgaatgctggcatgaacgttatgcgtttaaacttctctcacggtgactatgcagagcacggtcaacgtatcaaaaacctccgggctgtaatggcaaaaacaggcaaaaaagccgcgattttgctggatactaaaggccctgaaatccggaccatgaaactggaaggcggcaaagatgctgcgctggttgcaggtcagaccttcacgttcacgactgatcaaagcgttgtcggtaacgacaaaattgttgcagtcacctacccaggcttcgccgctgacctgaaaattggtaacactgttctggttgacgatggcttgatcggtatggaagtcattgaagtcactgaacacaccgttgtctgtaaagtcttgaacagtggtgatttgggtgaaaacaaaggcgttaacctgccaggcgtgtcgatccaactgcccgcattagcagaaaaagataaaggcgacctgatcttcggttgcgaacaaggcgttgatttcgttgccgcctcctttatccgtaaacgttctgatgtactggaaattcgtgaacacctgaaagcacacggtggcgaacatatccagatcatctctaaaatcgaaaatcaggaaggtctgaataacttcgacgaaatcctggaagcctctgacggtatcatggttgcccgtggtgacttaggtgttgagatccctgtcgaagaagtcatcttcgcgcagaagatgatgatcgagaaatgtaaccgcgcacgtaaagttgttattactgcaactcaaatgctcgattccatgatcaaaaacccacgtcctacccgcgcagaagccggtgacgttgcaaacgccatccttgacggtaccgacgcggtcatgctgtccggcgaaagtgctaagggtaagtacccattagagtctgtcaccatcatggcgaccatctgtgagcgtacagaccgtgttatgcctagccgcattgagtcactgaacgacaaccgtaaaatgcgaatcactgaagccgtttgccgtggtgctgttgaaaccgcagaaaaactggaagccaaagtgattgtggtcgcaaccggggggggtaaatctgcaaaatctgtccgtaaatacttccctactgcgaccattctggcactgacgaccaatgaaatgacagcccatcagttaattctgactaaaggcgtaatcactcagttggtagacgaaatcgcctcaaccgatgatttctaccgtctcggtaaagaagcggctctggcgagcggcctggcacagaaaggcgacgtggtcatcatggtttcaggtgccttggtaccaagcggtacgaccaatacctcttcagtacacgtgttataa

SEQ ID NO: 42195 - DNA, 900 bp, Yersinia pestis
atgctggataaaacacgtttacgtatcgcgatgcagaaatcgggtcgcctgagtgatgaatcccaagagttgttgtcccgctgcgggattaaaatcaacctgcaacagcagcgcctgatagccttcgcagagaacatgcccatcgatattctgcgggtccgtgatgacgatatccccggtttggtgatggatggtgtggtcgatctgggtattatcggcgagaacgtgctggaagaagagttacttaatcgccgcgctcaaggcgacgaccctcgctatttcaccctacgtcgcctggattttggtggctgccgcctttcactggccgccccactggatgctgaatacactgggccgcaatgcctgcaagatacgcgtatcgccacctcttatccgcacattttaaaacagtatctcgataaacaaggcgttcgttttaaatcctgtttattgaatggttctgttgaagtagccccgcgtgctggtttggccgatgccatctgtgatttggtatccaccggtgccacgctggaagccaatggtctgcgtgaagttgaagtgatctaccgctcaaaagcctgcctgatccaacgtgatggtgaaatgtccgttgataaacagcaactgattgatcgcctgatgacccgtattcaaggggtgatccaagcgcgtgaatccaagtacatcatgatgcacgcgccgagcgaacgtctggacgaaatcattactctgttaccaggggctgaacgcccaaccattctgccactggccggtgacaagagccgtgttgccatgcacatggtcagcagcgaaacgttgttctgggaaaccatggagaaattgaaggcgctgggtgccagctccattctggtattaccgattgaaaaaatgatggagtaa

SEQ ID NO: 42196 - DNA, 747 bp, Yersinia pestis
atgttaagtattaagaatttaaaagttagcgttgaaggtaatgaaatcctcaaaggtttagatctggagatcaaaccgggtgaagtacacgctatcatggggccgaacggctcagggaaaagtactttatcagcggcattggcagggcgtgaagagtatgaagtcaccgaaggtgaagtcacttttaaaggaaaagacttactcgaactcgcgccagaagatcgtgcaggggaaggtgtctttttggctttccagtatccggtagaaatccccggtgtcagtaaccatttcctcctgcaaacctcggttaatgccgtgcgtaaatatcgtcagcaggcgccattggaccgctttgatttctctgattttattgaagaaaaaattgccttgctgaaaatgccagctgatttgctgacccgctcggtcaatgtgggtttctccggtggtgagaagaaacgtaatgatattctgcagatggccgcattagagccttcgttgtgtattctggatgagacagattctgggttggatattgatgcactgaaaatcgtggccaatggcgttaactcactgcgcaatgagaaccgctcatttattatcgttacccactaccaacgtattctggattacgttaaacctgatttcgtccatgtgttgtatcaggggcggatcattaaatcgggtgatttcacgttagtgaaacagttggaggagcaaggctatggctggcttaccgaccaacagtaa

SEQ ID NO: 42197 - DNA, 2403 bp, Yersinia pestis
atgtttgctcatgataaagctaataataataaagccgcggacaagaccggcacggtgacgccgacccatatcgtctcgccggaggccgccccaaccgtgagtggcgctcagatgaccgagatggccggggggattggggatgcggtgggcggcactgccggtaagcgcatcaatcaggccgccgaggtggcaaaaaccgccctggatgccaaagcaaaagtactggacggcggcgtcacgccgacgaacattgtggccactggcccggccccaaccgtgagtggcgctcaaatgaccgagatggccggggggatcggggatgcggtgggcggtactgccggtaagcgcattaatcaggccgccgaggtggctaaaaccgccctggaggccaaagcaaaagtactggacggcggcgtcacgccgatgaatctggccgcgggcggggccggtgcgggattgccggacagcgccgcggcggcgatatcccgcctggtcaaacagccctccggcctgcaatttaccctgacgacggccagtttaccgccccagacctttgcggtggtggatttcaccctgagcgagatgctctcctcgccgtttgtgctcaatgtcgggctggcgagtgccgatccggcggtggattttgcggcggtattggatgaagacgccacgctgtttatctggcgcgaaggggtactgcaacgcagcatcaccggcatggtcgccagctttgaacagggcgataccggttttcatcagacccgctacagcatggtgatccgcccggcgctgtggcgcaccagcctgcggcgcaatgcccgcatcttccagcaagcctcggtggaagagatcatcaccaccctgctgaaagagaacggcatcaacgattttgcttttggttttcgccacccgcacccggtgcgcgagttctgcgtgcaatatcaggagtccgattttgattttatccagcgcctgacggcagaagaggggattttctactacttcgagttcagcgccgggaaaaataccgtggtgtatgccgatgatgttggctccctgccgaaaggcgcgtcactgccctataacccgaatgtggcggcgcaggcgcaggaactgagtatcaccaccttcacccgcagtgcgcaggtgcgcccggcgatggtgcaactgaaagactacacctttaaaaacccgaactgggccgcggccttcagcgaacagtcgggagaactgcaaaaccagcgaccggactacgagcattttgattttccggggcgcttcaaagatgcccagcacgggcaggattttacccgctaccggctggacgcgctgcgcaatgacgccaatctggggcagggggccagcaatgattttaccctccagccggggcagttgttcagcctgtacaaccacccgcgtggtgatctgaaccacgcctggcagttgctcggtattcagcacagcggcaaacagatgcaggcgctggagcaggcatctggcgatcagggcacggtgctgttcaaccacttcagttttattccgcacacccagacctggcggccgacgccgttggctaaaccggcgatggacggcccgcagatcgccatggtggtggggccgccgggggaagagatttactgcgacgaatacggccgcatccgcctgcaatttttatgggatcgctacgggcagagcaatgacaacagctcctgttggatccgggtaacccagccgtgggcgggccagggctggggcatgctggccattccgcgtattggtcaggaagtggtggtggattttctgcacggcgatccggatcaaccgattgtcacggggcggacctatcacgccaacaacatcccgccggggtcgttaccggccagtaaaacccagatggcgttccgctcaaaaacccacaaaggggaaggctacaacgaaatgcgcttcgaggatgccaaaggcggcgaagggctgtttatgcatgcgcagaaagatatgacgaccatggtgctgaatgatcgcaaaaccgatgtgactcaggaccattcagagcacattgggcaagatcagtccgtgacggttgtgcgtaaccaaagtaatacgatccaaaatgatcgccgggtagaggtgactcgcgatcaacaaaccgaagtgggcaatgattaccagctagtggtgaaaggtgaaaagaaagagtttgtgacgaaaattcgttacaccgaagtgcatgaagacgaaacgctcacggtgacgaaaagtattaaaatccatgccaaacaaggtgatatcagcatatcaaccccgaatgccggaattacgatcacccatgacggtgccattgttctgcaagggaaatacattcgtttagcggccgatatgatcgatcttaatccagaggagtag

SEQ ID NO: 42198 - DNA, 2865 bp, Yersinia pestis
atgtttgaagcggcccgtgttgatgacaagctttatcattccagtgccttagcgggttttattattggctccattattggtgccgccgtgatttttgcggccgcggcttacgccgcctccattgttctcaccggcggggcgacgctggtcgctaccggctttattgtgggtatgggggtgaccacgctgggcgtcgttgccggtgggttaatacgctccgtgggcgaaaaaatagggagcatgtgccatcacgatgtcggacaaattacgacagggtccaaaaacgttaaagtgaacagtaaacgggcggcgcatgtcgagctcagtaccgtggcctgtaaagatgactccgccattcagcgcatggccgaaggttcgtcaaatatctttattaacagtaaagccgccgttcgtctggaagataaaacgacctgtgatgcggttgtcgattccgcttccagtaatgtgacgtttggtggggggcgcgttcagtatctcgatattaaacgcgagatttctgatgaaatgcgtgatttgtcagagaagctgtttattgtcgccgggctggcgggcggcatatttggggcggcaaaacaggcggggtgtttcggccttaaatgcctgagcaagattgcgttgggtgagatggccggggcggctgccgggtatgggttggaaaaaggggttggggccatcgccggttatttcggttacccggttgatgtgatcagtggacagaaattgctgacaggtgagggcgatgataccgattttattctgccgggtatcttcccgctgcactggagccggatttatcgcagtgaaaatcaccatgtcggggcgctgggacaaggctggtctctggtatgggagcgttcattacgcaaagaagatgacagcattgtttatcagaatgatgaaggtcgggagattgtctttcccctgattaaacgtggagagcgctatttctcccccacggagcatatctggctggcacgtaccgagcgtgatacctatgccatcagcagcccgtttgaaacctgttttatttttgaggccttttctgaggctggcgttgcgaaattagccagcctcgaagatctcaatggtcatgccctgtatttctcttatgacgatatcgggcaactgaaaaaaatatcgaccaccagcggttatggggtgtattgccagtatgaaaaagggcgtctggtgtccgttgcctgcgtcaagggcggtacgccgggcacactggtccgctaccagtataatgaacagcaccagttggtcagcgtcactaaccgtgaggggcaaatcacccgccagtttggttaccatggccatctgatcaataaactggcggatgtcagggggctggagtgccgttacacatgggctgatatcggcggaaccccgcgaattacgcacagtgccaccaatctgggggagcagtggcagtttgattatgatatcgacaatcaacagaccaccctgacggacctcaataccgggcagaccgcctgctggggatataacgcccaacatttaattaccgactatcgggattttgatggcgggaaatatgcatttgactacaacgacctcaatatgccggtacgcgttgtgctggcaggcgagagaacgctcgttctggtttacgatgcactggcgcgcccgatccagatcaccgatccgctaaaacgtgaaacccacattgattatcaccgtaacagtctgcgggtggtgcgccgtcagtaccctgacgggcaggtctggaagggggaatatgaccgtaccggccgtttgctgaaagagaacgcgccggatggcggggtgacgctttatcattatccaggggcctcatcccttcctgaacgcataaccaatgccgtaggggcgcagacacaccttggttgggaaaggcacgggcaactgacggagcacaccgactgctcgggtaaactgacccgctacgaatatgatatcgatggccatctgctgacggtcatcgatgctgaaaaccattcaacacattacagctacaaccgtctcgggcagcccaccgggatcaggtacgccgatggccgcaaagagcagttgcggtataacgctcaggggctggttgaacagtttaccgatcctgtcgggcggcagttgcactggcgttataacctgcggggtcagccggtcagctttactgatcgtctgcaacgggaataccgttaccgctatgactgccatgggcagatgattgagctggataatgccaatggtggccagtatcacttccggtggagcagtggcgggcaattggtggaagagcagtatcccgataaccttgtccggcgttatcgctatggggagagcgggatgctgatggcgctggagaccaccgcgcccacggttgacgatcttaccgtctcccggcaggtcagttttgactatgatgcgggcgggcgaatgacgcagcgcctgacgggcatgagtgcgacccggtatgactgggacatcatggaccgtttattgctggccgagcgtgtgccaacggcggtgggcgaacaggcggggatcgtcggtcatggtgttcgtttggcgtatgacaaggccgggcatttactgacggaaagcggtgacctgggtgcggtgacgtatcagtgggatccgctgcatcatctggccgccctgacgctgcccgatggtcagacgctgtcatggttgcgttacggtgcgggccatgtcagtgccattcgtcatggtgatacgcttatttccgagttcagccgggataatcttcatcgggaagtgagccggacccagggtattttgacgcagtatcgtgattatgacgcgatggggcggcggttgtag

SEQ ID NO: 42199 - DNA, 2199 bp, Yersinia pestis
atgtttgctcatgataaagctaataataataaaaccgcggacaagaccggcacggtgacgccgacccatatcgtctcgccggaggccgccccaaccgtgagtggcgctcagatgaccgagatggccggggggattggggatgcggtgggcggcactgccggtaagcgcattaatcaggccgccgaggtggctaaaaccgccctggatgccaaagcaaaagtcctggacggcggcgtcacgccgctgaatctggccgcgggcggggccggtgcgggattaccggacagcgccgtggcggcgcttacccgcctggtcaaacagccctccggcctgcaatttaccctgacgacggccagtttaccgccccagacctttgcggtggtggatttcaccctgagtgagatgctctcctcgccgtttgtgctcaatgtcgggctggcgagtgccgatccggcggtggattttgcggcggtgctggatgaagacgccacgctgtttatctggcgcgaaggggtgctgcaacgcagcatcaccggcatggtcgccagctttgaacagggcgataccggttttcatcagacccgctacagcatggtgatccgcccggcgctgtggcgcaccagcctgcggcgcaatgcccgcatcttccagcaggcctcggtggaagagatcatcaccaccctgctgaaagagaacggcatcaacgattttgcctttggttttcgccacccgcacccggtgcgcgagttctgcgtgcaatatcaggagtccgattttgattttatccagcgcctgacggcagaagaggggattttctactacttcgagttcagcgccgggaaaaataccgtggtgtatgccgatgatgtcggctccctgccgaaaggcgcgtcactgccctataacccgaatgtggcggcgcaggcgcaggaactgagtatcaccaccttcacccgcagtgcgcaggtgcgcccggcgatggtgcaactgaaggactacacctttaaaaacccgaactgggccgcggccttcagcgaacagtcgggagaactgcaaaaccagcgaccggactacgagcattttgattttccggggcgcttcaaagatgcccagcacgggcaggattttacccgctaccggctggatgcactgcgcaatgacgccaatctggggcagggggcgagcaatgattttaccctccagccggggcagttgttcagcctgtacaaccacccgcgtggtgatctgaaccacgcctggcagttgctcggcgttcagcacagcggcaaacagatgcaggcgctggagcaggcgtctggcgatcagggcacggtgctgttcaaccacttcagttttattccgcacacccagacctggcggccgacgccgctggcgaaaccggcgatggacggcccgcagatcgccatggtggtggggccaccgggggaagagatttactgcgacgaatacgggcgcatccgcctgcaatttttatgggatcgctacgggcagagcaatgacaacagctcctgctggatccgggtaacccagccgtgggcgggccagggctggggcatgctggccattccgcgtattggtcaggaagtggtggtggattttctgcacggcgatccggatcaaccgattgtcacggggcggacctatcacgccaacaacatcccgccggggtcgttaccggccagtaaaacccagatggcgttccgctcaaaaacccaccaaggggaaggctacaacgaaatgcgcttcgaggatgccaaaggcggcgaagggctgtttatgcatgcgcagaaagatatgagtaccacggtaaaagataaccagacgacgacggtggagaaaggtaatcaaaccgtcaccgtagaaaaaggtgacaggacagtcacggtcgcgaccggaaatgaaaccacagatattacccaagggagcctgaccgagacgatcaaagtgcgtcgcagtacctgcgcgaattttattcaggtgaaggctgaaggtgatgcgcctggtacgcaactttataccgcgacggaacagataaagttcgtggtgggcaagagcagcattaccttaaatccggactctattattctgcaattttctggctctacctctattacgctgaatgccgccaatattgacgccatcgcgccattgattaacttaaataaagacaagggataa

SEQ ID NO: 42200 - DNA, 1431 bp, Yersinia pestis
atgtcagataaaaataagcaaccaacattttacgtccacgattatgaaaccttcggccagcggccagccttggatagacctgcgcaatttgccggggtacgtaccgatctggatttcaatctcgtcgaagagccattggtcatttactgcaagcccgcagatgattatctgccacagcccgaagcggtgatgataaccggtattaccccccaacatgctttagccaacggggtcaatgaagctgagttttcccgccaaatacaccaggccttttcggtacccggcacctgtatcctcggctacaacaatattcgttttgatgatgaagtcagtcgcaacattttctatcgtaatttttatgatccttatgcctacagttggcaggggggaaattcccgttgggatctgttggatgtgatgcgcgcctgctatgccctgcgcccagaaggtattgtttggcccgaaaatgatgatggcctgcccagctttaaactggaacatttgaccaaagccaatggcgtcgaacatttacaggcacatgatgcgatgtccgatgtctacgccaccattgcaatggcaaaattggtgaaacaggcccaaccccgtctgtttgattatctgtatcagcaccgcagtaagcataagatcaatgcgttgattgatatcgcggagatgacaccactggttcatgtgtctggcatgtttggtgccgcacggggcaacaccagttgggtggcaccgctggcctggcaccccgagaataaaaatgcggtaattatgtgtgatctggccggggatatgtccccattactggagttggacagcgatacattgcgcgaacgtctgtatacccgccgtgacaagctccaagcccaagagtcggcaatccctatcaaactggtacatatcaataaatgtccggtattggctcccgcgaaaaccctgctgcccgagaatgctgatcgcttggggattgatcgccagcgttgtttgcaaaatctacaactgctgcggcaaaacccacaggtgcgtgaaaaagtggtcgcgctgtttgcacaagctgagccattcgcggttaccgatgatgtggatacacagttgtataacggctttttcagtgatgctgatcgcgccaccataaagattatccagcaaactgagtcacaaaatctgccagcactggatttgacatttcaggacccacggttggaggccctgttattccgcttccgcgcccgtaactacccgaataccttgaatgacagtgaacaacagcgttggttacagcatcgccgtgaagcgcttagccctgaacgggtacaagattatgttttgcaactggaacaattttataaccagtatgaagacgataaagagaaacttgcgctgctaaaagcgttgtttgaatatgccaagggattagtgagttaa

SEQ ID NO: 42201 - DNA, 1104 bp, Yersinia pestis
atgaatgacccgcaacaacgtcttctcgatttacctaaactgatgtttggggtgatattcattatgggaatgattatcgccagtttttgggtaatacagccttttgtcatgggctttgcctgggctggtatggtggtcattgcgacctggccgctgttaatccgattggagaaacttctttggggcaggcgttcactggccgttgttgtcatgacgatattgctcattttactgtttgttattcctatcgcgctgttggtcagtagtttggttgaaaacagcgccccactgatccaatgggcatccagcccatcaaatctgcgtatgcccaatgtggattggatgaaatcgattccattgataggcgataaactttatagcagttggaataccttaatttctggtggcgctaacgctttaatggctaaagtacagccctacattggtgccaccgccacctggtttgtggcacaagcagcacatgttggctattttctgattcatctggccttgatggtgctctttagcgttttgctctatatccatggtgagcaagtcgccttaggtatccgtcattttgccatgcgtgctgccgataagcgtggcgatgccgtagtcgtgatggcggcgaaagcgattcgtgctgttgcgttgggtgttgtggtcaccgcattagtacaagccatactcggagggataggtcttgctatcgcgggtattcaatatgccaccctattgacggtattaatgttcatctgttgtgttgcgcaactcggtccattactggtgctggtacctgcggtcatatgggtgtattggacgggtgatacgacgtggggaacaatactcttggtctggagctgtatcgttggaacattagataacttcttgcgcccatatctgatccgtatggaagcagatatgccaatgattctgatcctctccggggtgatcggggggttgttatcctttggtatgattggtctatttatcgggccagtggtgttggctatctcatatcgtctgatttcagcctgggttcacgaaacgccagaacccgaagagagtgttaccgatgccgctaagcatttagaagagctttaa

SEQ ID NO: 42202 - DNA, 4539 bp, Yersinia pestis
atgactgtcgcacaaagtattggcaccgggtatggcgcggctggcgcgcaatcggcattacgtcaaaccgcgctggggcaacagagcccggcgcggacggattatcaggtcagtaatcccaatgtggggaatatcgcgcgagcgagtgattctctgctgaatgtggcggaaagtcagcagtttaacactctggtgaccgccggttttgggatgcaggcgattgccgccggggtggccgggggatatgtcggtgccaaaatcggcaataagttaggtcacggtattgcccgtgcgcttaattttaatcaagtggcgacggaaggagaaagccccgcgcacctgggccatcccattgcccatcagaaaaaagattggggggtgtggggggccattggcggtattttactgggggcagcggcggcggcattggtggtcgtcacctttggtacggggttggtggtgattgccgcggcggcggccgcagccgggttaatcggcggtatcgccgccgcgaccggggcggcattaggacaatacggtgataacaaaggcgtgattgctgaaggctccgccaacgtcttctttgaaggccagccggtggcccgggtgggggataagatccaatgcagcgatcaccccagttcaccgccgccgatgattgccgagggcgcaaaaaccgtatttgccaaccaaaagcagatcgcgcgtctggggcaccgtaccacctgcgatggcaatatcaatgcgggatgcggttcgctcgccatcacgcaggaaacggcttatgtgtatgaagtggcagacagccgtaatccgtatttacgctggtcagcggttattctgagtttcttgccaatacagaaaaaatttgagcaagggtttcgctccttaaaaaagccgcccaataccgcggtcaacgctacccataactgcccgaccggcagtgatcctgttgatatggtctccggcgattaccttcaggtctggcccgtgattgatattgccggtgttttgcctgtccggttacagcgtacttatcgttccggcgattatttcacggtctcgggttgctttggtcataaatgggcggatagctggtcacaacacttggtcgtgcacgaagacaacattgattacattgatgaggaaggggtggggctgagcttctttacgccagagaataaagtccaggccgtcaatctgtataacctgcgttatgagttagtgggggagcgtcatggcgaactcagggtttttgaccggtcaactcagcagacactgcattttaatcaacagcaacaacagcagcgttatttatcggctatcaccgaccgcaaagggaaccgaatcgattttcgttaccaacagggggaactgatatcggtcgagcacagtgacggctatgtgctggagatcgacagccgtggcaggacaatacacgcggtcgagcttgtcacgcaggagaaaagacaaaagctgttgcagagtacattcagtgagcgcggttacctcgttcagtgccagagtttccagtatggcacgctgtcgcatgaatatgatccgaaggggtatatggtgcgctggcgggatacggatagcacggatgtggctgtccgttatgatatttcagggcgggtggtggcactaaaaacatcgaccggtttttttgccgaccattttatttatcatgacaaagaacgctatacgatctatcgcgatggggaagggggagaaaccggttatcactataatgaaaacaatctgctgataaagttagtcgatccgttaggcaataccaccctcaccgactgggacttgacccagaaaataaaagaaaccgatgcattagggcgtatcacccggtttatttacaatgagcgcggtgatttaaccgccgtgatcctcccggatgaaacccgtaccgaatatgagtataacccgtctggcgtggtcactgcgtttacgtcttcggcgggggatagctggcaatatcagtatgacaggcagggattgttacgacaggtaacttatccttccggccagacgatgtcgtttcgctacggcaagaagggagaagtgctgcgcaagatcatcgcggaagatcaggtgtggcgttaccactatgatcaccacggttgtttaagcaccattatcgatccgaaggggaacagtacagccgtcacactggatgtgctggggcggttattttctcaccaaaacgccctcggggagctcacccgttacacacacagtgacgcgcatgccagtccggcgggcagcgtcacaaaaatggtcatgccggatggtgtggagcaggccattgcctatgacagcgagaagcgtattgccgcgctgaccgatggcgcggggaaaaccacccgttacgaatacgggggttttgatttactgaccggcctgatacgcccggacgggcagcggctgaccttcggctatgacacactgacgcgcctgaatcaggtgaccaatgcgtcaggtgacacctatcgttatacccgtgatcgggccgggcaggtgatcagcgaaaccgattttaccgggcgcacggttcattatcagtatgatgcggtggggcggcgtatcggggcgcgttacccggatcagcgccttgttcgctggcactactcgatgcaggatcaggtgctggcgcagcagacctggcactgcgatgcactgagttccacgctggttggcacggtcagctacggttatgacggtgccggtcgtttgctgagcgcgaccaatgcggatgcggtggtggagtttgattacgacgaggcgggtcagttggttgcggagcggctgaatggccgggaggtgcggcatcagtgggatgcgctaaacggcacccctgttgcccgacaggtgggtgagctggggctgacgtttgtgtacggcgcacagggcgaactgacccggctacagctggcgggccatcagccccttcagttgcagcatgaccggttggggcgggagacggtacgtgaaagcgcggccgggtttattcaggcctgcaattataccccgagcgggctgttggcccatcaggcggccgggcgtaactcggcattattccagcaacagttgatcgccccggagagcccggccttgcacggcagtgcggtcaaccgcagttggcagtatgaccgggcttataacgtggtggggatggatgacgggcgttggggtaaaacgcagtaccaatatgaccgcaatgaccaggtcgttcgcgctgattttggtggttttttgccgttgcaggagcagtttagctacgatgtgaaccagaacctgcgcgagcatcgctgtttaccgcgtggggcacaggcggttttggcgcaggcgagccagcaacagcaggcgggccgggtggtgaagcgcggtgacagtcagtaccgttacgatgctgccgggcgactggtggagaaacgcagccaaaaagacggctaccggccacagctgtggcgctaccgctggaatgagcaggaccagttatccgaattgatcacgccgacgggggcgcgctggcgctacggttatgatgcctttgggcgacgtattcgaaaactgcgggtagtggataccccgccgctcaatgagatggacgctccttccaccggtccggccacggcatcactggccggttacgcgtacctgtggagcggcgaccagttaatcgaagaggtgccggtgtatgccgacggcacggtggcgtatgagcaggggatccactggctgtatgcgccgggcggattaacgccgatggcccgctacgcgcaaggcaaactgcattatgtggtggcggatcatctgggtacgccgcgggagttgttgaatgagcagggcaaggtggtgtgggcgagccgactgagcacctgggggcaggcggaattatggcgacaggcggcgaatgaggaggatcgggtcagctgtaacctgcgttttgcgggtcagtacgcggatgcagaatccgggttgcattacaaccggttccgctactatgatggcgagacggggcaatatctatgcccggacccgatagggctggaagggggattaaacccgtacgggtatgtacataatccggtgagctgggtggatccgctggggctggcaacatgtccaatgcgtgaagttaacggaacaaaaatatttggtaaaggccaaaaagatggaactcctggtcatgatcagttctctgaagttatagccaataaattagccatgagtggtaagtttaaagaggtctatttaaataggtcatataattttgctaatggtaaaggaatctcaggacgacgacctgacattatggctgttgatatgaatggtaaagttcatgctatagaattggcatctaaaacagatatgggtagaaaattcccatctctgagaactcgaaaccaagatgcaatgaaaaacttaccaagcattgatcggggaagtgttattgtattagaacaccaatataattcttcgaagattaagaatgcattagataatcttatttctggtatatag

SEQ ID NO: 42203 - DNA, 822 bp, Yersinia pestis
gtggaaagatgtgtattttatatttcggatggtaccgctatcaccgcagaagtactcggccatgccgttctatctcaattcccgatcaacgtgacaacctttacgttaccttttgtcgagaatgccgcccgcgcacagtcagtatgtaaacaaatcaatgaaatatatcaggatacaggtgtcaggccgcttgttttctattcgataataagcctcgaagtacgggaaattattcaacgaagtgaaggattttgtcaggatatcgtgcaagcactggtcgcaccattacaaggtgagttgggcgtaccacctcaaccagtgctaaaccgtacccacggcttaaccgaaagtaatctggataagtacgatgctcgcattgcagccattgattatgcccttgcccatgatgacggtatttctctacgtaatctggatcaggctcaggttatcctgctaggcgtttctcgttgtggtaaaacccccaccagcctctatctcgccatgcaatttggtatccgggcggcgaactacccgtttatcgccgatgatatggacaatttgcaacttcccgccgcactgaagccttttcagcacaaactctttggtttgacaatcaaccctgagcggcttgcggctatccgtgaggagcggcgcgaaaacagccgttacgcctcactgcgccaatgcaggatggaagtgggggaagtggaagccttattccgcaaaaatcagattcgctacctaaactcgaccaactactcagtcgaagagatttcaacaaaaatcctggatatcttagggatgagtcgtcggatgttttaa

SEQ ID NO: 42204 - DNA, 387 bp, Yersinia pestis
atgaaagggtatctgtgggggggggcaagcgtcgtattggtcacggtggcacagttggtgttgaagtggggtatgatgaatattccattattatcactagccgatattaatgttcaattcttgacgatgtacttcgtgcaattagcatcagtaatgtgtggtttgatggggtatgctttatccatgttatgttggttttttgcccttagatacttgccgctaaatcgcgcttacccactgctgagcctcagttacgctttggtttatctgggcgctgttttattaccttggtttaacgaacccgcgaccttactaaaaacactgggggcgggttttattttattaggaatatggctgattaatataaaacctataaaagctagctaa

SEQ ID NO: 42205 - DNA, 843 bp, Yersinia pestis
atgaaactattacgttatggtcccgtcggcgaggagcgcccggcgttacttgatgagttgggagagattcgtgatctctcggcacatatcgaggatatcagtggcaaatttttactgcctgcgacgctgtacaaactgcgtcagttggatagcgccagtttgcccctcgttcggggtgaacaacgccttggtgcttgcgtgggtcatgtcggtaagtttatctgtgttggtctgaactacgccgatcatgctgctgaaacgggggcagaaatcccgcaagaaccggtgatcttcaataagtggaccagcgccattattggtccgaatgacgatatagaaatcccgcgtaactcagtgaaaaccgattgggaagttgaactgggggtggtgattggcacaggcgggcgatatatcggtgaggccaacgccatgtcttacgttgctggctattgcgtggtcaacgatatttccgaacgtgagttccagctagagcatggcggtacctgggataaagggaagggttgcgataccttcgggccgattggaccgtggttagtgacccgcgatgaaatacccgatccacatcagctagggttgtggttagacgttgatggcaggcgctatcagaacggcagtacccgcaccatgattttcaaaatcccgcaaataatcagttatctaagccgctttatgagtttgcaatccggggatgtcatttctaccggtaccccacctggcgtgggtcttgggcaaaaaccgcccgtctatttacatgcagggcagataatgcgtttgggtatcgaaggtctgggagaacagtgccagaaaacgatacaagcgtag

SEQ ID NO: 42206 - DNA, 1146 bp, Yersinia pestis
atgatcatttctgcctcaacggattatcgcgccgccgcgcagcgtaaattgccgccgtttcttttccactacatcgacggtggtgcgtacaacgaacaaactctacggcgcaataccgccgatttggctgatatcgccctgcgccagcgtgtgctgaagaacatgtctgaactgagtctggaaacgcagcttttcggcgagacgcaggcaatgcctgttgtccttgggccagtcggtctgagcggcatgtacgcacggcgtggtgaagtgcaggccgcgcgggcggcggataaaaaaggtattcctttcaccctctcaaccctttcggtttgccctatcgaagaggtggctcctgccattgcccggccaatgtggtttcagctttatgtcctgaaagatcggggttttatgcgtaatgcactgacgcgtgcacaggccgctggcgtgaagacgttggtgtttaccgtagatatgccggtacctggcgcacgttaccgcgatgcacactctggtatgagtgggccgaatgctgccgctcgccgcttgcttcaggcgatagcccacccacagtgggcttgggatgtgggcttaaacggcaagccccatgacttggggaatatatcggcctatctcggtaaaccaaccacgctggaggattatatgggttggatagcgacaaatttcgacccatcgatctcgtggaaagatttggagtgggtacgtgagttctggcaaggaccgatgatcattaaaggtattctcgatccggaagatgccaaagatgcagtgaaatttggtgctgatggcattgtggtgtcaaaccacggcgggcgtcagcttgacggtgtgctctccaccgctcgtgccttgccagccattgcagatgctgtcaaaggggatatcactattctggctgattccggcatccgtactgggttggacgtcgtacgaatgatagcgctcggcgcggatagcgtgttgttaggccgtgccttcgtctatgctctggccaccgcaggagaagccggtgttatcaatctgctgacgctgatcgagcaagaaatgcgtgtggcgatgacgttgaccggagcgaagcgaattgccgatatcaaccgggattctttggcagtaagtgaacgggggtaa

SEQ ID NO: 42207 - DNA, 2004 bp, Yersinia pestis
atgaaagcgattgtatttgcctatcatgatattggttgcgtggggctaaacgcattagcagaggcgggttacgatattcaggcggtatttacccatactgataatcctggcgagaatcgctttttctcttcggtcgctagagtggcagccgatctggcactgccagtatttgcaccggaagatgtcaaccaccctttgtgggttgagcgtattcgtgagttacagccggatatcattttctccttctattaccgcaacatgcttagtgatgaaatattgtcattggccccacaaggcggatttaacttacacggttcgttattgccccagtatcgtggtcgagccccaattaactgggtattggtcaatggggaaacagagacgggtgtgacgcttcatcagatggtaaaaaaagcggatgcaggtccgattgccggtcagtataaagttgccatcagtgatgttgatacggcattgacgttgcatgccaaaatgcgtgatgccgctcaagaattgttgcgtaacttattacctagaatgaaagagggcccactgccgctgactccgcaaaaagaggcagatgccagttattttggtcggcgcacggcggctgatggtgaaattcattggcagaaatctgcatttaccatcaacaatttagttcgtgcagtgactgagccttaccctggcgcattcagttatctggggcagcgcaaacttacgatttggcgctcacgtccattagatttagtacataacaaattgccaggcaccgtgttatcgacggccccactcactgtggcatgtggcgagggggcgctggagattattacggggcaaggtgaggccggtctgtatgtccaaggggatcgtttagcacaagagatgggcattgtaacggatgtgcgtttgggtaataagccaagcaatacgttgaaaagacgtacccgtgtgttaattctgggggtaaatggttttattggtaatcatttgactgaacgcttattacaagatgatcgctacgaagtatatggtttggatattggctctgacgcgataagtcgcttcttaggtaaccctgctttccactttgtggaaggggatatcagtattcattcggaatggattgaataccatattaaaaaatgcgacgtcatcttgccattagtggctattgcgacacccattgaatacacccgtaatccgctgcgtgtctttgagctagattttgaagaaaacctgaaaattgtgcgagattgcgttaagtacaataagcgtattgtcttcccatcgacctctgaagtgtatggtatgtgcgatgacaaagagtttgatgaggatacttcacggctgattgttggcccaattaataagcaacgctggatttactctgtatcaaaacagttattagaccgggttatctgggcttacggcgtgaaagaaggtttgaagtttacgctgttccgtccatttaactggatggggccacgtttagataaccttgatgctgcgcgtatcggtagttcacgtgcgattacacagcttattctgaatttggtcgaaggctcaccaatcaagctggtcgatggtggtgcccaaaaacgttgttttactgatatccacgatggcattgaagcgttattccgtattattgaaaaccgggatggttgctgtgatggtcggatcattaatattggtaatccaactaacgaagccagtattcgtgaattagccgaaatgctgttaacgagcttcgaaaatcatgaattacgtgatcactttccgccatttgcaggttttaaagatattgagagcagtgcatattatgggaaaggttatcaggatgttgagtaccgcacgccaagtattaagaatgcgcgccgaatattgcactggcagccagaaattgctatgcaacaaacggtcactgagacgctggactttttcttgcgcgctgccgtaattgagaaaactgcagcccctaaagatgagttgaacgcatga

SEQ ID NO: 42208 - DNA, 1650 bp, Yersinia pestis
atggaaatcttttttacaatcctcattttgattttagtggtatcgctttctggcgttgtcactcgaatgttaccgtttcaagtccctcttcctctgatgcaaattgtctgcggtgctttgctggcttggcccaattttgggttgcatgtcaattttgacccagagctattcctggtgctgttcattccgccgctgctatttgccgatggttggaaaacaccgacacgggaatttattcatcatgggcgagaaatattgggtctggcactggcattagttttggtgaccatcgtgggtatcggttatctgatttactggatggtaccgggtattccgctggtggcggcctttgcgttggcggcggtgttatcgccgaccgatgccgtagcgctatccggtatcgtgggtaaagggcggatcccgaaatccattatgggcgtactggaaggagaggcgttgatgaacgatgcctccggtctggtggcgctgaaatttgccattgcagtggcgatggggacgatgatctttaccgtttccggtgccacgctggagttcttaaaagtcgcgatcggtggtctgctggcgggtgtggcgataacctggttgtacagtaaatcgctgcgtattatgagccgctggagcggcgatgatccagcgacacaaattgtcttgttgctgttgttaccgttcgcctcctatttggttgcagagcaccttggcgtctccggcatcttggcggcggtggcggcggggatgaccatcagccagtcgggtattattcgtaacgccccgttggcgatgcggctgcgtgctgacagtgtgtggtcgatgttggagtttgtgtttaacggcatggtatttatcctgttgggtctgcaattaccggggatcctcgaaacctccatcacacaagcagaactggacccgaccattcaaacctggaacctgttcgctgatgttgccattatttatggcgcgttgttgttgctgcgtttcggttggttgtggtcgatgaagaaaatcagtaagcgggtgctgaccaagcggccactgcaatttagcgattacaccacccgtgagctgtgggttgcttcattcgccggggtgcgtggggcgataacccttgccggtgtgctgtcgattcccttattccttagcgatggctcagccttcccatcccgctaccaattggtctttatcgccactggcgtgatcttgttgtcggtgattattggggtgatcgccttgccgccgttattacgcggggtggtggttgcggataagagtgccagccgtgaagaaattcgtctggctcgggcggcgatggcagaagtcgcgattgttagcctgaataagatggaagagcggctaatgaccagtagtgaggagaatattgactcagagttactgaaggaggttagctcgcgggtcattggtacattgcggcggcgcacgggcagtaaagatgaagttgagaatacgctgctgattgaaaatctggaacggcgttttcgcttaaccgccctgcgggccgaacgtggtgagttatatcacctgcgcgccacgcagaaaatcagcaatgaaaccctgcaaaagctgctgcatgatttggatttgctggaagcgttgctgatcgaaaaagaaggttaa

SEQ ID NO: 42209 - DNA, 1008 bp, Yersinia pestis
atgcagacaagtcagttatttaccgcacttcaacaacggcagcggcagcgcgactatcgttatcttactgggctggttgtcatgcttttgttcgcgctactcatcagtttatgtgcgggtgatgtctggatttggccagagcattggttcagtgaaagtggcaaattatttgtttggcaactacgtttgccccgatctatggctgtaattatggttggtgccagtctggccgtgtcgggtgccgtgatgcaggcactgtttgaaaatccgttagctgaaccaggtctacttggcgtggcaaatggcgcaggtgttgcattggtgacggccgtattattaggtcatggattattgccaatttgggttctgagcacgtgtgctattattggcgcattgttgatgacatctattctgttaagtttcacccgtcgccgtttattaactaatgcccagctattattggtcggtgtagccttaggtattatttgcagtgcaatgatgacttgggccgtctatttcagcaccagtttggatttacgtcagctcatgtattggatgatgggtgggttcagcggtgttgactggcgtcagcaaagtttggtgctggctctcttgcctaccgtcatatggctttgctgccaaggccgtgtcctgaacttcatgtcactcggtgagcagcaggccaggcaattgggggtgtcgcttcatttatggcggaatttattagtactggcgatcggattactggtcggcattagtgttgcactcgcgggtgtcatcagttttattggcttggttattcctcatattttacggttaaccggtttaactgatcagcgccggctattagcgggctgtgcattcgccggcgggggggtattattattagctgatgttgtcgctcgcacggtattatcttcggcagagctaccgattggtgtggttaccgcaacattaggatcgccattatttatctggttactgatacgggtgaaaggagtaaagtga

SEQ ID NO: 42210 - DNA, 921 bp, Yersinia pestis
atgataaagccgcagaaattccatatttccctgctacacccacgctattggctaacctggtttggccttggcgtactgtttttgttagttcaactcccttacccactactcaataagttaggtgtttggttggggcgaacctccatgcggttcctcaaacggcgggtttccattgcccgacgtaatcttgaactctgttttcctgacatggataaacaagtccttgagcagactatcatcggtaatttcgaatcattgggcatgggattgctggaaaccgggatggcgtggttttggtccgatacccggatacagcgctggttttccgtctccggtctggagaacctgaaacgcgcacaacaaggtaaacggggcgtactggtcattggcgtccattttatgtcattagagctgggtggccgggtcatggggcaatgtcagccaatgatggcgatgtatcgcccacacaacaataaagtgatggaattagtgcagacctggggccgtatgcgctccaacaaagcgatgttggatcggagagacctgcgcggtatggtgcgagccttgaagcagggtgaagcggtatggtttgcaccagatcaagattatggcccgcgcggcagcgtttttgcaccactgttcgccgtagaacatgcggcaaccaccagcggcacctttatgctcgcccgtttagcaaaacccgcactgctgcccttggttttattgcgcaaaaaagagggccgtggctatgacctgctgatccaacccgcgctggaagactacccgattgacgatgagatagccgctgccagctatatgaataaagtgattgagaaagagatcatgcgcgcgccggaacaatatctttggttacaccgccgctttaaaacccgacccattggcgaaccttcgctgtattaa

SEQ ID NO: 42211 - DNA, 993 bp, Yersinia pestis
atgagattgccaacgtctttccctacattatgtttaaccgcctcggcgttgttactgagccaagtgctatttagccaatccgcaactgcccaacaaattaaagcagccgatgttcatcctaaagattatcccaatgtcgtggcgatgaaagatatgggcgaaaaactaaaagtcgcgactgatggccgtctggagatgaaaacatttcctggtggagtattaggtgatgagaagcaaatgatagaacaggcgcaaatgggggcaatcgatattattcgtgtatccatgacacccgttgcctctattttaccggagattaatgtctttaccctcccctatatcttccgcgacgaagatcatttacataaggtccttgatggtaaaattggtcaggaaataggcggtaaaatcaccgataacaaaaattcaaaattggtgttcttaggttggatggatggcggtacccgtcacctgattactaaacaaccagtgattaaaccggaagatctcagcgggatgaaaatccgtgttcaaggcagcccgattgcgttagcaacgctaaaatcaatgggggccaatgccctgagtatgggcgtcagtgaagtgttcagcggtatgcaaaccggggtcattgatggcaccgaaaataaccagcctacatttgtagcccataattacctgcctgttgtcaaaaattataccctgagcggccatttcattattcccgaagtattcctgtattcgaaagccaagtgggacaaattatctgccgaagatcagcaaaccattcttaaattagcaaaagaagcacaagctgagcaacgcgtattatggacagcctatgagcaacaagctcatgagaaaatgaaggccggcggtgtgcagtatcatgagattgatcgtgattattattataaagccactcagcccgtacgcgatgagttcggcaaaggtcatgaggacttgattaaacagattggtgacgtccaataa

SEQ ID NO: 42212 - DNA, 2388 bp, Yersinia pestis
atgaaattcagtgaactttggttacgcgaatgggtaaatccagccattagcagcgatgatttagctcatcagattaccatggccgggctagaggttgatggtgtagacgcggttgccggtgagtttaacggcgttgttgtgggtcatgtcgtggagtgtgggcaacatccaaatgcagataagctgcgagtgaccaaaattgatgtcggcggtgatcgcctcctggacatcgtttgtggtgcacctaattgccgtcaaggcctcaaagttgcagttgcaacggtaggggcggtattaccgggtgactttaaaattaaagccgccaaactgcgtggtgagtcttcagaagggatgctgtgctctttttctgagctggctatttcagacgatcatgatggtattattgaattgcccgcagatgctcccattggtgtcgatgtgcgtgagtatttgcacttggacgacaagacgattgaaatcagcgtaacgccaaaccgtgctgattgtttagggattattggtgtcgctcgtgatgtagctgtcgttaatcaattgccattaactgaaccggatatggctgaagttgtggcatcaattaatgacacacttcctattcgtgtcgatgcaccacaagcttgcccacgttatctgggccgtgtggtgaagggaattaatgttaaggctgcgacacccctatggatgcgtgaaaaattgcgccgttgtggcattcgttcaattgatcctgttgtcgatgtgaccaactttgtgttgctggagctagggcagccaatgcatgcctttgatctggatcgtatcagtggcggggtcatcgttcgtctggcaactgacggcgaagaactcacgctattagatggtacaaaagccaagttgaacgcagacacactggttattgccgatcatcagaaaccattggcgatggcgggtatctttggtggcgaacattctggtgtcaatgaagaaaccagaaatgtattgctggagtccgcgttcttcaatccactgtctattactggccgagcacgccgccatggcttacatactgatgcctctcatcgttatgagcgtggtgtcgacccagcgttacagcataaagctatcgaacgtgcgacacgtctactgattgatatttgtggtggggaagccgggccggttgtggatgtgacgacagcatcagaactacccaaacaagccactatcacattgcgccgtgagaagctggatcgcctaattggtcatcatattccatctgaacaggtgagtgatattttgcgtcgcttaggatgcaaagtgactgaatgtggttctgattggcaggctgtagcaccgagctggcgtttcgatatggctatcgaagaagacctggtggaagaagtcgcccgtatttatggctataacaatattccagatgtccccgttagagctgatttggtaatgactaaacaccgtgaagcaagcttgtcgctgaagcgggtaaagacagctttggtggatcgtggttatcaggaagcaattacttacagttttgttgatcctaaagtacaggcgttactgcatccacaacaggaagccctcattttaccaaaccctatttcagttgatatgtccgcaatgcgtttatcactgctaacgggtttgctgtcggcagtcgtttataatcagaaccgtcagcaatctcggctgcgattattcgaaagcggtttacgctttgttcctgataatacggcagatttaggcattaggcaggatgtaatgctggcaggtgttattgctggtcatcgttacgatgagcattgggatctggcgcgtcagccgatcgacttctatgatttgaaaggtgatttggaagcaattctggagcttaccggcaaattatctgatgttcagttccgggcagaagcgcattctgctctgcaccctgggcagagtgctgcaatttatttagcgggtgaacacattggtttcattggtgtagttcacccagaattggaacgtaagctggatctgaatggtcgaactgtcgtgtttgaagtgcagtggaataagcttgcagaccgcgctgtgcctcaggccagagagatttctcgcttcccggcgaaccgtcgtgatatcgctgttgtggtggctgaaaacgttcccgcagaagatattttggccgagtgtaagaaagttggcgcaaatcaggtagttggcgtaaacttgtttgatgtgtacagtggcaagggcgtagcagagggctataagagtctggctattagtctggtgttgcaggataccgcccgtacactggaagaagaggagatcgccgctaccgttgcaaaatgcgtagaggcattaaaacagcgattccaagcatccttgagggattga

SEQ ID NO: 42213 - DNA, 984 bp, Yersinia pestis
atgccacatctcgcagagctggttgccaaagctaaagcagccgtagaaggtgcccaagatattgccgcgttggatttagtacgcgtcgaatatctaggtaaaaaaggccacttgacccttcaaatgacatcgttgcgtgagttgccggcagaagaacgtccagcagccggtgctgtcattaatcaggccaaacaagaagtacaggaagcgctcaatgcgcgtaaagagaagttagagtcagcagttctgaatgcacgattagccgccgaaacgatagatgtctcgctaccggggcgtcggatggagaatgggggactacatcctgttactcgcacaattgaacgtatcgaaactttctttggtgagttaggtttttctgtagagtctggcccagaaattgaagatgactatcataatttcgatgccttgaatattccggctcatcatccagcccgcgctgaccatgatactttctggtttgatgcaacccggttgctccggacgcaaacgtctggcgtgcagatccgtactatgcaagagcaacagccgccaatccgtattatcgtgccaggccgggtttatcgtaacgattatgaccaaacacacacaccgatgttccatcaaatggaaggattaatcgttgaccgcgatatcagcttcactaatttgaaaggcacactgcacgatttcttgcgtaacttcttcgaagaagatctgcaaattcgtttccgcccatcttatttcccgtttactgagccttccgctgaagttgatgtaatgggtaaaaatggtaagtggcttgaggtgctgggctgcggcatggtgcacccgaatgtattacgtaatgtcggtatcgatcctgagatttactcaggttttgcattcggtatgggtatggaacgtttaacgatgttacgttacggcgtcaccgatttgcgtgcattcttcgaaaacgatctgcgtttcctcaaacagtttaagtaa

SEQ ID NO: 42214 - DNA, 357 bp, Yersinia pestis
atggctcgcgtaaaacgtggtgtgattgcacgtgcacgtcacaaaaaaatcttaaagcaggcgaaaggctactatggtgcccgttcgcgcgtatatcgtgttgctttccaggcagtaatcaaggcaggccaatacgcctaccgtgaccgccgtcaacggaagcgtcaattccgccaactgtggattgcacgtatcaacgcagctgctcgtcaaaatggtctgtcttacagccgtttcatcaatggtctgaaaaaggcttctgttgaaatcgaccgtaagatcttggctgacatcgcagtattcgataaagtggcgttctctgcactggtcgaaaaagcgaaagcagctctggcgtaa

SEQ ID NO: 42215 - DNA, 198 bp, Yersinia pestis
atgccaaaaattaagacagtacgcggcgccgctaagcgcttcaaaaagaccgctaatggtggttttaagcgtaagcatgctaacctgcgtcatattctgaccaaaaaagctactaagcgtaaacgtcatttacgtccaaaaggcctggtatctaagaacgatctgggtctggtcgtagcatgtctgccgtacgcataa

SEQ ID NO: 42216 - DNA, 552 bp, Yersinia pestis
attaaaggcggaaaacgagttcaaccggcgcgtcctaatcgcatcaacaaagagattcgcgccacagaagttcgcttaacaggcgtcgatggtgaacagattggtattgtcagtctgaatgaagctcttgaaaaagccgaggaagctggtgttgatttagtagaaatcagtccgaatgccgagccgccagtttgtcgtataatggattacggcaaattcctctacgagaagagcaagtcgacaaaagaacagaagaagaagcaaaaagtcattcaggttaaggaaattaaattccgtcctggtaccgatgatggcgactatcaggtcaaactacgcaacctgattcgctttctggaagatggcgataaagccaaaatcaccctgcggttccgtgggcgtgaaatggcgcaccaacagatcggtatggaagtgcttaaccgcgtccgtaaagatctgtgtgaagattctgatttggccgttgtcgagtccttcccgactcgtatcgaaggccgtcagatgatcatggtgctcgcacctaagaagagacagtaa

SEQ ID NO: 42217 - DNA, 1929 bp, Yersinia pestis
atgcctgttattacccttcctgatggcagtcagcgtcattatgaccatgctgtttctgtccttgatgttgctcttgatatcggccctggcttagcaaaagcctgcattgccggtcgggtgaatggtgagctggtggatgccagtgatctgattgagtccgatgctcagttggcgattatcaccgccaaagatgctgaaggtttggagattcttcgccattcctgcgcgcatttgttgggacacgctatcaagcaactctggccagataccaaaatggctattggtccagttattgacaacggtttttattacgatgttgatatcgaacatactctgacgcaggaagacttggcactgctggaaaagcggatgcacgagcttgccgataaagattatgacgtgatcaagaaaaaagtcagttggcaagaagcccgtgatacttttgctgctcggggcgaagattataaagtggctattcttgatgagaatatcagtcgcgatgatcgtccgggcttgtatcaccatgaagaatacgttgatatgtgccgtggtccgcacgtaccgaatatgcgtttctgccatcactttaaattgcagaaaacttccggtgcttattggcgtggcgacagcaaaaataaaatgctgcaacgtatctatggcacagcttggggtgataagaagcaactgaatgcttatctgcaacgcttggaagaggcggcgaaacgcgaccatcgtaagattggtaagcaactcgatctctaccacatgcaggaagaagcaccaggcatggtgttctggcacaacgatggttggacaattttccgcgaattggaaacctttgtgcgtatgaagctcaaagagtaccagtatcaggaagtgaaaggtccatttatgatggatcgcgtactgtgggaaaaaacggggcattgggaaaactacgccgagcatatgttcacgacctcttcggagaatcgtgagtactgcattaagccaatgaactgccccggacacgtacaaattttcaatcaaggattgaaatcttaccgtgacctgccgctgcgtatggctgaatttggtagttgccaccgtaatgaaccttcgggcgccctacatggcttaatgcgtgttcgtggctttactcaagatgatgcccatgtcttctgtaccgaagagcaagtccgtgatgaagtaaacagttgcatcaagatggtgtacgacatgtacagcacctttggcttcgagaagattgtcgtcaaactctctacccgccctgaaaagcgtattggcagtgatgagttatggacacgtgccgaagacgatttggctgctgcgctgactgaaaatggtattccgtttgattatcagccaggcgaaggggcgttctatggcccgaaaattgaatttaccttgcatgattgtttggatcgtgcgtggcagtgtggtaccgtacagctcgatttctcattaccgggccgcttaagtgcgtcttacatcggcgaaaacaatgatcgtcaggtgccggtaatgattcaccgggcaattttgggttcaatggagcgcttcatcggtatcttaaccgaagaatatgcgggctttttcccaacttggttagctccggtacaagtcgtggtgatgaatatcaccgatagccagtctgattatgttcagcaagtaaccaaaaaactgcaagatgcgggtattagagcaaaagcagacttgagaaatgagaagattggctttaaaattcgtgaacatacgttgcgtcgggttccatatatgttggtctgtggcgataaagaagtcgaatcaggcaaaattgccgttcgtactcgccgcggtaaagacttaggaagtttagacgtcaacgtggtcgtagaccagctgctagcagaaattcgcagccgtagtcttcatcaactggaggaataa

SEQ ID NO: 42218 - DNA, 684 bp, Yersinia pestis
atgctaagtattttcgaattatttaaagccgttggcttaggattagtattgctgctgccattggcaaatccactgacgacggtggccttattgctagggttatccggtaatatgacccgcgaggagcgtaataatcagtcgttaatggcggcaatttatgtcttctttatcatgactatcgcgttttatgccggtcagatcgtcatgagtacatttggtatctctattcccggtctgcgtatagctggtggcttaattgtcgcgtttattggttttcgtatgctctttccgcaacaatcggctgaagatactcaactggaggcaaaatcccaggatttaaaaaaacgtaaatccatcaatattgcctttgtaccgctggcaatgccgagtactgcggggccaggtacgattgcaatgatcatcagttccgctgcaacaatgaaagaccagacaatgtttgcaccatgggtattggccatcgcccccgtaatcacattcttatgcgtttcgttgattttgtggggatctttactcagctcaggagcgattatgcgctgggttggtaaaagcggtattgaagcaatttcacgtttgatgggattcttgctggtatgtatgggtgtgcaatttattattaatggcgtcttagagttgatctcaacttatcaacctgtcatggcttaa

SEQ ID NO: 42219 - DNA, 246 bp, Yersinia pestis
atgcgcgttgaagtcagtattgataaaaaaaatcagttgcccgcaggtgctatcgaagcactcacccaggaattgactaaaagactcaatacaaaattcccggacacggcgacggcagtacaggtgcgttatgcgagtgctaataatctctccgtattaggaggtgccaaaacagataaagacgtgatctctgaaatattacaagaaatctgggaaagcgctgacgactggttcgatgcggagtaa

SEQ ID NO: 42220 - DNA, 1047 bp, Yersinia pestis
atgactgcacaaccccaaaccctaaaaattcgccgcccggatgactggcacattcatctacgtgatgatgaaatgctcagtaccgtgttgccctatacctccgaagtattcgcccgcgctattgttatgccaaatctagcccagccaattacaacggttgccagtgctattgcttatcgggagcgtattttagcagcggttcctgcgggccataaattcaccccgttgatgacgtgttacctgactaatagccttgatgctaaagagttgaccacgggttttgagcaaggcgtttttaccgcggccaaactgtatccggccaatgccaccaccaactccactcacggtgtatctgacatcccggcaatttacccgttgtttgaacaaatgcaaaagataggcatgcccctgcttattcacggtgaggtaacagatgcggccgttgacatctttgatcgtgaagcccgttttattgaccaaattttagagcccattcgccaaaagtttcccgaactaaaaattgtctttgagcatatcacgaccaaagatgcggcagattatgtgctggcaggcaatcgtttccttggggcaaccgtcacgccacaacacttgatgtttaaccgcaatcacatgctggtaggcggtattcgcccccacttgttctgcctgccaatattgaagcgcagcacccatcagcaagcattgcgcgcagccgtcgccagtggttctgatcgcttcttccttgggaccgattcagctccccatgccaaacatcgtaaagagtcatcttgcggctgtgcgggtgtattcaacgccccagcggcattgcctgcttatgcttccgtgtttgaggaactgaatgcattgcaacatctggaagcgttttgcgccttaaatggcccacgattttatggcttgcctgttaatgatgacgttgttgaattggttcgcactccattcctgcagccagaagagatcccattaggcaatgaatcggttattcctttccttgcgggtcaaacgcttaattggtcagtgaaacgctaa

SEQ ID NO: 42221 - DNA, 1476 bp, Yersinia pestis
atgcccgtgcctattattcccgtgtcactttctgccgctgcccaaaaaaatgccaaaatcaacactaaaaaactggccgaaatacgcgaaagaatcctctccctcctattaaataatcgagcgctggttgacggtattttgggccgtcaggaggagcgggaaaatctcagtgatgaacaactgcaggatcaaaccgcagaaataaaaaccttgctcgatgacctgcatgcagcagatctcgccgacttactggaagcattacccaacgacgaacgtttggcactctggcggttggttaaaaatgagaagcgcggccaaacactggttgaagtctctgagaccgtgtgggataccctgatcaaagagatgagcgataaagacctgttaaaagccatgcgcaccttgcatgtggatgaacaggcttatctggccgagtatttaccgcgtaacctgatgggccgcttactgacgtcattagatccagatcaacgggcccgagttcgtgaagtgattcagtatggccgcgacagtgtcggccaaatgatggattttgagctggtcaccgtccgcaaagatgtcacgctagcaaccgtacagcgctatttgcgctatcggaaacgtatccctgatgccacagataaactgtttgtcattgatcgcaaaaatacgttactcggcgaattacccctgacatcaatcctgctcaatgcaccgaacaccttggtgtctgaggtaatggatcagaatccgacgacgttccaaccagagcagaaagccgaagatgcggcaggggcctttgaacgttatgacttaatcagcgccgccgttattgatgctaaaggtaaactgatgggccggctgaccatcgaagagattgttgacgtggttaatgaagagagcgataccacgctgaggcgcatgggggggttaagcccggaagaggatgtgttctccccggtaggccgtgcggtgcggacccgttggtcatggctggcgatcaatctttgtactgcatttatcgcctccagagttattggtttatttgaagacacgatttcacagttagtggcgctggcggcgttaatgcccattgtcgcaggtatcggcggtaataccggcaatcagaccattaccatgattgttcgcgcattggctttacaccacattcaacagggcagtgtctccttcctgatgttaagagaattaggggtggcactgattaatggcctggtctggggagggattatgggccttgtcacctacctgctgtatggcgacccggcaatgggtgcggtgatgacgttagccatgatgctcaatctattgatggccgcggtaatgggcgtaaccatccccatgaccatggcccgtttaggccgtgatccggcgattggttccagcgtcatgatcaccgccatcacggataccggtggattcttcatctttttaggcctcgccaccctatttttagtctag

SEQ ID NO: 42222 - DNA, 663 bp, Yersinia pestis
atgctagcgggaatgggtgtgattaaacctgagaccttgcgctatcaggttgaaaatgtactgcggcaagcgatcatgtcagggcgttttacaccaggggagcggctgattgaacgagaactgtgtgaaaccttaggcgtcagccggacatcaattcgtgaagctttacgtaggcttgaagctgaaaaactggtctccattgtgccgcacaaaggcccgatagtggcgattatctccaggcaagaagctgctgagttattcgccctgcgcggtctcttggaggggttcgccgcccgtgaatttgcccaacgggcaacggatgtagcgattgtgcatttcgcacaagctattcaggcgctgcgcatggcaggcatgacaaaggatcgggccaaggtactgaaggcgaaaacagatctttatgacgtgttgctggacaattgtggcaatgggttggtgaaagagaccttaaccagcttacattcgcggattaacttattgcgcgcgacttcgctaatggatccgcagcgtttacctgtcagcattaatgagatcgacgatctgtatcaggcgttaaaagcgcgggatcccgatgcggcagaacggcatgtcgccaatgcaaaagaagttgctctgcggatccttgaggagaccaacgcgacgtag

SEQ ID NO: 42223 - DNA, 1353 bp, Yersinia pestis
atgttcattggatttgactacggcacagcaaactgctcagttgccgtgatgcgggatgatgctcccacgttgttggcgttagaaaataacgacgtctatttaccgtcgatgttgtgtgcacccacacgcgaagccgtgagtgagtgtctgcatcgtcactggcaagtgccaacgggcagcgacgaaaaccaacaactcttgcgtcgggccatcgcgttcaatcgcgaagaagatattccggtaaccgccgatagcctgctattcggcctctccgcccttgctcaatacatcgaagaccccgaagaggtttactttgtaaaatcgccaaaatcctttttaggcgctaatggcctgaaacctcagcaattggctctgtttgaagatttagtctgcgccatgatgtttcacatcaagcgtcaggctgaatccgttttggccgcagaaatccgtcaaacagtcattggccgcccggtaaactttcagggttccggcggcgaagacgctaaccggcaggcggaagggattttattacgtgccgcacaacgtgccggtttccgtgatatcgcctttcaatttgaacccgtggctgcggggctggatttcgaagcgacattaacggaagaaaaaaccgtactggtcgtggatatcggcggggggaccaccgactgttcagtcttattgatggggccgaagtggcaaggtttggctgatcgccaacagagcctgttggggcatagcggctgccgtgttgggggtaacgatctcgacatcatgctggccttcaaacaattgatgccactgtttgggatgggcggtgaaaccgagaaagggattgccatgccgtccctaccatattggaatgcggttgccaccaatgatgtcccggcgcaaagcgacttctacagcacggttaatggccgtttcctgcgtgatctcatccgtgatgccgctaacccacaacacgttgaacggctgctgaaagtgtatcaacagcgcctgagctaccgcttggttcgcgccgcagaagagagcaaaattgccctgtctgaccaagagcaggtcgctacaacattggattttgttgaagccgaattgggccaaatcatcagccagcaacaactggccgaagcgattagtccaccgctacaacgcattcaggagcaagtcagcctggcgctgaccaccagcaatgtcaaaccggatgttatttacctgacgggtgggagcgcccgctctccgttactgcgtgccgcgctacagcaacaattgccggggatcccgttggtgggggggaacgatttcggctcggtgaccgccggactggcccgctgggcccaaaccctgtaccgataa

SEQ ID NO: 42224 - DNA, 597 bp, Yersinia pestis
atgccgcaactggttcttgcttcaacatcttcatatcgccgtgccttgctggaaaagctccagttaccctttattactgatgcccctgaaaccgatgaaaccccacacgcaggggagtcaacagaagcgctggtacaacggttggcatcagcgaaagcacaggcactggccgggcgttatccgcaacatttaatcatcggctcagatcaggtctgtgtgattgacggtaaaataaccggcaagccccttcaatattctactgccgtaaaacaattgcaacaggccagtggccaatgtgtcactttctatactggactcacactgctgaatacggcaaataacagcattaattgcacatgtgaaacctttgatgtttatttccgcacattgagccaagccgaaatagacggttatttgctacgggagcaaccctggaattgtgcgggaagttttaaaagtgaaggtttaggtatcacattgtttgagcgtttagccgggcgtgatccgaatacgctcatcgggttacctttaattgccctcacccaaatgctgattgaacaaggcgtgaaccccctgacggtaaaacccgtcgaatga

SEQ ID NO: 42225 - DNA, 1116 bp, Yersinia pestis
atggattatgatttgattgttattggcagcggttctgttggttcagccgcgggttactatgcttctcaggctggtttaaacgtgctgatgattgatagcgccatgccgccacatcaagcaggtagccaccatggagagacgcggatcatgcgccatgcatatggtgaaggagagaaatacgttcctctcgtgctacgagcacaagccttgtgggaccaactggcagcacagaccggcgaaaaattatttcaggcctgcggagtgattaacttagggcccgataattcaacttttctgcaaaacgtacagcgaagtgcccaacagtatgatttgccagtagaaaccttaaactcaacacaaattcgtgaaaaatggccagtatttactgttccggataactatattgctgtgttcgaaccacaatctggctatttgcgctcagagttagcggtgaaaaccttaatcaaagcagtcactgaagcgggttgcggtattttgtttaattgcccggtaacggctattgagtcacaccaagcaggtgttgatgtcgtgaccattgatggcacgtacagcgccacgaaagtcgtggtgacagcggggacatgggtgaaagaactgctaccgacattaccggtgacgccagtacgcaaagtgttctcctggcatcaggccgatggtcgttacagtgaggccaaccacttcccagcatttacggtagaaatgccagacaatatcctctattacggtttccccgctcagaatgacgcgctaaaactcggaaaacatcatggtgggcagctaattgaatcggcagcacagcgtaaaccttttggccgttatgctgaggatggcaccgaggtctttagcttcttacgccactttctgccaggggtaggcgtttgtctccgtggtgaggcatgcagttacgatatgagtccagacgaagatttcatcatcgataccttgccagaagatgaaagagtcatggtagttagtggtttgagtggacatggttttaaattcgccacagcactgggtgaagtggccgctctatttgcacaagacaagccatcacctattgatatctcagctttttctttagctcgcttccgataa

SEQ ID NO: 42226 - DNA, 615 bp, Yersinia pestis
atgaaaatattaatcatcgacgaatgcttttatactcgttctggagtcaatacctatttgaatagtgtctcatctataaaattaatggatgtccctaccgttgaagaggcaactttagctattcaagaatttcagccggatataattattgttaatttaactcaatattgtcgctatggtggtcattgtccattgttagcgcaatttattcattactgtacccgagctaaagtttatatctatttagatgcttcttacccttttagtgaaacgcctattcctctgacagaatccgtatcaatgcctattcctctgacagaatccgtatcaatactggctaagaaacatctacccaatttactccgcaggttacctggtttctctcttgagaggctaggcattcagccaaaccaacaggcttccctgttcagtccacaagagcacaaagtgatgtgttactggatgacagagatgcctaactatcgcattgccagaaagctaaatatcagcggcagtacggtttactcacataaacgtcatatcaccgagaaaataaaagtcaggaatagattggaattgtgtttcatttataatgtgtttaagtatttgtactag

SEQ ID NO: 42227 - DNA, 1029 bp, Yersinia pestis
atgtttaaaataatgacactgactacgctgctcgccggatgggtatttcaaacgcacgctgaaaccctgacggtggtgtcattcggtggtttaaacaaagacgcacaggttaaggcgttctataaacctttcatggccgccgggaaaggaacaattgaagccggggagtataacggtgaaatggcccgtatccgtgcgatggtggaaacgggtcaaatagggtgggatatcgtcgaagttgaaggcccagaactgctacggggatgcaatgaagggctatttgaaaccctggattggagcaagttaggcgatgaacgtcagttcattaaaggcacggttagccaatgtggttcgggtctttttttgtggtcaatgctattaatctacgacgccagtaaatttaaaaccccggtgaccagttgggctgacttctggaatgtcaccacttttcccggcaaacgttccctgcgcaaaactgccaaatttaccatggaaattgcgttgctggcggatggcgtgaaacgtgaggatgtgtatcgtgtgctggcgacgccggaaggtgttgaacgtgttttcaacaaactggatcaacttaaaccgaatatccagtggtgggaatctggggcgcaaccgctgcaatggctggtgtccggtgatgttgtgatggggtcagtctataatggccgtgtggggtccgcgctaaaagaaggccatgattttagaatggtttggactgacagtatctacgatatggacagttggactatcgtcaaaggctccaaaaaaaaagtattggcagaacaatttatcgcctttgccaacttagcggaaaatcagaaagtctttgcagaaaatatcgcttatggcccgaccaatatcaacgccaccttgatgattgatcccgaaatcgccgctaatttacccactgcgccagccaacctggctgaggcttttcccatgaacaatcaattctgggtcgagcatagcgaagatcttgagcaacgcttcaactcttgggcagctaaataa

SEQ ID NO: 42228 - DNA, 1455 bp, Yersinia pestis
atgcaaactgatgtcgttctgccgttagtcggctatctggtgttggtctttggcttatctatttatgcttatacgcgccgccaaaccgggaattttctcaacgaatattttatcggcaaccgttcgatgggcggttttgtattggcgatgaccctgaccgccacctatatcagcgccagctcgtttattggtggaccaggtgccgcttataaatacggccttggctgggtcttactggcgatgatccaattgcctgcggtctggctttccctcggtgtcttaggcaaaaagtttgccattctggcgcgtcgctataatgccgtgaccctcaacgatatgttgtatgcccgttatcagagccgtttactggtttggctggccagtatcagcctgctggtggcttttgtcggtgccatgaccgtgcaatttattggtggcgcacggttgttagaaacggcggcggggatcccttacgacactggcttattgatttttggtatcagtatcgccctgtacacctcgtttggtggcttccgggccagtgtcttgaatgatgccctgcaagggttagtgatgctgatcggcaccattttactgttagttgcggtgatccacgcggcaggtggcctacacaaagccgtcgaaacgctgcaacatatcgatccggcgctggtttccccccaaggcggcgatcagatcctcgacgtgccatttatggcttcgttctggatcctggtctgttttggggtgattggtctgccacacaccgccgtacgttgtatttcgtatcgtgacagtaaagcggttcatcgcggtattatcctcggcaccatcgtggtggcgatcctaatgttcggtatgcacctggctggcgcactggggcgggcggtgttaccagatctgaaaattccagatcaagtaatcccgacactgatgatcaccgtactgccgccatttgctgcggggatattcctggcagcaccgatggcggcgatcatgtcgaccatcaatgcccagttactgcaatcttctgctaccatcgtgaaggatttgtatctcaatctgtggccagcagagttaaagaatgagcgcaagctggcacgtatctccagcttatccacactcattcttgggctattattgctcttggccgcctggcgaccacctgaaatgattatctggttgaacctactggcctttggcggactggaagcggtattcctctggccattggtattgggattatactgggagcgagccaatgcccacggcgctcttagcgccatgatcgtcggtgcggtatgctatacggtattagccagcttcgacatcaagatagccggcctgcaccccattgtgccgtcacttacacttaatctgttggcgttttatatcggtaatctgtttggcgacagagcgcgggcgcgacaccccgccatcgtcagtgccgattaa

SEQ ID NO: 42229 - DNA, 951 bp, Yersinia pestis
atgtatactaagattctcggtacggggagttatctgcccgtacaagtgcgcagcaatgctgatttagaaaaaatggtggatacgtcagatgagtggattgtcactcgtactggtatccgtgagcggcgtattgcaggccttgacgaaacagtcgcgactatgggcttccaggcggcagaaaaagcgctggaaatggccggtattgataaggacgatatcgggttgattatcgttgcgaccacctcttcaagccatgctttcccaagttcggcttgccaggtgcagcgaatgctcggtatcaaagatgcagcttcttttgatttggctgcggcttgcgcgggttttacctatgcgctgagtgttgctgaccagtatgttaagagtggtgcggtcaagcatgccattgttattgggtcagatgtattgtcccgtgcattggatccagaagatcgtggtacgatcattctgtttggcgatggcgctggcgcggtggtacttggtgcatctgagcaaccaggtattatgtctacgcatttacatgctgatggtcgttatggcgagttgctcgctttaccgtatccagaccgtcagcaggaccaacctgcctacgtcacgatggcaggcaatgaagtttttaaagttgcggtaacggaactggcccacattgtggatgaaacattgcaggctaataatctggatcgcactgcgctcgattggttggtgccacatcaggctaacctgcgtattattagcgctacggctaaaaagttaggcatggggatggataaagtggtgatcacgcttgatcgccatgggaacacctccgcggcatcagtgccttcggcattcgatgaagcagtgcgagatgggcgaattcaacgtgggcagttggtattgcttgaggcgtttggcggtggatttacctggggttctgcactggttcgtttttga

SEQ ID NO: 42230 - DNA, 930 bp, Yersinia pestis
atgtcgaaatttgcaatggtatttccaggtcagggttctcagtccctcggcatgctggccgatttggccgcacaatttccgatagttgaagcgaccttcagtgaagcgtcgtctgtcctgggctatgatctctggcaattagtacaacaaggccctgcagaagagctgaataaaacgtggcaaacacagcccgcattgctgaccgcatctgtggcaatttggcgtatctggcagcatcaggggggcaaattgccatcactgatggcgggtcatagtttgggtgaatattcagcgttggtttgtgctggtgttctggattttaaacaggccgttagcttggttgaactgcgtgggaaactcatgcaggaggcggtacctgaaggtaccggtgccatgtatgccattattggtttggataatgaatccattgccaaagcgtgtgaagaatcagcccagggccaggtcgtgtcaccggtaaactttaattcacccggtcaggtggttattgctggcaacaaagacgctgtcgaacgtgctggcgcagcatgtaaagccgctggcgcaaagcgggctttgccattgcctgtcagtgtgccttcccattgtgcgctaatgaaacctgcggccgacaagctggcagtcgcacttgagaagattgattttcaggagccgctcttcccagtggtgaacaacgtcgatgtgaaagctgaggtgtccccagtcgctatccgtagcgcattggtccgtcagctgtataatccggtacgttggactgaaagtgttgaatttattgcagctgaaggtgttgaactgctgttagagattgggccaggtaaagtattgaccggcctgaccaagcgtatcgttgattcattggctgccgcggcagtcaacgatgttgtcacgctgaacagtgcgcttgaacactaa

SEQ ID NO: 42231 - DNA, 1068 bp, Yersinia pestis
atgccagtgttacataaccgaatttctaatgaggaactcaaagcgcgtatgttggctgaaaccgagccgcgcaccacagtttctttttataaatacttcactctggaagatgctaaaaccttccgtgataacctctatagccaatttgttaagctcggtgtttttggccgcgtctatgtggcaaaagagggtatcaatgcacagatcagcgtccccgcgaatcgatatgatgaatttaaaatcgcgctgtttgcctcacaccctgcgctggatcaagtacggttgaatgttgcgcacgaagatgacggtaaatcattttgggttttgcgcctgaaagttcgtgagcgcattgtggctgatggcattgatgatgacagctttgatcctgccaatatcgggcactatctgaaagccgatcaggtcaatcagatgattgatgatccagatacgttgtttgttgatatgcgtaaccactatgaatacgaagtgggccattttgaaaacgcaatagaagtcccttcggatacattccgtgaacaactgccgatggcggttgatatgctgcaacatgataaagagaagaatattgtcatgtattgcaccggggggatccgttgcgagaaagccagtgcttatatgctgcacaatggcttcaaaaatgtttatcacgttgaaggcggcattattgaatatgcacgtaaagcaaaagagcaggggctaccactgaaattcatcggcaaaaattttgtgttcgatgaacggatgggggaacggatttctgatgatgtcatagcgcactgccatcaatgtggaacgccttgtgacgcgcataccaactgtaaaaacgatgggtgccacttactgtttatccagtgtccagtgtgcgcggcgaagtttgaagggtgttgtagccagatttgccaggaagagctgaaactgccacaggaagagcaacgctcccggcgggcagggcgtgaaaatggcattaagatttttaataagtctaaagggttgttgcaagccaccatgcacattccctcgccagaaaagagtgcggatgaaaagtag

SEQ ID NO: 42232 - DNA, 1350 bp, Yersinia pestis
atgcttgataaaatcgtaatcgctaaccgcggtgagattgcgctgcggatcctacgggcttgtaaggagctggggatcaagactgtcgccgttcactctgttgcggatcgtgacctgaaacacgtattactggctgacgagactgtttgtatcggtcctgcgccttcagttaaaagctatctgaacatcccggcaatcatttcggctgctgagatcaccggcgcagtggctgttcaccccggctatggtttcctgtctgaaaatgctgattttgccgaacaggtagagcgttccggtttcattttcattggcccacgagccgaaaccattcgcctgatgggcgataaagtttccgctattagcgcaatgaaaaaagccggtgtgccatgcgtacccggttctgatggcccattaagcgacgataccaccaagaacaaagcctttgccaaacgtatcggttatccggtcattatcaaggcatctggcggcggcggtggccgtggtatgcgtgtggttcgtcacgacaaagatctggaagaatccattaacatgacccgtgcggaagcgaaagctgctttcaataacgacatggtttatatggagaaataccttgagaacccgcgccatatcgaggttcagattttggctgatggtcagggtaatgctatctatctggccgaacgcgattgctctatgcagcgccgccaccagaaagtggttgaagaagcacctgcaccaggtatcaccagcgaaatgcgccgttatatcggtgagcgctgcgcgaaagcctgtatggaaatcggttatcgcggtgcaggtacctttgagttcttgtatgaaaacggtgagttctatttcattgaaatgaacacccgtattcaagttgaacacacggttaccgaaatgatcaccggtattgatttgatcaaagagcagctccgtatcgcggctggccaacctctctccatcaaacaagatgaagtgaaagtgcatggccacgctgttgaatgccgtattaacgccgaagatccaaataccttcctgccaagtccgggtaaaattacccgcttccatgcaccgggcggtttcggtgttcgttgggaatctcatatttacgcaggctatactgtgcctccgtattatgattccatgattggtaagctgatcacttacggtgaaaaccgtgacgtggcgattgctcgtatgaaaaatgccttggcagagctcattatcgatggcatcaaaaccaacgttgagttacagcaacgcattatgaatgacgaaaacttccagcacggtgggactaatatccactatctggagaaaaaactcgggttgcaagaaacctga

SEQ ID NO: 42233 - DNA, 735 bp, Yersinia pestis
atgagcttcgaaggaaaaattgcactggtcactggcgcgagccgtggtattggtcgcgctattgcagaattattggttgaacgcggtgcttgtgttattggtaccgcgaccagtgagaagggcgctgaagctattagcgcctacttgggtgagaacggaaaaggtttaatgttgaacgttgtggatcccacttcgatcgacacagtactggcaacgattcgtgcggaatttggcgaagtcgatattttagttaataatgctggtattacgcgtgataacctgctgatgcgtatgaaggatgatgagtggcaggatattattgacacgaatctgacttccgtattccgtctgtcaaaagcggtaatgcgcgctatgatgaaaaagcgatttggccgtatcatcaccatagggtctgttgttgggacaatgggcaatgcggggcaggttaactacgcggcagctaaagctggagttattggttttagcaagtctttggcgcgtgaggtggcttcacgtggcattactgtcaacgttgtggcacctggctttattgagacggacatgactaggacgttgacggatgatcaacgcgcaggcattttagcccaagtaccagctaaccggcttggggatgctaaagaaatcgccagcgctgttgcatttttagcctctgacgaggccagctacatttctggtgaaacgttacatgtcaatggcggcatgtatatgatttaa

SEQ ID NO: 42234 - DNA, 465 bp, Yersinia pestis
atggatattcgtaagattaagaaactgatcgaactggttgaagagtctggtatttcagagctggaaatctcagaaggcgaagagtcagtacgtatcagtcgtgctcctgccgcaccgaattacccaatgatgcaacagccttatgcttttgctgcaccacaacagcagccagcgctggctgccgccgtcgccccagcacccgttgctgaagccgcaccggcagcgataagtggccatatcgtatgttccccaatggtcggtacgttctaccacacccctagcccagatgccaaagccttcgttgaagtcggtcagaaagtttctgttggtgatactctttgcatcgttgaagcgatgaaaatgatgaaccaaatcgaagcagacaaatccggtactgtaaaagccattctggttgaaaacggccaaccggttgaattcgacgagcctcttgtcgtcatcgaataa

SEQ ID NO: 42235 - DNA, 1335 bp, Yersinia pestis
atgaaatctcaatccaaacgcacttcccgattattcgtattcgtgggggtagtggtggcgatcattattgcggtgcttagttggcgctactttggtaccggctccgataacaatacgtcaggtgctcagcagagtgcccgtggtcaggacactagccatggtggccgccgtaatacaccgctggcaccggtgcaagccgcaaccgcaaccgagcaggaagtgccacgttatctcactggcttagggacggtcattgccgccaatactgtcacggtaaccagccgagttgatggtgaattgatggcccttcatttcactgaagggcagcaggttaaggctggcgacttactggcagagatcgacccccgcccttacgaagtccaactgacgcaggctcaggggcagttggccaaagatcaggccacgctggataacgcccgtcgtgatctggcccgttatcagaaattgtccaaaactggcctgatttcgcaacaggaactggatacgcaatcttcgctggtacgccagagcgagggcagtgtgaaagccgatcagggcgctatcgacagcgccaaattgcaactgacgtatagccgtattaccgcgcctatctccggtagagtgggcctgaaacaagtggatgtcggcaattacattaccagcggcacggccacaccgattgtggtgatcacccagacacatcccgttgatgtggtctttaccctgccagaaagcgatattcccgccattatacaagcacagaaaaatgcggagaagactcacgccatcgtgcccgtggaagcgtgggatcggacgaataaacagatgctggcacagggctacctgctcagtattgataaccagattgatactacgacgggcaccattaaactgaaggcccgctttaataatgaagatgatgtgctgttccctaatcagtttgttaacgcccgtatcaaggtcgatttgctgcaaaatgctgtcgtggtgcccaccgcagcggtacaaatgggcagcgaaggtaactttgtctggacgttagatgatgcaaataaagtcagcaaacatctggtcaccaccgggattcagaatagccaacaagtggttatcgacgcaggcctgaacgctgggcaacgcgtggtcacggatggtattgatcgcctgaccgagggggtacaggttgaagtggtgacaccacgcagcgccaatactgatgctaatccagccagtgcagagaaagcggctgcagaagcagaaggcagcaccccgcatcaaggccgagggcgtccggccaatgcgcctgcacgtagcaccacggctgcggagaaatcctga

SEQ ID NO: 42236 - DNA, 1242 bp, Yersinia pestis
gtgtctaagcgtcgagttgttgtgactggactgggcatgttgtctcctgtcggtaatacagtcgaatccacatggaaagctgttcttgccgggcagagtggcatcagcctgatcgaccatttcgatactagtgcctacgcaacgcgatttgctggcttagtaaaagattttaattgtgaagattacatttcgcgtaaagatgcacgcaaaatggatgctttcattcagtacggtgttgctgctggcatgcaagccatgcaagacgccgggcttgacattacagaagccaacgcttcccgtattggtgccgctatcggttctggtattggcgggctgggtctgattgaagaaaaccacaccgcattggtgaacggtgggccacgtaaaattagcccattctttgtgccttcaaccattgtgaacatgattgctggtcatctgactatcatgtatggcctgcgtggaccaagcatatctattgctaccgcttgtacttctggcgtacataatatcggtcacgcggcacgtatcattgcttataatgatgctgatgtcatggtggctgggggtgctgaaaaagccagtacaccactaggtgtcggcggttttggtgcagcccgcgcattgtctacccgtaacgataacccacaagcagcaagtcgcccgtgggataaagaccgtgatggtttcgttctgggtgatggtgccggcatgatggtgttggaagagtacgaacacgcgaagaagcgtggtgcaaaaatctatgctgaagttgttggttttggtatgagcagcgatgcctaccatatgacctctccgccggaagacggttcaggagccgctttggccatggtgaatgcattacgtgatgctggcatcacaacctcgcaaattggttatattaatgcccacggcacatcaactcctgctggcgataaagccgaaacgcaggccgttaagtctgtatttggtgaagatgcctataaagttatggtcagttccaccaaatccatgactgggcacttattgggtgcagctggtgccgtagagtctatctttaccgtgttggcgctgcgtgatcaggctattcctgcaacgatcaacttggataacccagatgaaggttgcgatttggattatgttccgcatgatgcgcgtcaagtaaaagatatggaatacaccctgtgtaattcctttggtttcggcggcactaacggctctttggtattccgtaaggtataa

SEQ ID NO: 42237 - DNA, 3159 bp, Yersinia pestis
atgcaagtgatgcctccaacacccggtggcgggccgtcacggctgtttattctgcgcccggtcgccaccacattatttatgatcgcgattttactggccgggattatcggttaccgcgccttgccggtctcggccctgccagaggtcgattacccaaccattcaggtggtgacgctctaccctggggcgagcccggatgtcgtgacatcgtcgattaccgcgccgctggaacgccagttcggccagatgtccggcctgaaacagatggcctcccaaagctcggggggcgcatcggtcattaccttgcaattccagctcaccttgccgctggatgtagcagaacaagaagtgcaggccgccattaacgcagcgaccaacctactgccttccgacctgccttatccaccaatttacaataaagtgaatcctgcggatccccccattctaacgctggctgtaaccgcgaccgccatccccatgacacaagtagaagacatggtggaaacccgcattgcgcagaaaatttcacaagtcacgggtgtcggtttagttaccctctccggtggtcagcgcccggcggtacgggtgaaattaaatgcgcctgccgtggcggcactggggctggacagcgagaccattcgcaccgccatcagtaatgccaacgtcaattccgccaaaggcagtttggatgggccaacccgttcggtgacgctatcagccaatgatcagatgaagtccgccgaagagtaccgtgacctgatcatcgcctaccaaaatggtgcgcccatccgcttacaagatgtcgccaccattgaacaaggggcggaaaataacaaactggccgcctgggccaatactcaatcagcaattgtgttgaatatccaacgtcaacctggggtcaatgtgatcgccaccgctgacagtattcgcgaaatgctgcctgagctgatcaaaagcctgcccaaatcggttgatgtcaaggtgctgaccgaccgcaccagcaccatccgcgcctcggtcaatgatgtgcaattcgagttactgctggccattgcactggtcgtgatggtgatttatctgtttctgcgtaatgccgccgcaaccattattcccagtatcgcggtgccgttatcgctggtcggtaccttcgccgccatgtattttctgggcttttcgatcaataacctgacattgatggccctcaccatcgccaccggttttgtggtggatgacgctatcgtggtgattgaaaatatctcccgttatatcgaaaagggagagaagccgctcgatgccgcgttgaagggggccggtgagatcggttttaccattatttcactgaccttctcattgattgccgtgttaattccgctgctgtttatggaggatatcgttggccggttgttccgcgaatttgccgtgacgctggcggtcgctatcctgatctcggcggtggtttccctgaccctaacaccgatgatgtgcgcgcggatgctcagttatgagtcactgcgtaaacaaaaccgcctgtctcgcgccagtgagaaattctttgactgggtgatcgcccattatgctgtcgccctgaaaaaagtcctgaatcatccgtggctgaccctaagtgtcgcgttcagcacactggtgctgacggtgatactttacttgctgatcccaaaaggctttttcccattacaagacaacgggctgattcaagggacactggaagcgccgcaatccgtttcgttcagtaatatggccgaacggcagcagcaggtggccgccattatcctcaaagatccggcagtagaaagcctgacctcgtttgtcggcgttgatggcaccaatgccaccctcaataatggccgtttgcagatcaaccttaaaccgttaagtgaacgggatgatcgcattccacagattattacccgtttacaggagagtgtcagtggggtgcccggtatcaaactgtatttgcagccggtacaagatttgaccattgatacccagctcagccggacacaatatcagttcacgctgcaagccacttcgctggaagaactcagtacctgggtgcccaaactggtcaatgaattgcagcaaaaagcgccgtttcaggatgtgaccagtgactggcaagatcaggggctggtggcgtttgttaatgtggatcgcgacagtgccagccgtttgggcattaccatggcagccatcgacaacgccttgtataacgcctttggtcaacggctgatttccaccatttatacgcagtccaaccaataccgggtggtgttagagcatgatgtgcaagccacgccaggactggcggcattcaatgatattcgcctgaccggtatcgatggcaaaggggtcccactgagcagcattgccaccattgaagagcgctttgggccactgtctatcaaccatttgaatcaattcccgtcagcaacggtatcgttcaatctggcgcagggttactccctcggagaggcggtagccgccgtgaccttggccgaaaaagagatccaactgcctgcggatatcaccacgcgtttccaaggctcgacgctggccttccaggccgcattgggcagtacgctttggctgattatcgccgccattgtggcgatgtatattgtgctcggcgtgttgtatgaaagttttattcatccaataactattttgtccaccttgccgaccgcgggtgtcggggccttgttagcgttgatgctaaccggcaatgaactggatgtgattgccatcatcgggattattttgttgataggcatcgtgaaaaagaacgccatcatgatgatcgactttgccctggctgccgagcgcgatcaggggatgacgccgtatgacgctatctatcaagcctgtctactgcgttttcgcccgatcctgatgaccacgctggccgcgctgttcggtgccttgccattgatgttgagtaccggtgtcggtgccgaactccgtcaaccgctgggggtgtgtatggtcggtgggctgattgtcagtcaggtgctgacgctgtttaccacgcccgttatttacctgctatttgataaattggcgcggaatactcgggggaaaaatcgccatcgtgatgaggatattgactcgtctgagttgctgaacggacaggagccacagtga

SEQ ID NO: 42238 - DNA, 807 bp, Yersinia pestis
atgttttggattaacggtgtagagcaaaatttgatttcagcttcggatcgttcggtacaatttggtgatggctgttttaccactgctcgtgtatccgatgggcgggttgtttggcttgaccagcatgtgctgcgtttgcaacgggcgactgaacgtctattactgcccacggtcaactggaaaatattgaccaaagaaatggtagaggcagcaagtcatacggagagtggcgtactgaaagttattatcagtcgtggaagtggtggccgaggctatagcggaacggcatgtcagcatcctacccgaatcatttcgctcagtgactatcctgcccattattccacctggcgggatcgcggtatttcgttggctcttagcccagtgcctctggcgcgcaacccattattggccggtatcaaacatctaaatcggttggaacaagtattgatccgcgcacatcttgaacagacagaggccgacgaggcggtggtacttgacactgcgggtcagctggtggaatgctgtgcggctaatttattctggcgcaaaggcaaccaggtatgtactccagatctcagtcattcgggggttgatggcattatgcgccagcggattattgcctgtttagcggctcataatatgccagttgaaattgtggtgcagccgctgaatgtactggccgatgccgatgaagttattgtttgtaacgcattgatgccagtactgccggtcaataaagtgggtaaatgggtatacaaatcgagagtgttatttgacctattaaacctgcattgctgcgatatatga

SEQ ID NO: 42239 - DNA, 621 bp, Yersinia pestis
atgcggctcagtttacgacacatcacatggctaaaaatcgccatttggctggcggcaacattaccgcttctgtggctcgtattatcgatcaatctgggggggctcagtgccgatcccgccaaagatattcaacattttaccgggcggatggcccttaaattacttttggcaaccttattggtctcgccattggctcgctacagtaaacaaccgttgttactgcgctgccgccgcttattaggcctatggtgttttgcctggggaacactgcatttactcagctactcgatattggaactggggctgagtaatattggcctgttggggcatgagttgattaaccgcccttatctgacattgggcattatcagttggctggtgttactggcgctggcgctcacctccacccggtgggcgcaacgaaaaatgggcgctcgctggcaaaaactacataattgggtgtatgtggtcgccattttagcccctattcattatctttggtcagtgaaaacactctcaccttggcccattatctatgcggtgatggcagcactattactgttactacgttataaattactgctaccgcgttataaaaaatttcgtcaatggttccgctaa

SEQ ID NO: 42240 - DNA, 3075 bp, Yersinia pestis
gtgaaattcttcgctctgtttatccagcgcccggtcgccaccacactgttgacgctggcgatcaccctcagtggcataattggctttagcctactgccggtatcgccactgccgcaggttgactacccggtcattatggtcagcgcctcaatgcccggtgccgatccagaaaccatggcctcgtcggttgcgacaccgttggagcgcgccttgggaagaattgccggggtgaatgaaatgacctcgaccagttcgctgggtagcacgcggattattctgcaattcgatcttaaccgcgatatcaacggcgcggcccgtgatgtgcaggcggcgctcaatgccgcccagagcttgctgccgtcagggatgcccagccgcccaacctatcgtaaaatgaacccgtctgatgcgccgattatgatcatgacgctgacgtcagataccttctcacaggggcaactctatgattatgcctcgaccaaactggcgcaaaaaatcgcccagaccgagggggtcagtgatgtcacggtgggcggcagttctttacctgcggtgcgggtcgagctaaatcccagcgccttatttaatcagggcgtatcactggatgcggtgcgtcaagccatcagtgccgccaacgtgcgccgtccacaaggttcagtggatgccgcagagacacattggcaggtccaagccaacgatgaaatcaaaaccgccgagggctaccgcccgctgatcgtccactacaataatggctcgccggtacggctacaggatgtcgccaatgttatcgactcggtgcaggatgttcgcaatgcggggatgtccgcaggccaaccggccgtcctgttagtgatcagccgtgaaccgggggccaatattattgccaccgtagaccggatccgcgcggagttacccgccttacgcgcctcaatcccggcctcaattcagttaaatattgctcaagatcgctcacccaccattcgcgcttcactggatgaggtcgagcgttcattggtcattgcggtagccctggtcattctggtggtctttatcttcctgcgttcgggtcgagccacgttgatccccgccgttgcggtacccgtctcgttgatcggtacgtttgccgcgatgtacctgtgcggttttagtttgaataacctgtccctaatggcattgaccattgccaccggttttgtggtcgatgatgccatcgtggtgctggaaaatatttcccgccatttggaagcaggtgtgaaaccgaaggtggccgccctacgtggggtccgtgaagtgggttttaccgtgctatcaatgagtatttctctggtggcggtatttattcctctgctattgatggcggggctaccggggcgtttattccgtgaatttgctgtcacactgtcggtggcaataggcatttcactggtgatatccctgaccctaacgccaatgatgtgcgcctggttgctacgttcacacccaaaaggtcagcaacaacgtattcgcggttttggtaaagtgctattagctattcagcaaggctatggtcgttcactaaattgggccttaagccatacccgttgggtgatggttgtgctgctttccacaattgccctgaatgtctggctgtatatcagtatccccaaaacctttttccccgagcaggacaccggccggatgatgggctttattcaggccgatcagagtatttcgttccaatcgatgcagcaaaagctgaaagattttatgcagatcgtcggggcggatccggcagtggacagcgtcaccggctttacgggtggctcgcgcactaacagtggatcgatgtttatttcactgaagccgctcagcgaacgccaggaaaccgctcagcaggtgattactcgcttacgcggtaaactggcaaaagagccgggggccaacctgttcttgtcttccgtgcaagatatccgagttggtggccgtcattccaacgccgcctaccaatttaccctgttggcggatgatctggcagcactgcgcgagtgggaacccaaagtccgggcggcgctagccaaattgccacaattggcggatgtaaactcagatcagcaagataagggcgcggagatggcactgacttatgatcgcgaaaccatggcgcggctgggtattgatgtctctgaagcgaatgctctgctgaataatgctttcggccaacggcaaatatccaccatttatcagccgctgaaccaatacaaagtggtgatggaagtggctcctgaatatacgcaggatgtgagttcgctggataaaatgtttgtgattaacagcaatggtcaatccattccgctgtcctatttcgctaaatggcaacccgccaacgccccgctggcggtcaatcaccaaggcttatccgccgcgtcaaccatctcatttaacctgccagatggcggcagcttgtctgaggccacggcggctgtcgaacgagcgatgacagaactgggtgtcccctccaccgtgcgtggggcgtttgccggtaccgctcaggtattccaggaaacgctgaaatcgcagctctggctgattatggcggccatcgccacggtgtatatcgtgctggggattttatacgaaagttatgttcacccgctgaccatcctctccactttaccgtcggcaggggtcggggcgttgctggcgctggagttattcgatgcaccgttcagcctgatcgccttaatcggtattatgttgttgattggtattgtgaaaaagaacgccatcatgatggttgacttcgccctggatgcgcagcgtaatggcaatatcagcgcccgcgaggctatttttcaggccagtttactgcgtttccggccaatcatcatgaccaccttagccgcactgtttggggcgctccccttggtgcttagcagtggtgatggtgcagagttacgccagccgctggggattaccatcgtcggtgggctggtcgtgagccaattactgacgttgtacaccacaccggtgatttatctctattttgaccggttgcgtaaccgttttagcaagcaaccgctgatgaaattggaatag

SEQ ID NO: 42241 - DNA, 639 bp, Yersinia pestis
atgaacagtaaatttatcgttattgaagggcttgaaggggcagggaaaaccaccacccgcgacaccgtggtcgcggtgctgcgggcccaagggattaacgatatcgtttttacccgtgagccggggggaacccctttagcggaaaaactgcgtgatttgattaagcaaggtattgacggtgaggtcctgacggataaagccgaggtattaatgctgtatgccgccagggtgcaattagtagaaaatgtcatcaagccagcactggcgcgtggcagttgggttgtgggtgaccgccatgatttgtcatcacaggcatatcagggcggggggcgagggattgacagccaactgatggcctcgttacgtgacacggtgttaggcgaattccggccagacctgaccttatatttggatctgccaccggctgtgggtttggcgcgagcccgtgcgcgcggtgaattggatcgtatcgaacaagagtcactggcgttttttgagcgaacccgcgcacgttaccttgaattggccgccagtgatgccagtattaaaacgattgatgcctcccaacccattgaacaagttagtgcgtcgataagccaggcgctcgctcagtggctgaccaatcaggaacccgtgtaa

SEQ ID NO: 42242 - DNA, 1917 bp, Yersinia pestis
atgcgatttaccaccaaactttctgcgtttatgacgctgctggtcgtattggctatgtgtttagtcttattgggcagcacgatcagcttcttctatttgtgccagaagaaaatggaacaacggctccaaagtattgtgaccgcttacgatcagtcactgctgctgcaacccatcaataaaaaacgtgaatggctgccactgatgatgcagacccttggtgtggtcgatgtcagtgtcaaaaatagcaccagtaccctctatcaactccacattcctgcagtttatacgccttggaacagccacagtcgctaccgtcagatggtattgcctctgttgcatcagccagggacggagatgcatttcaactatattgacccgttgggtagctatgcccgttctatttatgccgcggccattttatcactggtggtggtggtcattgcgttaacgttgttgttgagtttccgctggctacgtgaccagaccgtggggcaggaaaaacttgaacggcgagcaaggcgcattctcaatggtgaacgtgaacatgcggtgcgcagcgaggattacgaatggccaccttgtgccagcagggctattgaccatttattatctgagttgatggaggtgcgggcagaacgcaatcgggtagatacgttaatccgcacgtttgcggctcaagatgctcagactggcctcagtaaccgtcagttttttgataaccaactgaccacacaacttgaagagaccggtgcgcacggtgtggtcatgatggtgcaactgcccgattttgaagccttaaatgaaacgcatgatcagcagcaagtacaggaattgatgagttcactggttaacctgctgtcaacttttgtggcacgctacccctcagcactcttggcccgctaccttaatagtgacatcgcgatattactgccccacaaaaccctgaaagatgccgatgtgatggccgcacagttggtgaatgcggtgagaaccttaccggagcctcatattattgatcgcgaatcactgttgcatattggcatcgtggcttaccggagtggtgagtcagtcgaacaaattatggacaatgccgggcaggcgaccaaaagtgcggcgctgtatggtggcaacggttggtatgtgttcgacactcaggtaccggagcgcggacgtggcagtgttaaatggcgtacattactggaacagactctggcgagcggaggcccaaggctttatcaaaaacccgttattactgttgatggcaaaataagccatcgtgaaataattagccgcatatatgatggtgagcaggagctactggcggccgagtttatgcccttggtacaattgctcggattgggtgaacgttatgatcggcaaaagattgataagataattcctttattatctttatggccggatgaaacgctggcattttctatcagcgttgattcattattacatcgtcctttccagcgctggttgcgtgacacgctattacagtgcaaaaaatctgaccgaatgcgaattatctttgaacttgcagaggcagatgtgtgtcaacatatcgaagaaatccgccaaatggtccgtttattgcgtggcgtaggctgcaaagtgatggcatcacaggctggattgacggttgtcagcacctcatatattaagtctttgcaggttgaaatgataaagcttcatcccggtgtggtaagaagcattaattttcgctatgaaaaccagttatttgtagaaagtctgaccggtgcctgtgcagggacgcagacgaaagtttttgcggcagaagtgcgtacccgtgaagaatggcaaacgctgcaagagaaaggcgtttacggcggacagggcaatttctttgctccaccgaccccattaaactccggaaagaaaaaatattcgtaa

SEQ ID NO: 42243 - DNA, 1044 bp, Yersinia pestis
atgtttaagaaatttcgtggcatgttttccaacgacttgtccatcgacttgggtaccgccaatacccttatatatgttaaaggacaaggcattgtactgaatgagccttcagtggtggctattcgtcaggatcgtgccggttcaccaaagagcgttgcagcggttggccatgatgccaaacagatgctggggcgtactcctggtaatatcgcggctattcgtccaatgaaagacggcgttatcgccgatttctttgtcacggaaaaaatgctgcagcactttatcaagcaagttcacagcaacagcttcatgcgcccgagtccgcgcgtgttggtgtgcgtgccggtcggggctactcaggttgagcgccgtgcgatccgtgaatctgcccagggcgcaggtgcccgtgaggtgttcctaattgaagagccgatggctgcggccattggcgcgggcttgcctgtttctgaagccaccggttcaatggttgtggatattggtggcggtaccacagaagtggccgtcatctctctgaacggggtggtttactcttcttctgtgcgtatcggtggtgaccgctttgatgaagctatcattaattatgtccgtcgtaattacggttcattaattggtgaagcaaccgccgaacgtatcaaacacagcattggttctgcttacccgggcgacgaagtgctggaaatcgaagtgcgtggtcgtaaccttgctgaaggggtaccacgtggctttacgctgaattccaacgagatccttgaagcgttgcaagaaccgctgacaggtattgtgagcgcagttatggtggcgctggaacagtgcccaccagaattggcttctgacatctctgagcgcggtatggtattgaccggtggcggcgcattgctgcgtaacctggaccgcctgctgatggaagagaccggtattcccgtcgtggtcgcagaagatccattgacctgcgttgcacgtggtggcggtaaagcgttggaaatgatcgacatgcatggcggcgatttgttcagcgaagaatag

SEQ ID NO: 42244 - DNA, 810 bp, Yersinia pestis
atgttgttagttgattctcattgccatcttgatagccttgattaccagacattgcacagcagtgtcgatgacgtattagccaaagctaatgcgcgtgatgtgggctttattttggctgttgccaccaccttgccgggtttcaccgccatgacggcattgattggtgagcgtaagaatgtggcgttctcatgtggtgttcatccgctcaacttggacggtggctatgattttcagcagttgagagagttagctgctggcactcatgttgtcgcgatgggggaaactgggctggattacttttatcagcaagataacatcccgttacagcaagcttccttccgtgagcatattcgtattggccgcgaattaaataagccggttatcgtgcatacccgcgatgcgcgggaagataccctgtcgattttacgcgaagagcaggcgcaggattgcggtggtgtcttacattgctttactgaagacaaagccacggcagcaacgcttttggaccttggcttttatatctctttctcagggattgtcacgtttcgcaacgccgaacaactgcgtgatgttgcgcgctatgttccactcgataggctgttggtggaaacagattcaccgtatctggctcccgttcctcatcgtggcaaagagaatcaacctgcctatgtccgtgatgtcgcagaatatatggctgtgctgaagggggtaagtcttgaatcgctggctgaagcgacgacagcaaacttctgccggttatttcatctagacccttcaacactctccagtgagaagcgcccgcttccataa

SEQ ID NO: 42245 - DNA, 1395 bp, Yersinia pestis
atgtcttcatcatcatttacaacggaaagaccctttacaccggaattgttatcccccgccggtaccctaaaaaacatgcgatatgcttttgcttatggcgctgatgcagtctacgccggccagccacgctatagtttgcgggtccgtaataatgaattcaatcatgaaaacctggcgttaggtattcaagaagcccatgcgctcggcaagcgtttctacgtcgtcgtgaatattgccccgcataattccaaactgaaaacctttctgcgcgatttaaaaccggtgattgagatggggccggatgcgctaattatgtccgatcctgggttgatcatgatggtacgcgacgctttcccacagatggatattcacctgtcagtgcaagccaacgccgtcaactgggcaaccgtcaaattctggcagcaaatggggctaacccgcgtgatactctcccgagaattatcactggaagaaattgctgagatacgggctcaagtgccagaaatggagctggaagtctttgttcatggtgcattgtgcatggcctattccggtcgttgcctgctctctggctatattaataaacgcgatccaaaccaaggcacctgcaccaatgcctgccgctgggaatataacgttcaagaagggaaagaggatgatgtcggtaatatcgtgcacatccaccagcccattgcagtgaaaaatgttgaaccgacgctgggtatcggggcgccgactgacaaagtctttgtgatcgaagaagcacaacgccctggcgagtacatgaccgcctcagaagatgagcacggcacttacatcatgaactcaaaagacctgcgtgccatccagcatgtggaacgcctaacccagttgggtgtccattcgctgaaaattgagggccggacaaaatcgttttactactgcgcgcgtaccgcacaggtgtatcgccgtgctatcgacgatgccgttgccggtaagccttttgaccccagtttgctgaccacgctggaagggttagcccatcggggctataccgagggttttctgcgccgccacgtacatgaagagcaacaaacttacgaatacggctattctgtttctgagcgtcagcaatttgtcggtgaattcactggtgtgcgccgcgagggtttagctgaagtgctggtgaaaaataaattctcacggggtgatagcgtagagttgatgactcctaaagggaatatccaatttaccctagagagcatgcaggataaaaaaggccaacccgccgatattgcaccgggtaatgggcatatcatgtatttacctattcccgaggagattgatgtggaatatggcttactgatacgtaacttaaacggaacaaatagccgcaatccccacgaaaaagcgtaa

SEQ ID NO: 42246 - DNA, 1434 bp, Yersinia pestis
atgtttaagaacgcatttgcaaacctgcaaaaggtaggtaaatcgctaatgctaccggtatccgtgttgcccatcgcaggtattctgctgggtgtcggttccgcgaattttagctggctaccgtcggtagtctctcacgtaatggcagaagccggtggttccgtctttgctaacatgccattgatttttgctattggtgttgcgcttggctttaccaacaacgacggtgtatctgcgttggcggcggttgtggcttacggcatcatggtaaaaaccatggcggtagtcgcacctctggtcttgcatctgccagcagaagaaattgcgactaagcatttagctgataccggggtattgggcgggattattgccggttcggttgccgcctatatgtttaaccgtttctaccgtattcagttaccagaatatttgggcttctttgcgggcaaacgttttgtgccgattatctccgggtttaccgcgattttcttaggcatactgctgtccttcatctggccacctatcggcaaagctatccaaattttctccgagtgggcggcttatcagaactcggtcgtcgcttttggtatttacggcgttgttgaacgttcattggtaccattcggtctgcaccatatctggaacgtgccattccaaatgcaaattggtgagtacaccaacgcagcgggtcaggtattcaacggtgatatcccacgttatatggtgggtgacccaacagcgggtaagttatcggggggtttcctgtttaaaatgtacggtctgccagcggcagccattgcgatttggcattcagccaaaccagaaaaccgtgcaaaagtgggcgggatcatgatctcggcagcactgacatcattcctgaccggtattaccgagccaatcgaattctcctttatgttcgtggcaccaattttgtattttatccatgcaatcttggcaggtttggccttcccaatctgtattctgttagggatgcgtgatgggaccagtttctctcatggcttgattgattttgttgtcctgagcggtaacagcagccgtatctggttgttccctctggtaggtatctgctacggtctggtgtattacaccatcttccgtgtattgattactaaactgaatttgaaaacaccgggacgtgaagattcgtctactgagcaatcagtacagggtggcacagaaatgtcagccgctctggttgaagcatttggtggtaaagacaacattactaacctggatgcttgtatcactcgccttcgtgttagcgtggcagatgtgtccaaggttgatcaggctgggctgaagaagttaggtgctgcgggtgttgttgtggcaggctctggtgttcaggctatcttcggtaccaaatctgacaacctgaaaactgatatggacgaatacattcgtaaccattaa

SEQ ID NO: 42247 - DNA, 891 bp, Yersinia pestis
atgccacacactcttttgatcctcaacggcaaagaatcaggcaaccctgaggtccgcgaagcggtcaaaaacgtacgcgacgaaggcttaacgcttcatgtccgtatcacctgggagcacggtgatgcaaaacgctatgttgaagaggccgccaccttggctgtcagtaccgttatcgctggaggcggcgatggcaccattaatgaagtggcaacagcattgatgagtttacctgcggataaacgcccttgtctggggatcctaccgctgggaaccgccaatgattttgcgactggctgcaatatccctttgcaaatagagaacgcactgcaactggcggtcaaaggccgggcggtggcaatcgatctggctcaagtcaacggtgagcattactttatcaatatggcaaccgggggttttggtacccgaattaccaccgaaacacccgataaactcaaagcggccttgggcggagtctcttactttattcatgggctgatgcgccttgatgccctaaaagcagacagttgcaaaatccatggccctgactttcattggtcgggggatgcgctggtcattggcatcggcaacggtaaacaggccgggggcggacaacttctttgccccgatgcactgattaatgacggcctgatgcaattacgcctactgacagcaaaggagttactccctgcagtgctgagcaccctgttcaatggtgagaaaaataagaatgttatcgacgccacggtaccttggctcgatatcactgcaccgaacgatatcaccttcaatctggatggtgagccactgtccggcagacatttccacattgaaatcttaccccatgcgattcagtgccggctaccaccgaattgcccattgttaggctaa

SEQ ID NO: 42248 - DNA, 3924 bp, Yersinia pestis
gtgaggcgactgcccaaaataatgtttgcgacaggcgccacaatcattgttgtggtggcgctgttggtcagtgcgctacgcatgatgctgcctctcattaatgagtatcggccgcaaattgtggctaagatccagtcggtcagcggtatcccactggacgtagggtttatgcagggaacctgggaaacatttggcccgacgttggaattacgcgatattcgcgcccaaatgccgaaggctgacttgcaggttcaacgggtgacgctggcactggatgtgtggcagtcactgctgcactggcgttggcaattccgtgatttgaccttctatcagttgcagttggatctgcacaccacactggatgcgacgcagaataacggcagtaaccttgaaaccggtaatgttcataatatcttcctgcgccagttagatcgttttgatctgcgtaatagccgcatctcttttctgacgccatctggcccccgtgccgagctggaaattccacaactcacctggctcaattccagcacccgtcatcgtgccgaagggcaaattagcctatcgaccattaatggtcagcacggtgtggtgcaggtccgtatggatttgcacgataatcagggcattctgaataatggcacggtatatatgcaggccgataatatcgaccttaaaccgtggattagccgttggttgcagaataataccggtctggataatgccgaattcagtttggcggcttggctgagcattaaaagtggtgaagtttaccggggcaatgtgctgctcagtcaggggcaggccaattggacggtgggcagtaattcacatcaattatctgttgataattttgtgctggaaggccgccgtcagggcaatggttggcaaatcgacgcgccagtactgaacctaaaaaccgatggtcaagcctggccgaaagggcgcttatcggccctttggctaccggagaatacccaatttattggccctgagcagcgtcaagaattacgtattcgagccagcaatcttcagttggaacggattgggccgctgttacccaccctgtcaccttttaccccagaactgctggcccgctgggcagatttacaaccacaagggtatgtcgatgcactggcgttggatatccctatcagccaaccggagaccacccgttttcaagccaaatggcacgatgtcagttggcagtactggggccaactacccggagttaatcattttgatggtgagttgagtggctccgcacgtcttgggcgtcttaacatcaaccttaaaaacagtctcttgccgtatggtgacctgttccgcgccccgttggaggttagccaggcgagtggcgcgctaaactggcgtattgatgataaaggctgggcgctgtggagtgatcaactggatgtccaggctaaatcgttgtggggcaacggcagtttttattatatgcagcctaatcagaagccgtcgcagcttaatcaagcccagccgtggctgaaaatactggcgggcatccgcctgtatgatgccaccgatgcctggcgttacttcccggtctcgcttatgggcgagaaactggccgattatctgacggaggcgctacagggggggcaggtagataatgcgacactggtatataacggtaatcctcatgattttccttataaaaataaagagggtcagttccaggtctatgtcccactacgtaatgcggttttccagtttcaaccggactggccagccttagataatttggccattgaccttaacttcctcaatgaaggcttgtggatgaatgcgccacacaccctgttgggcaaggttattggcagcaatatcagcgccatcattcctgattacttgaaagaaaaactgtatgtcgatgcggatgtcctgggtgaagggcgcgatgttcatgactactttaccgcgacaccacttaaggattcggtggccgaaacgctggatgaattgcaggtgggtggaaaaattagtgggcgcttacacctggatatcccgctggaagaagagagcatcactcatgccagcggtgaagtgaccttgaataacaacagcctgctggttaagcccctgcaaagccaactggaaaatatcaacggtaaattccgcttctatgatggcaatttggagagcgagacgttatcggccaactggtatgggcaaccattgacggttaatttcaccacgaaggagcagccaaaggacttcttggtgaatgttgggctacagggcgattggctgcctgctaaattgcccggtgtaccggattctcttgcgaagatgctcagtggcagtgccaattggcaaggtaaagttgcggtgaaattgccccaacacggtaagccagattatcaagtcgatgtcagcgcagacttaaagaaagtgagcagtcacttaccttcgccgctagataaaaacagcggtcaggcattgccactgcatgttcaggtgaacggtgggctggaggcatttaccctctctggtagcgcgggtaacaacaatgccttcaacagccagtggttattgcaaggcgagaaagttgaactggcccgcgccatctggcaaaccgacagtaaaaaaattccatcgttgcctgatgataaagcgctggtattcaaattaccggccattgatggtgagcgttggctggcattattggcccccgagctggcgacggccgcttcgccgtttgctgcatcattttcttcgccttctgcgacatcatccactcaaccgaagatcaaaggcagtaaaaccaatgtcatcttaccgaagcggctgacattacaaacccccgaactgttggtgggtgggcaggcctggcaccaactgacgttacaggccgatcccctgccaagtgggatgaaaatcaccgcgaaggggcaagaggtggacggtagcctgttaatggcagactatgggccatggcatgctgatctcaattatctttattacaacccacaatggggcagccgtgaggcaaataacccgctggcgcaagcggtatcgcaggagcctacggtattgcagaagccacaacctcccagcggtatatcattcagtgattggcctgcgctgcaattgcgctgcaaggcatgttggatactggggcagaatatcggccgggtgaacgcggacctaacgccgaaaggctcggctctgatactgacgaacggcttaattgaggccggaaatgggcgggccaatattaccggtcagtggcagcaagatcgcgctggcgataaaaccacactgaacatcggcttgaacgggccaagaatagatgaaaccctctcattctttggcctgaccaccctgataaaaaatgcctcttttgcgattaacgccgatctaaactggcgcggtgtcccttgggagccacagattaatacccttagtgggacgttaaaggggcggttaggcaaagggcagctcactgatcttggggggggccgtgcgggccagttactgcgtctggtcagctttgacgcactattacgtaagcttcaactcgactttagtgatacgtttagccgtgacttcgcatttgactctattcggagtacggccacccttaaaaatggggtgatgagtaccaatgacttagtgattgatgggctggcggcagatatcgccatgaatggcaaggttgatctggttaagcgccaaatcgccatggaagcggtcatcacaccggaactttccgccactgtaggtgttgccaccgcctttgcgatcaacccgatagtgggggcggcagtgtttgctgcctcgaagattttagggccgttatggagcaaggtttcgctgatccgctatcagattaccggtagtctggatcaaccgaccatccatgaagtgttacgtcagctaaaggagaatgaggcaccatga

SEQ ID NO: 42249 - DNA, 807 bp, Yersinia pestis
gtgaaaaccgccgattgtcatattagcccggtatcaggattaaccggtgaaagttggcgtattactggcccagggattgactggctggcgcgtgagcaatcgccgcacaaaagtcagttgggggtcaaccgacgacgtgagcgtaaattcctgcaacatattgctggcaatgggctgtctccagcggtgattgctgctaatcagcgttggctagtggtgaactggcttgaaggtgacgttgtcactaatgagcagttcatcccattggtgaatcatgggcaattagcgcggttactggcccgcttgcatcatttgcccgcgagtggttaccgtctggatttgcgtgctcagattgcccgctatggggcgcttattgatcctacgcgccgttcacctggcggagtgcggctacagcatgattttcttcgtaggccattaccagcgataacaaaaattgctcctttgcatatggatattcaccccggcaatttgttaacaacccccgttgggctgaaattaattgactgggaatatgcggcagatggcgatattgctttggaaattgccgcgctatttcgcggtaatcattggtcaatgctacaacaacaggcttttttgcaggactattgcaacaatgagcacggttatcatgacatcgctcgtttatcccgtcagattcagcaatggttgccctgggtcgattacctgatgttgatgtggtttgaagtgcgttggcagcaaaccgcggacccaatattcttggcatgggccgcgccgttgcgccaacgttttaatttgtctttttaa

SEQ ID NO: 42250 - DNA, 1032 bp, Yersinia pestis
gtgggtcccgtgatgttagatgttgccagctatgagctggatgctgaagagcgtgagattttaaaacacccactggtgggagggttgatcttattcagccgtaattttcatgatgcggagcagttacgcgaattagtacgccaaatccgtgcagcatcgcatgaacgtttggtggtcgcagtggatcaggaaggggggcgggtccaacgctttcgtgacggttttacccgcctgccagcggctcagtatttcgcggctatcaatgatgccgctactgcggctcaactggcgcaagaggcggggtggttgatggcagcagaaatgatggcgatggatatcgatatcagttttgctccagtactggatattggccatgtcagcgccgcaattggtgagcgttcattccacagtgatccacaacaggcgcggataatggcggagtgtttcatccgtgggatgcacagtgcagggatgaaaaccacgggcaagcattttccagggcacggcgcagtaaccgcagattcacataaagagacgccacatgataatcggccactggcagaaatccgtactcatgatatggttatatttcgtgaattgatccagcggaaattactggatgcgattatgcctgctcacgtgatttataccgaagccgatgcacggcctgccagcggttctgcctattggttacaagagatattgcgccaagagctagggttcgagggcatcattttctctgatgatctctcgatggaaggggctgcgatcatgggcagttacgccgagcgcggccaggcatcgttggatgccggttgcgatatgattttggtgtgtaataaccgtcagggggccgtgagtgtgctggataatctgtctccgatcaaagccgaccaactgacccgtttgtaccattcagggcaatttgaccgccagacattgatggcttcatcccgttggcaacaggcgaataaagcattaacggcactcagcgaacgttgggatgcacataaacaaacgttggggcaatag

SEQ ID NO: 42251 - DNA, 1578 bp, Yersinia pestis
atgacaaaaaatatccataagcatcgcatccttattcttgatttcggctcgcagtacacccaattattggcgcgtcgtgtgcgtgagattggtgtctattgtgaactatgggcatgggatgtcaccgaagcccaaatccgtgaatttaatccaagtggtatcatcctctctggtagccctgaaagtacgatagaaaacggtagcccgcgcgcaccagactatgtgtttacggctggtgtaccggtgttgggtgtgtgctatggcatgcagaccatggcgatacaattgggcggtaaagttgagagttcaaatcagcgtgaatttggttatgcgcaagttgaaattaaagctgacagcgcgctgatccgtgatatcaaagatgccatcaatccggcaggcgaagccgtattggatgtttggatgagtcacggtgacaaagttgcggagatccctgctgattttgtcacggttgccagcacggatacctgtccgtttgccattatggctaacgaagaaaaacgtttttatggtgtccagttccatcctgaagtgacacacaccaagcaaggcctgcgtttgttggagcgtttcgtgctgggtatctgtggctgcgaagcgctatggacatctgccaccattatcgaagatgcaattgtccgtttgcgtgagcaaatcggcgacgatcatgtgatcttggggttaagtggcggtgtcgactcttcagtgacggccatgttgttgcaccgcgctatcggtaaacgcctgacctgtgtattcgtggataacggcctattacgcttaaacgaagcagatcaggtcttggaaatgtttggcgataaatttggcctgaatattgtccatgtggcggcagaggatcgcttcctttcggcactgacgggagtggacgaaccagaagcgaaacgtaaaatcattggccgtgtctttgtcgaactcttcgacgaagaagcctgtaaacaagagcaggtgaaatggttggcacagggtacgatttaccctgatgtgatcgaatcggctgcatcagctaccggtaaagcgcatgtgattaaatctcaccacaatgtgggcggtttgccaaaagagatgaagctgggcctggttgagccgctgaaagagctgtttaaagatgaagtgcgcaagattggtctggagcttggcttgccatacgacatgctgtaccgccatcctttcccagggccgggcttaggtgtgcgcgtattgggcgaagtgaagaaagagtattgcgatttgctgcgccgtgctgacgctatctttattgaagagctgcacaaagctgatttgtacaataaagttagccaggctttcactgtcttcctgccagtacgttcagtcggtgtgatgggtgatggccgtaaatatgattgggttgtctctctgcgtgcggtagagacggttgatttcatgactgcacattgggcacatctgccatacgacttccttggccgcgtttcaaaccgcatcattaatgaagtcaatggtatctcgcgcgtagtttatgatatcagcggcaagccacctgcaacgattgagtgggaatga

SEQ ID NO: 42252 - DNA, 1380 bp, Yersinia pestis
atgtcgcaatcttccgcctcctcaatttttactgtcagccgcctgaatcagacggtacgagaactattggaaagggaaatgggccagatttggctcactgccgagatttctaatttctctcagcccgcttctgggcactggtatttcacgctgaaagatgatcgggcgcaagtgcgctgtgccatgtttcgtaacagcaaccgccgcaccactttccgtccgcagaatggccaacaagttttggtcagggcatcaattaccctgtatgaaccccgtggtgattatcagttaattgcggaaagtatgcagcctgccggtgatgggttgctgcaacaacaatttgaacagcttaagcaacaattagcggccgaagggctgtttgatcaaagccacaaacagccactccctcaccccgccaaacaagtgggcgtaataacgtctgccagtggggctgcgctgcatgatgtgctgcatgtgttacagcgccgtgatccatcgcttccagtaattatttatcccacatcagtacagggcgttgatgcgccattgcagatagtccgtgcgatccagttggcgaacttacgtgctgaatgcgatgtattgattgttggccgcggtggcggatcgctagaagatttgtggagtttcaacgacgaacgggttgcccgcgctatctttaacagccatatccctatcgtcagcgctgtcggccatgaaaccgatgtcactattgccgattttgttgctgatttacgcgccccaaccccttcggctgccgccgagctagtcagtcgcaatcagattgagctcgttcgtcagattcaagggcaacagcaacgaatggaaatggcgatggattactatctggcgcaacgcaaccagcaattcacccgccttgaacaccgtttgcagcaacagcatccgcatttacgtttagcccgtcagcaaacattgttgctgaaattacaacgtaggctggaagagagtgcacaaacacagatccgcttattaagtaaacgtaccgagcggctgcaacagcgtttgcagcaagtgcagcctcaggggcaaattcaccggtataaccagcgggtacagcagcaagaataccgtttacgtcaagctgtagagcgccagctcaatggctatcgccaacgctttggtatcgcctgctcccagctagaggccgtgagcccactggcaacactggcccgtggctacagcgtgacacagacgccagcaggggcgttattgaagaccaccaagcaagtacaggccggtgataaactgaccacccggttgcaagacggttgggtggaaagtgagattacccaagtcaccgtagcgaagaaaagccgtcagaaaaaagtagtgacgcagtga

SEQ ID NO: 42253 - DNA, 1392 bp, Yersinia pestis
gtgatcatgattaagcgttctatctctgggcggctggcgctaatgtttgccttggcctccatactgatagtttcggctctcggtattgtactgcgaagctccttgcataactcattgcaaaagcagatgcataacgaattgcaattcacggagtcgctgatggcaccgtggatcctctcccgtaccacgctggacggctggcaaacgttggcgaccaaattcaccgatttggccgctgctgagggcggccgcgtacaatactgggtcctcagtgatgacccccagcttcaggtgggcggcccggcaccccgtggtgtaacctgggcttcgttaagcaaaggattcagcaaagtacccggtgcgacagacgagtcatgctccctatttctactgatgtcggaaattcctgcccaaggtgagcgccccgctctgcgctatgtggtcgctatcgattccacgccgtatatgggtactctgaatgaatttacccgcacgctgatcgtcattactgcgattggcgtcttattcgtggcactgctggggttcgtgattgccagaataggtatgcgccctgttaataaactcagcgaacaggcccagcaccttgcgccaggaaatcacgggcagcgtctggataccttaactctgccggatgaactgcaaaaactggccgtcgcattcaacggcgtgctcgaacggcaggaaatcgcctggcggcaacttgaaagttttaatgctgatgtcgcacatgaactgagaaccccgttgaccaatctgatggggcaaacgcaattaggtctatctcgtaaacgtgaaacgcatgagctcgaagatttactggagtccaatctggaagaactcgagagaatgacctctattgttaacgatatgctgttcctctcccatgctcaagctggggagcacgcaacccagttaaccgacgtgtctcttcgggaagagacctataagaccacggagtatgtagagccttcatttgccgaaaaaaatttgtctattcatgttgagggggatatcactgcacgcattgatcggcggcttttccaccgctcactggcgaatctgctagaaaacagcgcccgccatgctgttactggtactaccgtgaaagtgacgatctccagagaaaataatctggcatccatcgcggtagccaacattggagctcccattgcggcggaacatctaaaccgtttgtttgagcgtttttatcgtgttgattcttcccgtgcacgcagtgacacacaccatggactcgggctctccatcgtcagggcggtggcgataatgcatcgtggagatgtgtttgccagtagccagaatgggattaatacctttggtctgacccttgcaataactgacccttatatatag

SEQ ID NO: 42254 - DNA, 1092 bp, Yersinia pestis
atgaaacacaatgcttttaaaatgacatccgtttttaaaacgacatcggtttttaaatccaccttgttagcggcagtgatcagtctttcatctgggggagcaatgtcagccgattataaattaaatccatttacactgacttatgacggcgcgattaccgaaaacgtgaaaggcaaagtcaatattcatcctgttacttataagctaaatggtttggaaatttctgccaacgtatatacccctgcgaattatgatcccgctaaaaaatacccggccgtggtggtggctcaccccaatggtggcgtgaaagagcaggtcgctggcttgtatgctcagcgtttggcggaacaaggctatatcaccattactgcggatgccgcgtatcaaggcgcgagtggcggcttgccccgcaatgtcgacaaacccgcttaccgcattgaagatattcacggcatggcagactttattacccaatatcctggggtggacacggtccgtttaggcctgctgggtatttgcggcggtgggggctactccttgaaagccgggcaaaccgacaagcgcttcagcgcgattgccacgttgagcatgtttgattccggtctggtaagacgcaacggttatcaggactcacaactttccacaatacaagaacgtttaaaacaagcctctgatgcacgagcacaggaagctgctggtggagaggttacttacgttggggatgccaaactgactgatgagcaaatagccaaactgccgtttgacctttatcggcagggttttgagtactacggtaaaacgcatgctcaccccaattcaaccttcagatacaccgccagcagtctgctcgacttaatgagattcgatgcggcaagcaatatggatttaatcgataagccgctactgatgatggcaggcagtaaagccgattccctgtatatgagcgaaacagcgtttaaaggtgctagcaacgcaaaagataaggaactgttcctgattgatggtgcgacccacattgaaacctattggcagccggaatatgtgaatcaggctataggtaaattggctcagttctacgggaaaaatttataa

SEQ ID NO: 42255 - DNA, 1488 bp, Yersinia pestis
atgatacctgtcatcgcgctggtcgggcgcccgaatgtgggtaaatccactttatttaaccgcttaacgcatacccgtgatgcattagttgcggattttcccgggctaacgcgtgatcgtaaatatggtcgtgccgaggtcgaagggcatgagtttattgttgtcgataccggaggtattgatggcacagaagatggtgtagaaaccaagatggcaggtcaatcgttattggcgattgaagaggcggatattgtcctgtttatggtcgatgcacgcgctggcttgatgccagcagatcaggggattgctcaacatctgcgcagccgtgaaaaagccactttcctggtcgctaacaaaaccgatggtattgatcctgatactgctacagcagatttctactctttaggtttaggcgaagttcacgctattgctgcctcccatgggcgtggcgttactcaactgattgaagatgtcatggcaccttatatggatgccgaggaacctgaagttgagttgaccgaagaagaggaaaatgcggcctattgggctgagcaggaagctcaaggtgaagatgttccgcctgaagatccggaagatgattttgatccacggactttgccaattaaattggcgatcgtggggcgtcctaacgtaggcaagtccacactaactaaccgtattctcggtgaagatcgtgtggtggtttacgacatgccgggtacgacgcgcgatagcatttatatcccgatgacgcgtgatgaccgtgaatatattctgattgatacggcgggtgtacgtaagcgcggtaaaatcactgaaacggttgaaaaattctccgtcattaagacgttacaggcaattgaagactctaacgttgtcctgttggttattgatgcccgtgatggaatttcagatcaggatctatcgctattaggctttattctcaatagtgggcgctcacttgttattgcagttaacaaatgggatggcatgactgaagaagcccgtgcgcaagtaaaagatatgctggacctgcgtcttggctttgttgattttgctcgcattcactttatttcagccttgcatggcagcggcgtcggcaacctgtttgaatcggtacaggaagcttatgattgctctaccaagcgagtgggtacttccttactgacccgtattatgcaaatggcagaggaagaccatcaacctccgttggtccgtggtcgtcgcgtgaagctgaaatatgcccatgccggtggctataacccgccaattgtagtgattcacggtaatcaggtgactgacctgtcagattcttacaaacgctatctgatgaactatttccgtcgttcactgaaagttatggggacgccaatccgcattcagtttaaagagggtgagaacccgtttgccggtaagcgcaacccgctgacacctaatcagatgcgtaaacgtaaacgtttgatgtctcatctgaaaaaaggtaagtaa

SEQ ID NO: 42256 - DNA, 1182 bp, Yersinia pestis
atgcaattgcgtaaaacactcttagtaggactggtatctgttgccctattgagtggttgctcactgtttaacagtgaagaagatgtggttaccatgtcgccactgccaaaggttgaaaatcaattctcaccaactaaggtgtggagcacctctgttgggagcggtgttggtgattattactcccatttgcgcccagcatggcaggggacttccgtatttgctgccgatcgcaaaggtttagtgaaagccatggatgcagacaccggtaagcaaatctggcaaaccgacctgtctgaaaaaacgaactttctctccagcaaccattctgcgatgttatctggtggcgtaacagcttcaggttcgcatgtttatgttggcagtgaaaaagcggtggtttacgcgcttaatgcctatgatggtcaggttgcatggcagacggtcgttgcgggtgaggcgttgtcccgtcctgtggtgagcgatggcgtagtactgatccacacatcaaatggtatgctgcaagcgctgaatgagtctgacggtgctatcaagtggacactaaatctggatacgcctgcattgtctctgcgtggtgagtcagcccctgcggttgcatttggtgcagcgattgtcggtggtgacaatggccgggtcagtgcagtgatgatggaacagggtcagttgatctggcaacaacgtatctcacaagtgaccggtgctactgaaattgaccgcttgaatgatatcgatatcacgcctgtcgtggttgacggtgtggtttatgcgttggcttataacggtaatctaaccgccttggatttgcgttccggccagatcctgtggaagcgcgagataggctccgtgaatgactttattgttgacgctgggcgcatttatctcgttgatcaaaatgaccgtataatcgcgctgaagtctgatggcggcgtaacgctttggagtcaaagcgatttattgcatcgtaacttgaccgctccagtgatgtataatggctatctggtcgtaggtgatgccgaaggttatctgcactgggtgaataccgatgatggccgttttgttgctcaacagagcgtggacagctcaggtttcctgagtgcgccagtggttgccagcgataagctgttgattcaggcaagaagcggtacggtatacgcgttcacccgttaa

SEQ ID NO: 42257 - DNA, 3447 bp, Yersinia pestis
atgtcccaacaatatcgttattcattgcctgaacgacgtggtgatacccgtcagttaggccagttgaccggatcagcctgtgcggtcgaatgtgccgaaatcattgaacgccatgatggcccggtaatgctgattacccccgatatgcaaacggccttgcgcttgcgtgatgagatccagcaattctcgccacaacccgtaagtaccctctccgattgggaaacgctgccttacgatagcttctcgccacatcaggatattatttcggcccgcctctcttgtttgtatcatcttccggcaatgaaacgcggtgtcattattctcccaattaataccctgatgcaacgagtgtgcccacacgaatttctacatggccacgctttggtgatgaaaaaaggccagcacttgtcacgggataagttacgcgcccaacttgagcaagcgggctatcgcagtgttgaacaggtcatggagcacggtgagtttgcgacgcgaggtgcgttgctggacttatacccaatggggagcaatgaaccgtatcggattgatttttttgatgatgacattgatagcctgcgggtatttgacgttgattcgcaacgcacactcgtcgaagttgagcaaataaacttactgccagcacatgagttcccaatagataaagcggcgattgaattattccgtagccaatggcgtgaacagtttgaagtccgtcgcgacaacgaacatatttatcagcaagtgagtaaaggcatctggcctgcgggtatcgagtattggcagccgctgtttttcagccagcaattaccgacattgtttagctatctgcctgaaaataccttattggtaaacaccggagatctggaaagctcggctgaacgcttctggcaggacgttaaccaacgcttcgaaagccgccgtgttgacccaatgcgcccactgttggcccccgagagcttgtggcttcgggttgatgcgctgtttaatgaattaaaagagtggccgcgtgttcagcttaaaacagaggcgcagcccgccaaagccgcgaataccaatttatgttatcaaccgctgcccgatttatccgttcaggcacaacaaaaagcgcctcttgataatctgcgtcgctttattgaatcgtttcatggcagtgtggtgttctcggttgaaagtgaaggccgccgtgaaaccttacaagacctgctggcacggataaaactcagcccaacactgatcactacgctgtctcaggcggctaaccccggccattatctgatggttggggcctcggaacgtggcttcctcgatactgacaaacaactggcgctgatttgtgaaagcgacctactcggtgagcgtgtcagccgtcgccggcaagataaccggcggaccatcaacaccgatacgttgatccgtaatttggcagaactccgccccggccagccggtagtccatctggaacacggtgtcggccgctatctgggactaaccacccttgaagcgggtgggataaaggctgaatacctgatattgacttacgccggtgaagataaactgtatgtccccgtgtcatcattgcatctcattagccgctattcagggggtgcggacgataacgccccgttgcataggttaggcagcgatgtctggagccgggcacggcaaaaagccgccgagaaagtgcgggatgttgctgctgaactgctggatatctatgcccagagggcggttaaatctggctttaaatttaagcatgaccgtgagcaataccagctgttctgccaaagcttcccgtttgaaaccacgccagatcaagagcaggcgatcaacgcggtgctcagtgatatgtgccaaccgttagccatggaccgcttggtttgtggtgatgtgggctttggtaaaacggaagtggcgatgcgggccgcatttctggccgttaccaataataaacaagtggcggtgttggtacccaccaccctgctggctcaacagcattttgataatttccgtgaccgctttgccacttggccggtacggattgagatgctatcccgttttcgcagtgccaaagagcagcaagtcattctggaacaagccgctgaaggcaaaatcgatatccttatcggtacccataaattgctgcaaagcgatctgcattggcacgatctcggcctgctgattgtggatgaagaacaccgcttcggcgtgcgtcataaagagcggatcaaagcgatgcgggctgatgttgatatcctgaccctgacggccacgccaatcccacggacactgaatatggcgatgagtggcatgcgtgacttatcgattatcgccacccctccggcacggcgtctggcggtaaaaacctttgtccgcgaatacgatagcctggtgatccgtgaagccatattgcgtgaaatcctgcgcggtgggcaagtctattacctgtacaacgatgtggagaatatcgaaaaagtcacgcagaaactggctgaattagtccctgaggctcggataaccatcggccatggtcaaatgcgtgaacgggatttggaacgggtgatgaatgatttccaccatcaacgcttcaatgtgctggtctgtaccaccattattgaaaccggtattgatattcccagcgccaataccattattattgagcgagcggatcacttgggtctagcgcagttgcaccagctcagaggccgggtcgggcgctctcaccatcaggcttatgcctacttgctgacccccaatccaaaagccatgagcaccgatgcgaagaaacggctggaagccattgcgtcactggaagatctcggtgcaggttttgcattggcgacacatgatttggaaatccgtggtgccggggagctattgggcgaggaccaaagcggccagatgaccacgattggcttctcgttgtatatggagctactggaaagtgccgtagatgcgctaaaagagggccgtgagccttcattagaagacctgaccagcaaccaaaccgaaatagaaatgcgcatgccggtgctgctgccagaggatttcatttcagatgtgaatatcaggctgtcgttctataaacgtatcgccagtgcgcgcaacgaaaccgagctggatgagttaaaagttgagctaatcgatcgctttggcaagttacccgaccccgcccgctatttattgcataccgccgaattgcgtcaacaagcccagaaactgggtatcaaacgtattgaaggcaatgagcgtggcggtttcattgagtttggcgagaacaataaagtggatccggtgtatttgattgggctgttacaacggcaaccacagatttaccgtttggaagggccaaccaaattgaagttggtgcaagatttaagtgatcgggcgcaacggttgaaatttattacggagttactggcggcatttgcacaacatcgcattgcctag

SEQ ID NO: 42258 - DNA, 1203 bp, Yersinia pestis
atgtatcaacctgtcgccctatttatcggcctgcgttatatgcgtgggcgtgcttctgaccgcttcggtcggtttgtttcgtggctttctaccattggcattacgctgggggtgatggctcttatcacggtattgtctgtgatgaatggttttgagcgtaatctgcaagatacgattttggggcttatgccacaggcgctgattaccacaccacaaggttctttggatccaaacaagataccggcttcaaccctaaaatcgctgagcggtgtcagtgatattgtgccgttgaccacggcggatgtggtgttacaaagtgcgcgtaatttggccgccggtgtgatgctgggggttgatccacagcagcatgaaccattggccaattatttggttaacgtggatataaaagcgttagcgccaggtagctacaacatcatcctcggcgagaagttagcgggccagctcggggttaaacgcggtgaaacactgcgtttgatggtaccgagtgccagccaattcacgccaatgggccgtattcccagccagcgtgtgtttaatattatcggcacctttgcagcgaatagcgaagttgatggctatcaaattttggttaaccagcaggatgcatcacgcctgatgcgttaccctcttgggaatattaccggctggcgcttattcctctcgcagccgctgtcggtcgatagcctgagccagcagagtttgccagaaggcaccgtatggaaagactggcgtgaccgtaaaggtgagcttttccaggccgtgcggatggaaaagaacatgatggggttattgctcagtctgattattgctgtcgcagcctttaatatcattacgtcactggggctgttagtgatggaaaaacaaggcgaggtggcgattttgcagactcaagggttgagtcgccggcaaattatgttggtgtttatggtgcaaggtgccaccgctggggttatcggcgcattgctaggggcagggctgggggttttactcgccagccaattgaacaccctgatccctattttgggcgtattgattgatggcgcaacgctacccgtggagattgacccacttcaggttacggtcattgcactgctagccatggtgatcgctctgttgtccacgctgtacccttcttggcgcgccgccgccgcacaacccgcagaggctttacgctatgagtaa

SEQ ID NO: 42259 - DNA, 1275 bp, Yersinia pestis
gtggcaaagaacattcaagccatccgtggtatgaacgattacctgccagccgatacggcaatatggcagcgtatcgaaagcatcttgaagcaagtgctaagcggttacggttacagtgaaatccgtatgccgattgtagagcagaccccgttattcaaacgcgctatcggtgaagtgaccgatgtggttgaaaaagagatgtacacctttgatgatcgcaatggcgaaagtctgacactgcgcccggaagggactgcaggctgtgtgcgcgcgggtattgaacatggtctgctgtacaatcaggaacagcgtctgtggtacatcggtccgatgttccgctatgaacgtccgcaaaaaggtcgttatcgtcagttccatcagttgggggccgaagtctttggtctgccagggccagatattgatgccgagctgattttactgacagcccgctggtggcgtgcattaggtatctttgaacatgtgaagttggagctgaactctattggttcgttggctgcccgtgctgactatcgagaagcgctggtggcgttcctggagcaacatgttgaggtattggacgaagattgtaagcgccgtatgtacagcaatccgttgcgggtgttagattccaaaaaccctgatgttcagcagttgcttgatgatgcgccaaaactgtctgattatctggatgaagagtcaaaacaacattttgccgggttgtgtgaacttttagataaggccagcatcccatataccgttaatgagcgtttagttcgtggtttagattattacaaccgtacggtatttgagtgggtaacgcacagcctgggcgcacaaggcacagtctgtgcgggtgggcgttatgatgggttggtcgagcaactcggtggtcgtgcaacaccggccgtgggttttgcgatgggccttgagcgcttggttctgctggtgcaggctgttaatgctgatttccaggtgcctgcgacagttgatgcttatgttatctcctccggtgagggggcgcaaagtgctgcgatgctacttgctgagagcctacgtgatgccttaccaacgctaaaaataatgaccaattacggtggcggtaatgttaagaaacaatttacacgcgctgataagtggggcgctcgtgtcgctttaatgctgggtgaaagcgaagtggccgcgcagcaagtcgttgtaaaagatctgcgaaatggtgaacaagaaacgctggcgcaagcggatgttgctgcgcgtctggctttgatgttgggttaa

SEQ ID NO: 42260 - DNA, 1092 bp, Yersinia pestis
atgggattcaaatgcggtattgtgggcctgcctaacgtcggtaaatccaccctgttcaacgcgttgacacaagcgggtattgaagcagctaacttcccgttctgcaccatcgagcccaacaccggtgtcgtgccaatgccggacccgcgtctggaccaattggctgagattgttaagccgcaacgtatcttgccaacaaccatggaattcgtggatatcgcagggctggtaaaaggggcttccaaaggcgaaggcttgggtaaccagttcctgaccaatatccgtgaaaccgaagcaattggtcacgtggtgcgttgttttgaaaatgacaacatcatccatgtcgccgggaaagttgatccagcggatgacatcgaaacaatcaataccgaacttgccctctccgatttagaaacctgcgaacgtgccattcatcgtgtccagaaaaaagccaaaggcggtgataaagacgctaaagctgaactggaagcactggagaaatgcctgccacatttagagaatgcaggcatgttgcgcgccttggatctgacggctgaagataaagccgctatccgctacctgagttttctgacgctgaaacctactatgtacattgccaacgtcaatgaagatggtttcgaaaacaacccgtatctggatcaggtgcgcgctattgcggcggcggaaggttcggttgtcgttgcggtttgtgctgcggttgagtctgatattgcagaaatggaagatgaagatcgtgctgaatttatggccgaactgggcattgaagagccggggctgaaccgtgttatccgtgctggttatgaattactgaatctacaaacctacttcaccgcgggtgtcaaagaagtccgtgcctggaccatccccgtgggtgccactgcaccacaggccgcaggtaagattcataccgacttcgagaaaggctttatccgtgcacaaactatcgcgtttgatgactttatcacctacaaaggtgaacaaggcgcgaaagaagccggaaagatgcgttcagaaggtaaagaatacattgttaaagatggtgatgtgatgaacttcctatttaacgtctaa

SEQ ID NO: 42261 - DNA, 1128 bp, Yersinia pestis
atgcataacggatcccctattattcggcgtaaatcgacccggatttacgtcggtaaagtgcctattggtgatggcgcaccgattgctgtgcaatcaatgaccaataccaaaaccacggatgtggatgccactgttgcccaaattaaagcattggaacgtgttggtgtggatatcgtgcgggtctcgataccgacaatggatgcagctgaagcctttaagttaatcaaacagcagtctactgttccgctagtcgcagacattcattttgattaccgaatcgccttgaaagtggctgagtatggtgtcgattgtttgcggatcaaccccggtaatattggtaatgaatcacgtattcgtgaagttgttgcctgtgcacgtgattacaatatccctattcgtattggtatcaatggcggctcgctggaaaaagatattcaggagaaatatggtgaacctacaccagaagccctgcttgaatccgcgatgcgtcatgtcgatatccttgatcgtctcaatttcgatcagtttaaagtcagtgttaaagcctccgatgtcttcctggccgtcaattcctatcgtttgctagcgaaacaaattaataatcctctgcatttggggatcactgaagcgggtggtgcgcgcagtggttcggttaaatctgcgattggattaggtttgctgttatcggaagggattggcgatactttgcggatctctttggccgcagatccagtagaagaagtgaaagtaggcttcgatatccttaaatcactgcgtattcgtgcgcgtgggattaatttcatcgcttgcccaacctgttctcgtcaagagtttgatgttattgggacggtgaatgccttggaacaacggctggaagacctgattacacctatggatgtttctatcatcggttgtgtggttaatggtccgggagaagcgttggtgtcgacaattggtgtcactggtgcgcgtaaccacagtggtttttacgaagacggggtgcgtcaaaaagagcgctttgataacaaagccatgattgaccaattggaagcaaaaattcgtgccaaagcatcaattcttgatgcgaataaccggattgttatcaaccaattggatgataataaatag

SEQ ID NO: 42262 - DNA, 1038 bp, Yersinia pestis
atgaatactgaagcctcccaagatcaaactgttacagagacgccaggtgtgcgcctgcgtcaagcccgcgaatcattagggctaacccagcagacagttgcagaacgtctgtgtctgaaagtatccacaatccgtgatattgaggaggataacgcgcaagctaatctcgcctcgacattccaccgtggctacattcgttcttacgccaagctggttcatcttcctgaagatgagttattgcctattttggagaaacaagcgccagtcagagcggcgaaagttgccccaatgcaaagtttttcattgggtaaaaaacacaaaaaacgtgatggctggttgatgagtttcacctggcttattgtgttggttgtgttaggtctgaccggagcatggtggtggcaaaatcatcaggcacagcaagcagagattgccaatatggttgatcaatcttctgcccaactgtcacaaaatggcgggcaaccagtgccgctaactgatgataacagcgatgctattgcgccaacggatgccccggcaccggtagccaatggtcagccggtaccactgacaaatcattcaggctcggcaataactaattcagctacaaccagttcagttccaaaaacaactagtaccgaacctgtcgatacggcgaatacaaataccacaatgcatcaggagggggctgcgtcagcggccgtttccccaagtcaggtcccgcaacctggtatgcccacaggccaaccgccattacctacagcagacgcaggggtaagtggtagcgcgtcatctgtgggggcgttagtgatgaattttacagcagattgttggttgcaggttgttgatgcaacgggcaagacgctgtttagtggcattcaaaaagggggcgctgtccttaacctggcgggtaaagcgccctataagctgactatcggtgcaccaggtgctctgacgatttcgtatcagggtaacccggtagatttaagtaagtttattaaggctaatcgcgtagcccgcctgactgtctgtgtagagtag

SEQ ID NO: 42263 - DNA, 948 bp, Yersinia pestis
gtgcctgatatgaagctttttgctggtaacgccaccccggaactagcacaacgtattgccaaccgtttgtacaccagccttggtgacgccgcagtaggtcgttttagcgacggcgaagtgagcgtgcaaatcaacgaaaatgtacgcggtggtgatattttcatcatccagtccacctgcgcacccacgaacgataacctgatggaactggttgtcatggttgatgccctgcgtcgcgcctccgcaggacgtattacagctgtaattccttacttcggctacgctcgtcaggatcgccgtgtgcgttctgcccgtgtgcctatcactgccaaagttgttgccgattttctctcaagtgttggggttgaccgtgtattgacagtggatcttcacgctgaacagatccaaggcttctttgacgttccggtagataacgtttttggtagcccaatcctgctggaagatatgttgcagcagaatctggaaaacccaattgttgtttcaccagatattggtggcgtcgtccgtgccagagccattgccaagctactgaacgataccgatatggcgattatcgacaaacgccgcccacgcgctaacgtttctcaggtgatgcatatcatcggggacgttgctggccgtgactgcgtgttagttgacgatatgatcgataccggtggtaccttgtgtaaagcagctgaagccttgaaagagcgtggtgccaagcgtgtctttgcgtacgcaactcacccaatcttctcgggaaatgctgttgataacattagaaattctgttatcgatgaagtgattgtttgcgacaccattccgttgtccgctgaaatcaaagcattgaaaaacgtgcgtactctgacgctatccggcatgttggctgaagccatccgccgtatcagcaatgaagagtcgatctctgcaatgtttgaacattaa

SEQ ID NO: 42264 - DNA, 1956 bp, Yersinia pestis
atgacccacccaagctttattcgcctgcggtttgcgttcaagctgagttttgccattgtggcggcattatttcttggctttcatctgcaattggaaacaccgcgttggtcagtgcttactgccgctattgtttccgccgggcctgccttcgctgcaggtggcgaacctttctctggtgcgattcgccaccgaggttggttacggattatcggcacctttatcggctgtattggggggctggtcattattgtgctgaccatcagagcgccagtattaacgttgatgctgtgttgcctatgggctgggatctgtacgtggatttcatcactggtacgggtagaaaattcgtatgcgttcggtttggccggttataccgcgttaatcatcattgtcaccaccggtgaaacgccactactgacgccgcaatttgcggttgagcgctgtagcgaaattgtcctcgggatcgtctgtgcggtgatggcagatctgctgttttcaccccgctcgatcaaacaggatattgatcgattggtcgacaaggtgttagtggatcagtaccggctcttacaactctgcattcagccagcagaaaaaagtgagattgatcgcgcttggaatgaattggttaaaaataccacgtcactcaatgggatgcgcagctatctgatgatggagtcttcccgttggcagcggtgtaatcgccgtttgcaggtgttacataccgagtctttggcgctgatcacgcaggcgtgtgaaacctatctggtgatgagcaatcacccagaggtgatcagtgctgaactgaaaactatgctgagcgaacccgctcaaactcctgcagagatccaccagcagatgaaaaaactgcgtcagtttattgctgccagccacagtgaggcgatcccgcacaccatcagcagttgggttggggcagcgactcgctatttattactgtcgaaagggatccagaccaacagcagcatcaatcaggtcgaagaggatattttggcgggtgatgcgccggttaagcccatttctgccgaaggccatcatgcgatgatcaatggcttgcgtaccggtattgccacggcgattggtggcctgttctggctgtggaccggctggacatccggcgcggggtgtatggtgatgattgcagtggtcacttcgctggcgatgcgaacaccgaatccacggaggatggcgctcgattttctggtcggcgtgattatcgcactgcccatcggggcgctttactttatgtttattatcccgtcgacccagcaaagtatgctgttgctctgtatcagcttgggggtgctggcatttattatcggcatcgaagtacaaaaacggcgcttgggttcactgggaacgctggctagcaccataaatattatcgtgctaagtaatccaatgatatttaatgtccgccagtttctcgatagcgcattaggtcaaattgtaggctgctttgtctctttaattgtcctgctgttgatccgtgacaacgcgaaggacagaacgggcagaaccttactcaaccgttttgtttacagtgcggtctcggccctaaccaccaataaaaccaagcgcggcgaaaatcatctacccgcgctgtatcagcaactgaaccagttattgatgatgttcccggccgatattgataaatatcgtctggcattaacgctgattattgctcaccagcggttaaacaggactgaaatcccggtgaatgcggagttgagcgcttttcataaacagatccgctctaccgcagagcgagtgattactgtcaacaatgaccagaaacggcgttattattttgcccggttattgcaggaactggatcaatatcaacagaaattggtggattatcaggctgctgatgcggttatccgcccggttaagcggttgactgagatgttgcgtaaatatcagagtgcgctgatttaa

SEQ ID NO: 42265 - DNA, 1236 bp, Yersinia pestis
atggacaaattactcgaccgatttttcaactatgtttcttttgatacacaagcaaaagccaatgtaaaatctgtgccgagcactcagggacagcgcaagcttgctcaggcgttgcaacaggaattattgacgttgggcttttcccacgtcaccttgagcgatcatggttgcgtgatggcaacattgccggcaaatgtctcctggccggtccccacgattggctttattgcccatctggacacctcaccagatttttcaggtaaaaatgttaatccacagatagtggagaactaccgtggtggtgatattgcgttaggtattggtgatgaggttttatctcctgttatgttcccggtattacatcaattacttggacataccttgatcacgactgatggtaaaaccctgttaggggcggatgataaagcgggtattgctgaaatcattaccgctatggtgcgcttaaagcaccgtaatgtcccccatggggatattcgtattgccttcacaccggatgaagaagtgggtaagggggctcagttttttaatgtggcagagtttgatgcacagtgggcttataccgttgatggtggcggcattggtgaattagagtttgaaaatttcaatgcagcatcggtggcaataaagatcgtcggcaataatgttcatccaggcagtgctaagggcgtcatggttaatgcgttgtcgctggcaacccgttaccatcaagagttgccagtagatgaaaccccagagtgtactgagggttacgacggtttctatcatctgcaaagtattaaaggcacggttgaacgcgctgagatgcactacattgttcgagatttcaatcgcgatagctttgaagcgcggaagaagaatatggtggatatcgccaagcgggttggtaaaggtttacatcgtgattgttatatcgaaattgttatcgatgacagctattacaatatgcgtgagcagattattaagcacccgcacattatcgaattagcccaacaggccatgcttgactgtgatattactccgattatgaagccaattcgtggtggtaccgatggtgcacaactctcttttaaagggttaccttgcccgaatatttttaccggaggctataattaccacggtaaacatgagtttattacgctggaagggatggaaaaagcggttgcagtcattatgcgaatttctgagctgaccgccaagcgggctaaagaatcataa

SEQ ID NO: 42266 - DNA, 549 bp, Yersinia pestis
atgaacaaacagcccgaagattggctagatgacgtcccagaaaataaaaacgacgatgacgatgagattatctgggtcagtaaaagtgaaattaaacgtgatgccgaagcgctgaaagaccttggcaccgagctggttgatctgggtaaaaatgcactcgaacgcatcccgttggatgaagatctgctggccgccattgaactggcgcagaagatcaaaaaagaaggccgccgccgccagctccagttaattggtaaaatgttgcgcgcccgtgatgtcgaaccaatccagaccgcgttggataaactgaaaaaccgccacaaccagcaaatctcgctgttccataaactggaaacactgcgtgaccgcctgatcgcggaaggtgatgaggcgatcccaacggtgctagagctgtaccctgatgcagaccgccaacaattacgcagtctggtgcgtaatgcacaaaaagagcaggctgcgaataagccgccaaaatcattccgtcagattttctcgtatttacgtgaactggctgaaaaaaaacagtaa

SEQ ID NO: 42267 - DNA, 4293 bp, Yersinia pestis
gtgtcacaaatagcaaccactgatacacccgcagtaacaccaataaaatcaacactaacaggtccatttgagcggaattcggctggtacaagttttggatcaaatgtagatgtagatgtaattgataatacatctacggcaacccgcgtgattgctgaaactacgccggaagccgagagcacaattggtgaagcgactgggcaagaaggcggtaacgcaacagccgttatcccccctactacaacaccatcagagcaggaaatcacagaacctgaacaaccgggcctgcttgataagatcaaagatctgctggggttgggtgaaattactcaagaacaagccgatgcattagaaaaaaacgttaagactaaagttgagaaagtggacgcacagactgcggcgaagttggcacttgaatcagcccaagcagaggcccaaaaagcagcagaagatgctttatatctaaaaaccgaaaatgtttcatatcaggcattcgctcaaactgaagaaaagattaaaaaagaagctgatgaagcaaaaaaaaagcaagataagactaaagaagatgccattaaggccgtcaaggttaataacactccattagttcctggtgataaggatattgctgagaaagtcaccaaagccgtgaccgatacaacaaaagtacagggagaaaaagcagttactctggctacaaaaataactgatgccaaagtcgcccaagaaaagaaagacgcgaatacagaggcgcttgcagaaatcgacgggcggctcatttctgtctcaaacgctttaatacaagcgacaggtaccgataagggtccgttggatcagaaacttaaagaagctcaacaagctaaaaccgaacaagacggaaaagaactggcgtccggcgggtataaagaactcttcgaggaggataagaaaactagcggttactttggcattgcggaaaatgacaacggctcgggacagcaagaaaaattagccgaagcaaaaaagaatcgagatgcctataacaaagcagctaaaaaagaacttgacgctatcgccaaggcccaaaaagcagttgaggctattgatgcacagatagtaaaattaaaaaaagataaaggtgatatcgaacaagaacaaagtaccgaaaagggcaaaacaggtggtttagatattgcgctcagcggtgctaacgacgctaaagacgcagcacagggtgaattcgacacggcaaaaaacgcagctgaattagctgaaacagcagcaaaggctatcgaagcagcaaaaatcaccgataaggcagttgaggatgcaacagcagcttataaagaagccgcagacaaagcggaacaaactaaaacagcccttgaagcggctgaaaaagctaaagaagacgctgataaactcgtagtcactaacactggcctattgaatgacgctgaccaagcacttgagcagttagtgaccgcccaaaataacgcccaacctacacttgatctgccagccattgatgtgaccattgcgcctgccaagacacaagatgtgattgagggcaccagcgccattgccacccaagtggccggtggcacacaaaatgttgccaagggcggtaaagcgattgatagcgttattaccaaagacggtattgtaaaccttgctgctggtgccaatgccaaagggaccgaggttactaaaggtaccctgaacaacaacggcggggttgataccgatactgttgtcagtactgaaggtaaattggttctgacgggtggtagcgaaacggccatcgcaacctcaaccggtgccaaggttgctgaaggtggtgtagtgaccgcaggtgaccattccgttatcgaaaaaatgatcagtagcggtaacgtgaccgccagcggcaataataccatcgtgcgtgatacgaccattaatgacggtaaattaagcctggcaggcaccgcaaccgccaataacaccacgttcaacggcggtattttcagcgttgaaggtgataccgctgccaccaagactaacatgactggcggtaaatttgcggttacaggcaatgccaagatcgaagagacggtagtcagcgcgggtgacgtctcgctggctgacaaagccaccgcgaacaacaccaccctgactggcggtacttttgccgctgcaggcgataccgcggtgagcgcaactaacatgactggcggtacctttaccgttgcaggtgataccgctgccaccaagactaagatgactggtggtgaatttgctgttacaggcaatgccaagattgaagacaccgtactcaacgcaagtgacttctcgctggctgacaaagccaccgcgaacaacaccaccctgactgacggtactttcaccgttgcaggtgatgccgcggtcaccgcgacgaacatgagtggcggtaaatttgcggttaaaggcaaagccaagatcaaagacacccaactcagtgcaggtaatttcactctggctgaaaatgccacagcgaatgacaccacactgaatggcggtaaatttgacgtttcgaacgaggctacagcgactaacaccaccattaataacggcctgtttacgctgaaagatggcgctcacgcggacagcaccacagtcaatagcggcaccttcgtcatggccgatcaatctacggccaacggcatccaactggtagacagcgccttcacactcgcaagcggtgctaaagcctccggtatcaccaaattaactggcggtcaggcacaggtagccggttcactggaaagcttgagccttaccggtggccgcgcagactttgccaacagcgccaaagcctctggcctgcttgatatcagcgctgatagccagatcataatgaaccgcggtgcagataccgcacaagcgaacctgaacctggctggccgccttgaattgctcgccagtgatgttgctcaagcagtggctcagccagttgcccgtgcggccatggagttatcaaatgcgcgtgcggtaatgccagcccctgcaatgccagtccctgccgccgcaccggttgcacacttcgccctcaacgatgtggttatgaccgggggcactgtcgatatgagcaacgcgaaaaatgctcaactgaccatggcttcactgaatggtacagggaactttaacctcggttctgtcatgcaaagcgattcggtcgcgccattaaatgtatccggtgacgcgaacggtgacttcatcattgcaatgaatagcagcggtcaagcaccaactaacctgaatgtggtaaataccaacggtggtgatgcacgctttgccttagccaatggtccggttgctttaggtaactacatgactaacctggctaaagatgccaacggtaactttgtcctgaccgcagataaatcggctatgacaccaggcactgccggtattctggccgtggctaacaccacaccggttatctttaacgctgagttaagttctattcaacagcgtttggataagcaaagcaccgaaaccaaccaaagcggcatgtggggcagctacctgaacaacaactttgcagtgaaaggccgcgccgctaacttcgatcagaagttgaacgggatgacattgggtggcgataaagccactgcactggcagacggcgtgttgagcgttggtggtttcgccagctacagcagctctgatatcaaaacggattatcaaagcaaaggtaaagtggatagccattcattcggtgcctacgcacaatacctggctaacagcggttactacatgaacgcggtagtgaagaataaccagtttagccaagacgttaacatcacctcaattaacggcagcgccagcggtgtgtctaacttctcgggtatgggtatcgcactgaaagccggtaagcacttcaacttcaatgaggcttacgtctcgccatacgttgcaatgagcgcctttagctcgggtaagagcaacatctccttgtctaacggcatggaagcacagagcagcagcacccgctctgcgatgggtacccttggggtgaatgcaggttaccgcttcgtgatgaacaacggcgcagaactcaagccatacgctatcttcgcggtggatcatgagttcgcgaaaaacaaccaagtgacggtgaatcaggaagtgtttgacaataacttgagcgggacccgtgtgaacaccggcgccggcatgaacgtcaacatcacccctaatctgtctgtcggttctgaagtgaagttgtccagcggtaaagatatcaagacaccagtaaccattaatctgaacgtgggttacagcttctaa

SEQ ID NO: 42268 - DNA, 1455 bp, Yersinia pestis
atgctcagaaaaaataataaacccttctcccttcgagcccgttttcttatggcgacagccggcgttattttagcgctgtcgctatcttatggcatggtcgcggtggtaggttatatcgtcagttttgataaaagcaccttcagagcccatcgtggtgaaagtaatttattcttcagtctggcacagtggcataacaataagctcagcatctctgttccgccagaacttgaactgaacgtccccagcctggtcctgatttacgacaaagatggtaatattttatggcgtcagcgtcatgtccctgagctggagtcgcacattgagaaaagctggctgcaaaagccggggttttatgagctggataccgggacgcacatcagtagaatgatgatgggtgacaacccaaaagctcaagatcagttaaagaaatacgatgacaccgatgatagcgcacttacgcactcagtctccgtcaatacctacgccgcgacctctcgtttacctcaactcaccatcgtggtggtggataccatcccacaagagctacaacgtactgatctagtgtggaactggttcagttatgtcctgctggcgaatttattattagtcattcccttattgtggcttgctgcctattggagcctgcggccaattaaagcactggctagtcaaatcagccagttggaaaaaggtgagcgtgaacaactcgatgaaaacccacctcgtgagttacaaagtttagtccgtaacctcaacatcttgctgatgaacgaacgtcagcgctataccaaatatcgcacgactctggctgacctcactcacagccttaaaacaccgctggcggtgctacaaaccacactacgttctttgcgtaccggtaaacaaacaaccattgaagaagtagagccgattatgctggagcagatcagccgtatctcgcagcaaattggttattacctgcaccgcgcaagtatgcgttccgaacataatgttctaggacgtgaaattcattcggttcccgcgctactcgatagtttgtacagcgcattaaataaagtttatcaacgcaaagggattgcgctgacactggacatctcaccagaggtcacattcttgggagaaaagaatgatttcatggaagttatggggaatgttttagaaaatgcctgcaaatattgccttgagtttgttgaagtcaccaccttacactccgaaaaacaattgaccattgtggtcgatgatgacggccccggtattcctgaaaataagcgccagttaattttccaacgtggtcaacgggttgatactttacgtccggggcaagggcttggtttatctattgcagctgaaattattgaacagtatcaaggtaaaatctccatcaccgaaagccccttagggggagcccgaatgatggtgacgtttggtcagcaacaagattgtcacgatgattaa

SEQ ID NO: 42269 - DNA, 1263 bp, Yersinia pestis
atgactctgcttgcattaggcattaatcacaaaaccgcacctgtatcgttacgtgaacgagtgacgttttcaccggaatcgatggatcaggcgctgaatagcttgctccaacagccgttggtacagggcggtgtcgtgttgtccacgtgcaaccggactgaactgtatctcagtgtggaacagcaagaaaacctacacgaacaattaaccgcctggctgtgtaactatcataaactcagcccggatgacgtgagacaaagcctgtactggcatcatggtaatgacgctgtccgccatttgatgcgggtcgccagtggtttggattcccaagttttgggtgaaccacaaatattaggccaggtgaaaaaagcgtttgctgaatctcagcgcgggcaatctctgtcgagtgaactggaacggttattccagaaatctttttctgtcgccaaacgtgtacgcacagaaactgaaattggagccagtgcggtttcggtcgcttttgctgcctgttctctggctcggcaaattttcgaatcattatcagaactgcatgtattattggtcggggccggtgagacgattgaattggtggcgcgccacctgcgtgaacatcaggtcaaacatatgattattgccaaccgcacccgtgaacgtgcgcaatctctggcaagcgaggtcggtgccgaagtgataacgttgccagaaattgatgctcgtctggcggatgctgatattattatcagttctaccgccagcccgttacctattattggtaagggaatggtcgagcgggcattgaaaacccgtcgtaatcagccaatgttatttattgatattgccgtaccccgtgatatcgaaccggaggtcggtaagttgtcgaacgcctatttatacagtgttgatgatttgcaggcgatcattcagcacaacatggctcagcggcaggctgcggctgttcaggctgaatcgatagtacaacaggaaagcatgaactttatgacctggctgcgggctcagggagcggtagaaacgatccgtgactatcgctctcaagctgagcaggtccgcagtgaaatgaccgctaaagccttggtagccattgagcagggcgctaacgtggaacaggtcattaatgagttggcctataagctgaccaaccgccttattcatgcgcctaccaaatccctccagcaagccgccagcgatggcgatatggagcggttgcaattattacgcgacagccttgggctggatcagcattag

SEQ ID NO: 42270 - DNA, 1083 bp, Yersinia pestis
atgaagtcttctattgttgccaaactggaagcgttacaagagcgccatgaagaagttctggcatatcttggcgatgccagcgttattgccgatcaagaccgtttccgcgcgctatcacgtgaatatgcgcaattgacggatgtcactcgctgttttaaagagtggcgcagcgctcaggatgatatcgaagccgcagaaatgatgctggacgatctcgaaatgcgtgaaatggcacaggaagaattaaaaattgccaaagcgcggagcgaagagctcgagcagcagctacaagtgttgttgttgccaaaagatcctgatgatgaacgtgactgcttcctggaaatccgcgcggggactggcggcgatgaagccgctatttttgccggtgatatgttccgtatgtacagccgttatgccgaaacccgccgctggaaagttgaaatcatgagcgccagcgagggtgagcatggcggttataaagaaattattgccaaaatatctggcgatggcgtcttcggccagttgaagtttgaatccggtggtcaccgggttcagcgtgtacccgaaaccgagtctcaaggccgcatccacacttccgcctgtaccgttgctgtgatgcccgccatcccagaggctgaactgccagaaatcaacgccggtgacttgcgtatagatacgttccgctcgtcaggtgcgggtggtcagcatgttaacaccaccgattcagccatccgtattacacatattcctaccggtatcgtggtggagtgtcaggacgagcgttcgcagcacaaaaacaaagctaaggcaatgtcagtgttaggcgcgcgtattcgtgctgctgaaatgcaaaaacggcaattggcagaggcatcagagcgccgtaacttgttagggaccggtgatcgttctgaccgtaaccgtacttacaacttcccgcaggggcgcgttactgaccatcgtatcaacctgacgctgtatcggcttgatgaagtgatggaaggtaaactggatatgctcatccagcccattgtgcaggaatatcaagctgaccaactgtctgcattgtcagagcaagactaa

SEQ ID NO: 42271 - DNA, 1371 bp, Yersinia pestis
atggaattatcctcactgaccgccgtttcaccaattgatggacgttacggcgacaaagtcagcgcactgcgccccatctttagcgaattcggtttgctaaaattccgtgtgcaggtcgaagtgcgttggctgcaaaaactggcagcctgcgcagaaattaaagaggttcctgcttttgatgccaacgcaaacgcttaccttgataaaattgtgcaagagttcaatgaacaagatgcacaacgcattaagaccatcgaacgcacaaccaatcatgatgtgaaggctgtcgagtattttctgaaagaaaaagtggaaaatctccctgcgttacatgccgtgtctgagttcattcactttgcttgtacttcagaagatatcaataacctgtcccacgcattgatgctgcaaactgctcgccaggatgtcctgctgcccgcatggcggcagattattgactcaataaaagcactggcccaccaatatcgcgatttacccttactgtcccgcacccacggccagcccgcgacaccctcaaccatcggtaaagagctggcgaatgtggcgtaccgcatggaacgtcagttccgccaactaacacaagtggaaattctgggtaaaatcaacggtgcagtaggcaactataacgcccacatcgtggcctaccctgaggttgattggcatcagtttagtgaaagttttgtgacatcgctgggaatcaactggaacccatacaccacgcaaatcgagcctcatgattatattgctgagttatttgactgtgtggcccgtttcaatactattttgatcgattttgaccgtgatatctggggttatattgctctgaatcacttcaagcaaaaaaccatcgcgggcgaaatcggttcaagcaccatgccgcataaagttaatccaattgatttcgaaaactcggaaggcaatttgggtctatcgaatgccgtgctaggtcacatggccagcaaactaccggtttctcgctggcaacgtgatctgaccgactcgaccgtgctacgtaatctgggtgtgggtctgggttatgccctgattgcctatcaggcaaccatgaaaggcatcagcaaactggaagttaacgaagcacatctgttgcaagagcttgatcataattgggaagttctggctgaacctattcaaacgatcatgcgccgttacggtattgaaaaaccgtatgaaaaactgaaagaattgacccgtggcaaacgtgtcgatgccgcaggtatgcaagcatttatcgatgggctggatctaccagaagaagaaaaaaaccggttgaaggccatgacgccagcgaattacattggccgcgccaccaccatggttgatgaattaaagtaa

SEQ ID NO: 42272 - DNA, 1116 bp, Yersinia pestis
atgtcagataatagccagaaaaaagtcatcgtcggcatgtccggcggtgtcgactcttccgtttccgcttacctgctccagcaacagggctatcaagttgctggcctgttcatgaagaattgggaagaggatgatgacgaagaatattgctctgcagcgaccgatctggccgatgcacaagcagtatgtgacaaactgggtatggagttgcacaccgttaattttgcagcagaatactgggataacgttttcgaattgttcctggcagaatataaagctgggcggacacctaatcccgatattctgtgtaataaagagataaaatttaaagcgtttcttgaatttgcagctgaagatttgggcgcagattatatcgccacaggtcattacgtccgtcgccaggatgttgatggtaaaagccgcctactgcgcggccttgatggaaataaagaccaaagctacttcctgtatacattaagtcacgaacagattgctcaaagtttgttccctgtcggtgagttagaaaaacctgaagtgcgtcgcatagcagaacagctcgatttagtcaccgcaaagaaaaaagactcaacgggcatctgctttatcggggagcgcaaattccgtgatttccttggccgctacctgcctgcacagccaggtccgatcatgacggttgacggccaactggtgggtaaacaccaagggttgatgtatcacaccctcgggcaacgcaaaggtttaggtatcgggggtaccaaagaggggggtgatgacccgtggtacgtcgtggataaagacctggacagcaacacgttactggttgctcaggggcacgaacaccctcggttaatgtctgttggcctggttgctcaacagctacattgggtcgatcgccaacccgtgaccgcccctttccgctgtgtcgtaaaaacacgttatcgtcagcaagatattccctgtaccgtaacaccacttgatgacgaacgggttgacgttcggtttgatgacccggttgctgccgtcacgcctggccagtctgccgtcttttaccaaggtgaaatctgcctggggggcggtattattgaacagcgttacccactgactaatccggcataa

SEQ ID NO: 42273 - DNA, 993 bp, Yersinia pestis
atgaccaataagattgactggattgataaccttcgggcggtggcgtgtattatggtggtgatgattcattccaccacttattacgtgacccgtggtgcacaggtaggagaactcaactgggatatcgccaatgtgctgaactcagcttcccgcgcgtgtgtccccttattttttatgatctccggctatctattctttggcgaaaaaagtgctcagaaaaaacactttatgcgtattggactgtgtctgctgttttatagcgtgatcgcactgatctatatttcaacattgaccccaatcgacggctgggcctcgttgagaaatatcctgcaaaaaccggtgttttatcatctctggttcttctacgccattatcgtggtctatctggtctcgccccttattaaggttaaacccgtttcgggccgctatctggcaatattgatcctgttattggctgtcgtcgccaacccgcaaaccagcaagttctcccttgatgatttccgtttgttgcctgctaacctctatatttacggcgatactttctattatttgctgtatgccctgttgggtcgagcgatgggtatgctggaaactcaggggcggatgatcagttggggagcggcattgctgtttgtcgtgagtgtaatatgcattgccatctcaacggaaaaacagacacgaattaatggcagttttgctgatacgttttacatgtattgtagcccgctggtgttcattgcggcggtgtcgctgtgggtttggtttaaaaattgtctgaatcagcacattgcctggctaagtgggctcgccaggcattcactggcaatttatggttttcatgcgctgattatccactttatccgcacgcatcattatgatttcacggcttacccagtgctggatattctgtatgtttttgcactgaccctgggcctaagtacattattatcgatgggattgcagcgtattgatcggcgacggtgggtcagttaa

SEQ ID NO: 42274 - DNA, 537 bp, Yersinia pestis
atgatctggaggttcggttcaatgaaacaccctttttcaacccgcctagcggcggttcaacattacctttcaggaaaggccactctgcgggaaaccgcacgtcaattcagtgttggcaaatcccctcttacgcgttggatccgagcttttcgccgtcaaggtgaggctggactggagcaccatctttccagaacttatactccagaattcaggctttgcgttgtccgctatatgatggcaaacagatgtagcgctgccgatgcttctgctcattttaacattcccaacgagacgattatccaaaactggatgaaacgttatcgagagggaggaaaagaagcgcttaacccatcgaaaacgggtcctactatgccaaaagataaatatgagcacgattcaaaaccgttcagcgagatgacgcatgcggagctagagaaagaacttgagtatctgcgcgcggaaaacgcttatctaaaaaagcggaaagccctgagagaagaaaaggcactcagggagcagcagaaaaaaccagaatag

SEQ ID NO: 42275 - DNA, 786 bp, Yersinia pestis
ttggcacgcagtacatactattatcatgcatcgaaaccggacggtgtaattgatgactatgcagatgcggtaaaagcgattggcgccctaagcagacgacacgcacagcgctacggttatcgccggatgacggtcgcactgagaaaagaagggttcacactgaatcacaaaacggtgcgaaaactgatgaatcagcacgggttactcagcctcattcggcggaaaaaatatcgctcctatagggccgatggtggccgggcatccgataatctattggctcgtaattttacatccgaaatcagtggattgaagtggtgtacagatgtcacagagttccgagttggagcacagaagctgtatttgtcggtgatacaagacctgtttaataatgagattatttcttggcatatgtcagaaagagcagcattaatcctgacgtgcaagacgctggaaaaagcgctgaaagtgaaagggagaaaagaaggcctgatgttgcacagcgatcagggctggcattaccgaacgccgatgtggcgctcaatgcttgtcgaggcggggataaggcaaagtatgtcacgcaaaggcaattgtttagataatgcagtgatggaaaatttcttcagtcacctgaaagccgagatgtatcaccgtaagaagtacgattcagccacagttttaaagcgtgacattgtagaatatatccattattacaatacagagcgcattagcctgaaaacaggcggaatgagtccggcagaataccggactcaggtagaaaagcagtaa

SEQ ID NO: 42276 - DNA, 831 bp, Yersinia pestis
atgaattatcagcattggctgtcgttggcggcagcccgttttacccacagtgacagccctaagcgtgatgctgaaatcctactgagttttgtgacaggtaaggcccggacctatctgttggcttttggtgaaacggaaataacggcagaacaactactgtggctcgaaacactggcgaaccgtcgggagcaaggtgaacccattgcttatctggttggggagcgcgagttctggtctttaccgctgagtgtttcctctgcaacgcttatcccacggcctgacaccgaatgtctggtggagcaggcgctggcacgtttacccgcaatgccttgtcgtattttggacctggggacgggtaccggtgcaatcgcgttggcactggccactgaacggcgtgattgcgcggtcatcgccgtagatatcaacgctgatgctgtcgctttggcccgccataatgcagaaaaactcacgatagataatgtgtgttttttgcaaggcagttggtttgagccagtgagcgggcgttttgcgcttatcgccagtaatcccccttatattgatgccaatgaccctcatcttaatgaaggcgatgtgcgctatgaaccgcatagtgcattggttgcggcggctgaggggatggccgatctggccgcgattgtcagccaggcaccgggctacttggatcccggcggttggctcatgctagagcatggctggcagcaggccaatgcagtgcaagaactgcttaaaaactcgggatttagtgcggtaatgacctgtaaagattatggcaataatgaccgggtgacattggggcaatgggccgtgtaa

SEQ ID NO: 42277 - DNA, 402 bp, Yersinia pestis
atgtgggttgattacatcgccatgaaatatttgcatttactcaccgtggtgatcagcattactctgtttgtactacgtttcttctggaaatgtcgcggctcagcgatgcttgaaaagcgttgggtaaagataacgccgcacatcaatgatacgctgctgtttatcagtggtattgtgctgatattgattactggattctatccattcagtccgcagggaacatggctgactgagaagctgtttggcgttattatctacatcctgcttggctatgttgcattaggtaagcgaactcgcagccagaatattcgctggtttgcctttatactcgcactgggttgcctgtatctaattgtaaaactggcaacaactaaattaccactgctgatgggatatctatga

SEQ ID NO: 42278 - DNA, 954 bp, Yersinia pestis
atgagttttccgcccccatctattgatgataaacatgctattgatgatagcccggctgctgatgataaccataccgccgatgacaactctgccgctgacgagcgtcacgaacaccaccatcatgacgaacatggcgaggatctggaatctttgctgaaactggccgccaccgcgtctattcatcgcacggcgtttttccgcgtgttgttggatgccacggtcttggtactggtaggggattcagagcagggcagtgatgatggcgaaatgagtttcaccaccgctaacggggtgaatattttgcattgggaaaagcaagatggtgagtctgtcattccttttttcacctcggtagaggtcttgcagcaggccttggaacaaactgatggcgagaccatcggcagtgaaaagcagcctttcgtcgcgatgccggtgcgggtgttatttgaaatgacacaaggcgcacatctgtttttgaacccaaaatctgaatatggcaaagagttctggccggaagaagtggcgatgctgttgaagaacggcgggttggtgcaacccgctgaaatggtggtagacaaagagagccaaattttactgggccaacccgaggagtatccctccgcgatggtggatgcactgatccaattatttagtcagcgtaaaccagtgcggcgggcttttctggcgctgatgcatgataaaagtgttgatgaaaaacccaacctgttgattggtttggaagtggatggcaccgctaatgaagtagatcagttgatccaagaggccggtaatgtggccagtgatcacgccccagacggcggcccggtagatttttgcctggtcagtgaaaaagagcgaggggtcagccactatctcaccacccatacgcaggcgttttatcaacgcaaatggggcagttggttgagaaatgttattccttcgacgaaccactga

SEQ ID NO: 42279 - DNA, 855 bp, Yersinia pestis
atgaaacagaaagtggttagcattggcgatatcaacgtagcgaacgacctgcctttcgtgctgtttggtggtatgaatgtgcttgagtcacgcgatctggcgatgcgcatctgcgagcattacgtgacggtgactcaaaagctcggcatcccttacgtatttaaagcctcgttcgacaaagccaaccgttcttcaattcattcttaccgcggcccaggcctggaagaagggatgaaaatctttcaagagctgaagcaacagtttggcgttaaagtgatcaccgatgtgcatgaagccagccaggcacagccagtatctgaagtggttgatgttatccagttgcctgcattcttggcgcgtcaaacagatttggtcgaggcgatggcccgtaccggtgctgtcatcaacgtgaaaaaacctcagttcgttagccccggtcagatgggcaatatcgttgagaaatttaaagaagcgggtaacgaccaggtgatcctctgtgatcgcggcagtaactttggttatgacaatctggtggttgatatgttgggtatcaatgtaatggtacaagcaacaggcggtcacccggttattttcgatgtgactcatgcgttacaatgccgtgacccgtttggcgcggcatctggtggccgtcgtgctcaggtcgctgaactggcccgcgcaggtatggcggttggtttggcagggctatttatcgaagcacatccagagccgaatagcgcgaaatgtgatggtccatcagcactaccactggataagttggagccattcttagtgcagatgaaggctatcgatgatttggtgaagagtttccctgcgctggataccagtaagtaa

SEQ ID NO: 42280 - DNA, 954 bp, Yersinia pestis
atgcaaaaccgtttgaccattaaagatattgcccgcatgagtggtgttggaaaatccacagtttcacgggtattaaataatgaaggcagcgtcagcccacagacccgtgaacgggtcgaggcggtgatccgccagcacggttttaccccctccaaatcggcccgagccatgcgtgggcaaagcgacaaagttgttggcatcattgtctctcgtctcgattcgccatccgagaaccaggcagtacgtactatgttaccgctgttctatcaacaaggttacgacccgatcctgatggagagccaatttgataccacattggttagcgagcatttacatattctgcaacaacgccatgttgatggcgtgatcctgttcggtttcagcggattaactgcagaaatgctggcaccgtggcaggaaaaaatggtggtgctggcgcgcgagtaccgtggtttttcttctgtctgctatgacgatgaaggtgccatatacctcttgatggacaaattacgccaagccgggcaccgccatatcagttatatcggcgtacaatcttccgatgcaaccaccggtatgcgccgctatcaagcctatctcgattacagtcaacagcatggcctgacacccatggtggcgctgggggagttgagctatcagagtggctttcagctcgctcctcaggtgataaccccacaaacctcggcattggtttgtgcctctgacactatcgccatgggcgtcagtaaatacttgcaacagcaggagcgggagcagccccccattcaggtatgcggtattggtaatacaccgctgttacactttttgtttcccgataccttaaccattgagctgggttatggccgtgcaggtgtgaaagccgcgcagcaattactggaccaactgagtaatagccaacctattcagcaaattattattccgggccaactcgtctga

SEQ ID NO: 42281 - DNA, 930 bp, Yersinia pestis
atgagtattcgtattgtccctaaagaccaattaggtaaacaacgcgaaaaaggtacaacggcggggaatatcccgccgttacttttcgcaaatttaaaaagtttgtatacccgacgcactgaacgtttgcagcagttggcgctggacaatccgctggccgattatctggattttgcggccaaaattactgaagcccagcaaaaagcactgcatgaccatccgttggtcttggatatgcaagccgagttggtgcaatcagcggccagtggcaagccccccttggacgggagtgtttttccgcgtaccgaacattggcgcaagctgctatccgcgctgattgccgaattgcgtcacgatgctcccgaccacattttggcggtgctggataatctcgataaagcatcggttcatgagctagagttgtacgctgatgccttgctaaaccgagatttttctcaagtcggtagtgagaaagccccgtttatctgggccgctttatcgctctactgggcgcagatggccagccaaatccctggcaaagcacgggctgaatacggtgaacaccgtcagttctgcccggtgtgtggcagcattccggtttccagtgtggtacatatcggcacccataatggcttgcgttatttgcactgtaatttgtgtgaaagcgaatggcatgtcgtgcgaattaaatgcagtaactgtgagcaaacccgtgatcttaactattggtcgttggacagcgagttggccgcagtaaaagcagaaagttgcggtgattgtggtacttacctaaaaattctttatcaggaaaaagacccgcaggtggaagcggtcgctgatgatttggcctcattgatccttgatgccaagatggaaggtgaagggttcgcccgcagcagtattaatccatttttgttcccaggtgagtaa

SEQ ID NO: 42282 - DNA, 675 bp, Yersinia pestis
atgaaaaaagaaaaaccgatccagcgctacagcgcgccggagcgcattaaccactggatagttgccttctgctttatattggcggctatcagtggattagggttcttcttcccttcatttaactggctgatgaatatttttggtacaccacagatggcgcgcattcttcacccctttgccggggtggtgatgttcgcggcctttttgatcatgtttttccgctactggaaacataacctgatcaataaagacgacttggagtgggccaagaatatccataaaatcgccatgaatgaggaagtgggtgacacagggcgctataatttcggccaaaaatgcgtattctgggctgctattatcagtctggtgctactgttagtcagtggcgtggtgatttggcggccttactttgcgtcatccttccctatcccgctgatccgtctggcactactggtgcattcgctggcggcggttgggttgattatcgtgattatggtgcatgtgtatgcggccctgtgggtgaaggggacgattaccgcgatggtggagggctgggtacctgcagcatgggctaaaaagcaccatccgcgttggtatcgtgaagtccgcagtaaagatgatgctcgcgccaacgctaaaggccagccgcaagagaaacagaaagagaaaccctga

SEQ ID NO: 42283 - DNA, 495 bp, Yersinia pestis
atgagactgacatccaaaggccgctatgccgtaaccgccatgcttgatgtggcattacattcccaggacgggcccgttcctctggcagatatttcggaacgtcaggggatctcgttatcctatctggaacaacttttttcacgcctacgtaaaaatggcttagtcgccagcgtacgcggcccaggcggtggttatctgctgggcaaagatgcatcagcaatcgcggttggcgcggttatcactgccgttgacgaatccgttgatgcaacccgttgtcagggtaaagaaggctgtcagggcggaaatcgctgcctgacacataccctgtggcgtgatttgagcgagcgtatcagcagcttcctcaacaatattacattggcagaactggttaataaccaagatatcctagaggtagcggatcgtcagaataacgatacgcgccgcacggctaatggccgaccgcaagagacgattaacgtcaatctgcgcgcataa

SEQ ID NO: 42284 - DNA, 315 bp, Yersinia pestis
gtccgctatatgatggcaaacagatgtagcgctgccgatgcttctgctcattttaacattcccaacgagacgattatccaaaactggatgaaacgttatcgagagggaggaaaagaagcgcttaacccatcgaaaacgggtcctactatgccaaaagataaatatgagcacgattcaaaaccgttcagcgagatgacgcatgcggagctagagaaagaacttgagtatctgcgcgcggaaaacgcttatctaaaaaagcggaaagccctgagagaagaaaaggcactcagggagcagcagaaaaaaccagaatag

SEQ ID NO: 42285 - DNA, 786 bp, Yersinia pestis; identical to SEQ ID NO: 42275

SEQ ID NO: 42286 - DNA, 1023 bp, Yersinia pestis
atgtcagtagttattgctccgattccacggcccaaacagcgacattggctgatcaatttatggcctctattgttgttcttactcatattggctagcgctgggtatgtctcctggctttattggccagaattgctgtttaaaacagtagcctggcaaaaaagtgtgcatcagcaaatggcccaactgttgcagcaagttaaagtcgaaccgcatcaggcggggtgggtgctgatgttgtttagcctgatttatggcgtgttacatgctgtagggccgggccacggtaaagtggtgattgtgacgtatctggcaacccacccggcgcggttaaaaagcagcctgaaactgacttttgccgcttcaatattgcaaggtagcgtagcgattctactggtaactttgttacttggggtatggcagctctcttcacggtatctgcatcaaagcagtttttggctagaaaaaggcagttttctattggttattgggttggggatgttgctctgtttccgggcggtaaagcggatctatcgacaaattaacgccttaaaaccacagaaaatgacttttcagcagattcagccattaccggctaaccatgtgcacagcgacaactgcggctgtgggcaccgtcatctgcccagtgataaagagctacaagccggtggcgattggcgcacccgtttgacgattgtattggcgatggggatgcgcccttgctccggtgcgattatggtgttgctgttttccaaggtgattggcgtttactggtgggggattttgtcggcgatggcgatggctttagggacgtcgctgactatctcgctgttggcactgttcgtccattatgcacggcgcttggcggtatatttaagccgtaaacgcgcccctgccgcttggggagagattgcctgggccacgctggcattaaccgggggaattattctgctgttcgcgggggttctgttttatttgtccagtcagccggagatggttggggctgttcgtccatttggtcgctga

SEQ ID NO: 42287 - DNA, 555 bp, Yersinia pestis
atgattgaaaaaaaacaagcatttgagaatcgggttcttgaacatttgaacgctgggaagaccgtgcgcagcttcttgatggcggcagtcgatttattggctgaagcactgaatatactcgtggtgcagatttttcgtaaagatgactatgcggtgaagtatgccgtggagccgttattggtcggtgacgggccattgagtgaactctctgtgcggttgaagctggtttatgcccttggggtgatcacccggcatgaatatgaagatgctgagctattaatggcgctacgtgaagagctaaaccacgatggcactgagtatcgctttaccgatgacgaaatcctcgggccatttggtgaattgcattgtgtcgatgaattaccgccagtacccacttttttacgccctgatgaagccgatgcttcgctgattgctatgcaacgccagcgttatcagcaaatggtccgctccaccatggtgttgtcgatcactgaactgctctctcgcatcagcgtcaaacaggtctctaagctctcgccattaagtcaaggttaa

SEQ ID NO: 42288 - DNA, 1164 bp, Yersinia pestis
atgaaagcattacattttggcgcagggaatattggccgtggcttcatcggcaaactgctcgcggatgccggtgcgcaactgaccttcgccgatgtgaatcaaccgttgttggatgaactgaataaacgtaaacgttatcaggtcaatgtggtcggtgaacaggctcgggttgaagaggtaaagaatgtcagtgcggtaaacagcggtagcccggaagtggttgcgctgattgctgaggccgatattgtcaccaccgctgttggcccacaaattttggccagaattgcggcgacagtggcacagggtctgatcactcgacatcagcaagggaatacccgcccactgaatattattgcctgcgaaaatatggtgcgtggcactagccaattaaaacaacatgtgtttgctgccttatcagaagacgaacaaatatgggtagagcagcatgtgggttttgtggattcggcagtcgatcgtattgtcccaccatcagaagcgggcagtactgatatcctggctgtcacggtagaaacctttagcgaatggatagtcgacggtacccaatttaaaggccagccacccgaaatcgtgggtatggaattgaccgataatctcatggcttttgtcgagcgtaagctcttcacgttgaacaccgggcatgctattaccgcgtatctgggccaactggcaggccatcaaacgatccgcgatgcgattctcgacccggcggtacgtcaaacagtaaaaggtgcgatggaagagagcggtgcggtactgattaagcgttatgctttcgacccacagaaacatgcggcttatatcaacaaaattctctctcgttttgaaaacccttatttgcacgatgatgtcgagcgggttggccgtcaaccactgcgtaagctgagcgccggtgatcgtttgatcaaaccgctgctaggcacgctggagtatcaattgccgcacgattctctggtaacgggtattgccgccgccatgagctatcgcagtgagcaagatccacaggcccaagagttggtgacgttattggcacaattagggccgaaagctgcgttagcgcaaatttcaggcttgcctgctgatagtgaggttgtcgaacaggcggtgagtgtgtataacgccatgcagcagaagctggcgcactga

SEQ ID NO: 42289 - DNA, 1272 bp, Yersinia pestis
atgattactctgcgcaagttaccaatagcactggctgttgccgctggtgtcctctccactcaggccatggcggttgatttccatggttatgcgcgttccgggattggctggacggcaagcggtggtgaacaacaatgtttccaaactacaggtgctcaaagtaaataccgtctgggcaacgagtgtgaaacctatgcggaacttaaattaggccaggaattgtggaaagaaggcgataagagcttctatctcgataccaacgtcgcctattccgtttcacagcgtgatgactgggaatccactgatccggctttccgtgaagccaatgtgcagggtaaaaacctgatcgaatcattaccgggctccactatctgggccggtaagcgtttctatcaacgtcatgacgtccatatgattgacttctactactgggatatttcaggcccaggtgccggtcttgaaactatcgatctgggctttggtaagttatcggttgctgcaacccgtaactcagaatcgggtggctcaagcgcttggatcgataaccaacgtgaaaatgcaaaatatacgattaacaacgtatacgacgtgcgtttggccggtttagaaactaaccccggcggttcattggagttaggtgttgattatggccgcgccgatactcaagaaggttactcgttagcaccaaatgcctctaaagatggtgtgatgttgaccgctgagcatacccaaagcctgatgggtggcttcaacaagttcgtggtgcaatatgctaccgactcgatgacgtcctataacaccggtcactcgcaaggtacgtcagtaaataataatggccacttattgcgtgttattgaccacggtgccatcaatctggctgagaagtgggacatgatgtatgtcgcgttataccaagatattgatttggataacaataacggcaacacatggtacagcgtaggtgtacgtccgatgtacaaatggacacctatcatgagtacgttgctggaagcaggctacgacaacgttaaatcacaacataccggtgagcgtaacggtcaatacaaactgactctggcccaacaatggcaggcaggtgatagcatttggtcacgtccggcaattcgtgtcttcgcaacttatgccaactgggatgagaagtggggctatagcgatacaaccggcgtagcacaagacggcactattggtaccaacagccgtggtaagaacaatgaagtcaccttcggtgcgcaattcgaagcctggtggtaa

SEQ ID NO: 42290 - DNA, 1110 bp, Yersinia pestis
atggctaatgtaacgctgagcagcgtttataaggcctttggtgaggctgtgatttccagagacatcaacctggagatcgatgacggtgagtttgtggtgtttgttggcccatcaggttgcgggaaatcgacgctgctacggatgattgccggtcttgaggacattacctcgggtgaattgttgattggtggcaaacgcatgaatgaagtgccgccctctgagcgcggcattggcatggtgtttcaatcctatgcactttatccccacttatcagtggcagaaaacatgtccttcggcctgaaattggcgggggtaaagaaagcagaaatttaccagcgggtgaatcaggtcgcagaggtgctgcaactggctcacttgttggaccgacggccaaaagccttatccggtggccagcgtcagcgggtggcgattggtcgtaccttggtctccgagccagatgttttcctgttggatgaaccgctttccaacctggatgccgcattgcgggtgcagatgcgaatcgagatttctcgtctgcataagcgcttggaacgcaccatgatctacgtcacccatgaccaagtggaagccatgacgctggccgacaaaattgtggtgttggacgccggcaatatcgctcaggtcggtaagccgctggagctgtatcactacccagccaaccgctttgtcgcgggctttatcggctcgccaaaaatgaatttcttaccggttaaagtcacggccgctgaacctcgtcaagtacagatcgaactccctaaccatcagcgggtatggctgccggtggaaggcgatcaggttcaggtcggcgccaatatgtctttggggatccgcccagaacatctgctgccaagtagcgcctctgaagtcacgttggaaggcgagattcaggtggtagagcagttgggtaatgagactcaaattcatatccaaatcccagcaatacgccagaacctggtctaccgccagaacgacgtggtgttggtagaagaaggtgcaacattctccatcggtctgccaccgcatcggtgtcacctcttccgtgaggatggcactgcatgtaagcggctgtaccaagaactgggcgtctag

SEQ ID NO: 42291 - DNA, 1254 bp, Yersinia pestis
atgttaaagcgtgaaatgaacattgccgattacgatgcagatctgtggcgtgcaatggagcaagaagtcgtgcgtcaggaagaacacatcgaactgattgcgtctgagaactacaccagcccgcgtgttatgcaagcgcagggatctcagttaacgaacaaatatgctgaaggctatccaggcaagcgttattacggtggctgtgaatatgttgatgttgttgaacaattggcaatcgatcgcgctaaagcattatttggtgctgattacgcaaacgttcaacctcattctggttcgcaagctaacgttgctgtttactccgcgctgctgaaacccggtgacaccgtattggggatgaatctggcacacggcggtcacttgacgcatggttcaccagtgaacttctccggcaaactctacaacatcgtcccttatggtattgatgagtcgggtcaaattgattatgaagatctggcacgtcaggcagaaatacataaacccaaaatgattatcggtggcttctccgcctattctggtatcgttgattgggcaaaaatgcgtgaaattgccgacagcattgacgcatggttctttgttgatatggctcatgttgctggtctggttgctgcgggggtttatcctaacccggttccacatgcccacatcgttaccaccacgacgcacaagactctggctggcccacgtggcggtttgattctggcgaaagggggcgatgaagacttgtacaaaaaactgaactcttctgttttccctggtaaccagggtggcccattgatgcatgttatcgcaggtaaagcggtcgcgctgaaagaagcaatggaacctgagtttaaaatttaccaacagcaagtggctaaaaatgcgaaagccatggtggcggtgttcttggagcgcggttacaaagtggtttctggtggtacggataaccacctgttcttgctagatttggtggataaagacatcaccggtaaagacgctgatgcggctttaggccgtgcgaatatcaccgtgaacaaaaacagcgtacctaacgatccgaagagcccgtttgtgacatctggtgtgcgtattggtagcccagcgatcacccgccgtggcttcaaagaagcggaatcccgtgaattggctggctggatgtgtgatgtgttagataacatcaacgatgaagcgaccattgagcgtgtgaaacagaaagttctggctatctgcgctcgtttaccggtttacgcataa

SEQ ID NO: 42292 - DNA, 1212 bp, Yersinia pestis
atgactcgcagcttcacgaaatccggcattggtaagaccgcacgtgttttggctctttcggcgttaaccacgctggtgctctcttcctctgcttttgccaaaattgaagaaggtaaactggttatctggatcaatggcgataaaggttataacggattggcagaggtcggtaagaaatttgagaaagataccggcatcaaagtgaccatcgagcatccagataaattggaagaaaaattcccacaagtcgccgcaaccggtgatggcccggacattatcttctgggcccatgaccgttttggtggctatgcacaatcaggtttactggctgaactgaccccatcgaaagccttccaggaaaaattgttcccattcacttgggatgccgttcgctttaatggcaagctgattggttaccctgttgcagtcgaagcgctgtcactgatttacaacaaagatctggtgaaagaagcaccaaaaacgtgggaagagatccctgcactggataaaacactgcgtgctaatggcaaaagcgccattatgtggaacctacaagaaccgtacttcacttggcccgttatcgccgctgatggcggttatgcattcaagtttgaaaacggggtttatgatgcgaagaacgtgggcgtaaataatgcgggcgcccaagctggcctacaatttattgtcgatctcgttaagaataagcacatcaatgccgatactgattactccatcgcagaagcagcctttaataaaggtgaaaccgcgatgaccattaatggcccatgggcatggtccaatatcgataagagtaaaattaattacggcgtaaccctgctgccaaccttccatggccagccatctaaaccctttgtcggtgtactgaccgccggtattaacgcagcgagtccaaataaagaactggcaacggaattcctggaaaactatctgatcaccgaccaaggcctggctgaggtcaacaaagataaaccactgggtgccgtagcgctgaaatcattccaggagcaactggcaaaagatccgcggattgcagcaacaatggataacgccaccaacggcgaaatcatgccaaacattccgcaaatggcagccttctggtatgccacccgtagtgcggtactgaacgccatcactgggcgtcaaaccgttgaagcggcactgaacgatgcggcaacccgtatcacgaagtaa

SEQ ID NO: 42293 - DNA, 315 bp, Yersinia pestis
atgatacgtaaagcgtttgttatggcagtaaatccggatgcccatgctgaatatcagcgacggcacacgccaatctggccagagctggaaagcgtgctgaaagcgcatggcgctcaccactattccattttccttgatgagactcgcaatttactgtttggcgttgtcgaaattgaatcagaagaacgctggaatgcggtggctcaaaccgccgagtgtcaacgctggtggcaacatatggctgatgtcatgccaagccacccggataacagccctgtgagtcaggctctgcgcgaagtattttatctggaatga

SEQ ID NO: 42294 - DNA, 564 bp, Yersinia pestis
atgaaaaaattaatgtggggcgctgctgcccttgtggttaccgccacactggttggctgtaaccaactgactcagtacacactcagcgagcaggaacttaacgaatacctgcaaaaacataataattatgaaaaacagatcggtattccgggtctggttgatgccaatatcaccctgacacagttacagagccaaattggtcgggccgaacctggtaaagtgacattaaccggtaacgctaaagttgatatctcctccattcttggtccacaaacagccgatatgacgctgacattaaaagcacagccaacctttgatcgtgagaaaggggctatttacctgaaagatatggagttaactgattatactgtcaagccagagaagatggactccgtgatgaaggcgttgacaccttacctgaaccaatcgctgaaatcgtattttaatcagcaaccggcttatgtgctggatggcgaaaagagtaaggcggaagccatggcgaaaaaactggcgaaagggttagaagttaaaccgggccaattagtcatcccattgactgactaa

SEQ ID NO: 42295 - DNA, 1623 bp, Yersinia pestis
atgagcagatcactttccattgcgttagcccagttgaattggctggtcggcgatattgaaggcaacactgaacgtatgttgcaaaccctaaatgagcagcagaaggcgggtgccgatctggtcatgttctccgagctggctttgtccggttatccaccggaagatcttctgtaccgtgatgacttttatcaacgttgtgaagtgcaacttgagcgtttgcaagcggcaaccccgcatattgccgtgctggtgggccacccatggcgggaaggggataagctgtataatgcactgtcgctgtttgcacaaggtaaactgctggggcgctattttaaacaacaactgcctaattacggcgtatttgatgaaaaacgctatttctccgcaggtcatcaaagctgtgtcgttgagctgaaaggctaccgcctgggtctactgatttgtgaagacttatggcttgatggtccgatagatgcagtgaaagccgcgggcgcagaagtggtattgtcgatcaatgcctctccttataatcgtgaaaaaccctatattcgtaaaacgctgatggccgctcattgccagcgtacgggcttaccactggtgtatctcaaccagattggtgggcaggatgagctgatttttgatggctgctccaaagtcttcgatgcggcgggtaacatgacccatcgtttggctgcatttgcagagcaaaccacgctgttgcagttaaatgagtgtaacgtgatcccgatgacggcacctgtggcggaactgcctcctctggctcaagtctatgaagccttggtattggcggtacgtgactacgtcaccaagaatggctttaatggggcagtgctgggtttatctggcggcattgactcagcattgacattggccattgcggttgatgcgttgggcaaagacaaggttcaggcattgatgatgccattccgctataccgcagatatcagtattgctgatgccaaagaagaagctgaaatactgggtgtcaaatttgatgtgatgtctatcgaacccatgtttgatgcttttatgggccagttggcaccgatgtttgccgataccgggcgcgataccacggaggagaaccttcaggctcgttgccgtggcgtggttctgatggctttatcgaataaacgccgcagtattgtattaactacgggtaacaaaagtgaaatggccgtgggctacgcgacgctgtacggtgatatggcggggggctttgatgtcctgaaagatgtaccgaagacgttagtattcaaattagcggaataccgtaatacggtctcttatgtgatcccgcagcgcgtgatcacgcgtccgccttcagccgaattggcacctgatcagaaagatgaagatagcctgcctccttatgatattttggacgctatccttgaaggatatgttgaacaggataagtcagtggctgagctggtggctgacggttttgatgaagctatcgtgcgtaaagtcatccgcctggtcgacattaatgaatataaacgccgccagtcagctgtagggccacgtattaccgcccgcagttttggtaaagatagacgctatccgatcacatcaggctttggccgcaagaattggtaa

SEQ ID NO: 42296 - DNA, 1647 bp, Yersinia pestis
atgaaaaatatcaatcctagtcaaaccgctgcctggaaagcgttacagcaacactttgaacagatgaaagatgtcacaatcagcagtctgtttgccaaggacgaccagcgttttaaccggttctctgcgacttttgacgatcaaatgctggtggatttctcaaaaaaccgtattaccagcgaaaccttggaaaaattgcaggatctggcgaaagagaccgatctggctggtgcaataaaatccatgttttctggtgagaaaattaaccgcacagaagaccgtgcggtattgcatattgctctgcgtaaccgcagtaacaccccaattgtggtggatggcaaagatgtgatgccagaagtgaatgcggttctggccaaaatgaaacagttctgtgaccgtgtgattagcggtgactggaaaggctataccggcaaagcgattaccgatgtagtcaatattggtatcggggggtcagacctcggcccttacatggtgaccgaagcgttacgtccgtataaaaatcacctgaatatgcattttgtttctaacgtcgatggcactcatattgccgaagcgttgaaacccctgaacccggaaaccacgctgttcctggtggcatcaaaaaccttcaccacgcaagaaaccatgaccaacgctcacagcgcgcgtgattggttcctgtctgccgccggtgacccggcgcacgttgccaagcactttgcggctttatcgaccaatgccaaagccgttggtgagtttggtattgataccaataatatgtttgagttctgggattgggttggtggccgttactcgctatggtctgctattggtttatctatcgccttgtcggttggttttgaacacttcgaacaactgctcagtggcgcacatgccatggataagcattttgccgaaacaccggcagagaagaacctgcctgtcctgttggcactgattggtatctggtacaacaacttctttggtgcagaaacggaagctatcctgccttacgaccaatatatgcaccgtttcccggcttacttccagcagggtaacatggagtcgaatggtaaatatgttgatcgtaacggtcatccggttgattaccaaacgggcccgattatctggggcgagccgggtactaacggccagcatgcgttttatcagttgattcaccaaggtaccaaactgatcccgtgtgattttatcgcaccggcgatcagccataacccattaagcgatcaccacgcgaagctgttgtctaacttctttgcacagacagaagcattggctttcggtaaatccctggaagacgttgaagcggagtttgcggcggcgggtaaaacccctgaacaagtcgcgcacgtagcgccgttcaaagtcttcgagggtaaccgcccaactaactccattttgctgcgcgaaattaccccgttcagtttgggggcgctgattgccttgtatgaacacaaaatcttcacccaaggggttattctgaatatctacaccttcgaccaatggggtgtcgaactgggtaaacaactggctaaccgtatcctgccagaactggcagatgaccaagaagtgaccagtcatgacagttcaaccaatgcgttgattaaccgtttcaagaactggcgttaa

SEQ ID NO: 42297 - DNA, 1257 bp, Yersinia pestis
atgacgaactctattgaacaggcctgggatctggctaaacagcgttttgccgctgtcggcgttgatgttgatgccgcactcacccgtcttgatacgctaccggtctccatgcactgctggcaaggcgatgatgtcaccggttttgaggatcccgatggcgtattgaccggcggaattcaggcaacaggaaactatcccggcaaagcgcgcaatgcgaccgagttgcgttctgaccttgaattggctttggcattaattcctggccctaagcgcctcaatttacatgctatttatctggaatctgacacgccggttgcgcgcaataaaattgagccgcgccactttagccactgggttgcatgggccaaaaaacaccagttggggctggattttaacccctcttgcttctctcacccactcagcgctgacggctttaccttgtctcatgctgatccggaaatccgccagttctggattgaacactgtcaggcgagtcgccgggtttctgcctattttggtgaacagttaggaacgccgtcggtcatgaatatctggatccccgatggcatgaaagacacaccgattgatcgccttgccccccgtcagcgcctgctatcggctctggatgaagtcatcagcgagaagttaaacccggctcaccatattgatgcggttgagagcaaattgtttggtattggtgctgaaagttacaccgtaggctctaacgagttttatatgggttatgccgccagccgccaaacggcgctgtgtctggatgcgggtcacttccatccaaccgaggtgatttccgacaaaatatccagcgccatgctgtatgtcccacgcctgctattgcatgtcagccgtccggttcgctgggacagtgaccatgtggtgttactggatgatgaaacccaagccatcgccagcgaaattattcgtcacaacctgtttgatcgggttcacatcggcctcgacttctttgatgcctccattaaccggattgccgcttgggttattggcacccgcaacatgaaaaaggccctgttacgcgccttactggagccgaccgacaggctacgtcaactggaattacgcggtgattacactgcacggctggcgctgctggaagaacaaaaatccctgccatggcaagccatctgggaaggttactgccagcgcaatgacgtaccggttgatgcccgctggcttgacgcagtacgtgaatatgaacaacagattctcagccaacgttaa

SEQ ID NO: 42298 - DNA, 2070 bp, Yersinia pestis
atgactcaacagactttcctggtggaaatcggcacggaagagctgccgccgaaggctcttcgttctctggccgaatcttttgccgctaattttacggctgaactggataacgctaatttgtctcacggtgaggtgagttggtacgccgcgccgcgccgtctggcagtaaaagtggccaatttaagtgcggctcaggctgatcgtgaagtcgaaaagcgcggcccggccattgcgcaagcgtttgatgctgaaggtaaacctagcaaagccgctgaaggttgggcgcgtggttgtggtattacagtcgatcaggcggagcgtctggtgacggataaaggcgagtggctgctgtaccgtgcccatgtcaaagggcaacccgcccagttattgctggcaggcatggttaatactgcgctgagtaagttgccaattccaaagctgatgcgttggggtgataaagaaactcaattcgtccgtccggtgcataccgtgaccctgctcttggggactgaagttattcctggcaccgtgctgggtatcaattcagatcgggtgatccgtggccatcgctttatgggtgaagcggaattcacgatcgacagtgctgaccaatatccacagattctgctggagcgtggcaaggtcattgctgattatgaattgcgtaaatcaatcattaagcgtgatgcagaacaggcagcgcaacagattggcggtgttgctgatctgagtgaaagcctgctagaggaagtggcgtcattggtggagtggccggtggtgctcaccgccaagtttgaagagaaattcctggctgtccctgcggaagcgctggtgtacaccatgaagggtgatcagaagtatttcccggtttacgatactgccggccacttgatgccacacttcatttttgtcgccaacattgagtctaaagaccctcaacaaatcatttctggcaatgagaaggtggttcgccctcgtttggctgatgctgagttcttctttaagaccgaccgcaaaaaacggttggaagataatttaccgcgtctggaaaccgtgctgttccaacagcaactgggtaccctgcgtgataaaacagatcgtattcaggcgttggcgggttgggttgccgcacaaattggcgctgatgttaatcacgccacccgtgcgggtctgttgtccaagtgtgacctgatgaccaacatggtattcgaattcaccgatacccaaggcgtgatggggatgcactacgcccgccacgatggtgaggctgaagacgttgccgttgcattgaatgaacaatatcagccacgctttgccggtgatgatttgccgtctaacccggtcgcttgtgcgctggccattgccgataagatggacacactggcgggtatcttcggtatcggtcaacatccgaaaggcgataaagatccgtttgctctgcgccgtgcggcgttgggtgtactgcgcattatcgtcgaaaagaatttgtcactggatctgcaaacactgacggaagaggcggtgcgcctgtacggcagtaagctgaccaatgcgaaagtggtcgatgacgtgattgaattcatgctgggccgtttccgtgcctggtatcaggatgaaggtcatagcgtcgataccattcaggcggtcttggctcgtcgtccgaccaaaccggctgattttgatgcgcgagtgaaagcggtgacctatttccgcacactggatgctgctgccgcattggctgctgccaacaaacgtgtatcaaacattctggcaaaatccacggataccctgaatgaccatgttcatgcttcgatcttaaaagaaccggcagagctaaaactggcgacacatttggtggtattacgcgatcaactggagccggttttcgcggctggtcagtataaagaggcgctggttgaattagctgcgttgcgggaaactgtcgatgagttcttcgagagcgtgatggtgatggctgaagacgatgctgtgcgggttaaccgtctgacattgctgagcaaactccgcgaactgttcttgcaggttgctgatatttcgctgttgcaataa

SEQ ID NO: 42299 - DNA, 915 bp, Yersinia pestis
atgcaaaagtttgataccaagacctttcagggcctgatcctgacgttacaggactattgggcgcgccaaggctgcaccattgttcaaccactggacatggaagtcggcgcgggtacctcccacccaatgacctgcctgcgcgcaattggcccagagccaatcgctgctgcttatgtacaaccctcacgccgcccgaccgatggtcgctacggtgagaatccaaatcgcctacaacactattatcagttccaggtgatcattaagccttcgccagacaacattcaggagctgtatttaggctcgctgaaagagttaggtctggacccgaccatccacgatattcgtttcgttgaagataactgggagaacccaacactgggtgcttggggtctgggttgggaagtgtggctaaacggtatggaagtcacgcagtttacttacttccagcaagtgggggggttggaatgcaaacccgtcaccggcgagatcacttatggtctggagcgtttggcgatgtacattcagggcgtagacagcgtttatgacctgatatggtgcgacggcccgctggggaccaccacttacggcgatatttatcatcagaatgaagtggagcaatccacctataatttcgaatacgccgatgtcgatttcctgttctcctgctttgagcagtacgagaaagaagcgcagtccctactggcgctggaaaccccactgccgctgcctgcttacgaacgtattctgaaagcgggtcatacgtttaacctgctggacgcccgtaaagccatctcggttaccgagcgccaacgctatattctgcgcatccgtacgctgaccaaagctgtcgccgaggcatattatgcctcccgcgaggcattgggcttccctatgtgcaaaaagaatcagaactaa

SEQ ID NO: 42300 - DNA, 1452 bp, Yersinia pestis
gtgataggtaatgagatgatttcgttgaaaagatggcgtttattcccccgttctttacgtcaattagtccttatggcatttctattggtgctgctacctttattggtgctggcatatcaggcctatcaaagtctggaccatctgagtactcaagccgccgatattaaccgtacaacgcttgcagatgctcgccgtagcgaggccatgaccagtgtcgcgcttgagatggagcgtagctatcgtcaatattgtgtgttggatgatgcaacactggcgacgttatatcagcatcagcgtaagcaatatactcaaatgctcgtggcccacgcccctatactcccggatgcccgctattaccagacgctgcaaggattgttgaatcagcttactgatattaaatgtaaaaacagcggccctgacaaagaagcatccattttattagagcagttctctcgctcaaatgccgaaatggtacaagcgactcgcgatgttattttttctcgtggtcaacagttacagaaagatatcgccgaacgtgggcaatttttcggctggcagtcccttttactgtttctggtcagtgtgctgctggtggttctttttacccgcatgatcatcggccccgtcaaaggcattgagagaatgattaaccgccttggcgaagggcgttctctgggcaatacggcgctgtttaaagggcctcgagaattacgctcattggcacagcgtatcatttggcttagtgaacgtttagcctggctagagtcacagcgccatgaatttttacgccatatctcccatgaattaaaaacgcccctcgccagtatgcgtgaagggacggagctcttggccgatgaggttgccgggccattaacacaagatcaacaagaggtggtggcgatccttgatcacagtagccgccatttgcagcaattgattgagcaattactggactataaccgtaagttagctgatggccccggcgaacctgaacatgttgatctggccgaaatggtcgggaatgtgatttctgcccacagtttacctgcgcgcgcgaagatgattcgtaccgagactgagctcgatgcgcgcatttgttgggcagagcctacattattaatgcgggtattggataatctctactccaatgcggtgcactatggtgaggaatccggtaccatttggatttgtagccgtcaggtgaatgatcgggtacaaattgatgttgcgaataccggggcaccaatcccaacttcagaagaaataatgatatttgagccttttttccaaggaagtcatcagcgaaaaggggctgtcaaaggtagcgggcttgggctgagcattgctcaggattgtatccggcgtatgcaaggtgatttgcaactggtaaccgttgactacgccgccgtctgcttccgtattgaattgccattaaccgccgagaatgaatga

SEQ ID NO: 42301 - DNA, 1611 bp, Yersinia pestis
atgaaacacaacttaaatgcacatgaagcccgtgttatcggctgtttattggaaaaacaagtgacaacaccggaacaatatccgatgtcactcaatggactcactctcgcttgtaatcaaaaaaccagccgtgatcctgtaatggaattatccgaatcacaagtacaacaaacgttagattttctccttaaaaaacaccttatccgcagccaaagtggtaatcgggtaatgaagtacgaacatcgtttttgcaattctgaatttggcgacctgaaattttcacccgccgaggtcgcggtgattaccctgctattattacgtggcgcacaaacaccgggggagctacgcacccgaactaaccggatgtatgaatttgctgatgttgcagaaaccgaagaaaccttgaagacgctctctctacgtgaagacgggccatttgtggtgcgtttggcacgggaaccgggtaaacgcgaaagtcgctttatgcctctgtttagtggggacgttgcttcgtcattattggcagcgggagaggctgaagagaataaccacacccttgaagccaacccccgtgaaacgcattcctttgaaaatatagcccttgaaaaaacagcccttgaagctagggttgcccagcttgaacagcaggttatccagttgtcacgccgtttggacgacgtgttgattcaactggacgatatgaaaaaactacgcgtgggtatcgtggggctggggggcattgcgcaaaaggcttatttgcctattttaactcaggcgcagggttggcaactggttggcgcattttcacccaatcaagctaaagctcaaccgctatgtgatagctatcgtatgcgttatttttcacgcttggatacgctcgctgcggcaagtgatgccgtttttgtccatagtagtaccgccagccattttcaggtcgtgcatgatttattgcaggccggagtccatgtctatgtggataaacccctggctgaaacacgagagcaatcagagcaattgatcgaactggcagataaacagcatttagcgctgatggtgggttttaatcgccgttttgccccgttatatcagcagttgaaacaacaggcgagcagcccggtctcactgcggatggagaagcaccggctaagtagcatcgggccacacgacttaggttttaccttgctcgatgactatctgcatgtcgtggatacggcgctgtggctaggcggtgagggggcaagattgacgggtggggcagttcagaccaatgctcaggggcagatgctgtatgcggagcaccatttccagcaaggtggttgtttgatcaccaccagtatgcaccgtcaggccggaactcagcgggaaagcgtacaagttatcagtgacggtgcctgttatcacattaccgatatgcgccaatggcagcaggcgtcagcggggcaggtgataagccaacctgctcccggctggcaaacgacattggaacaacgtggttttaccggggctgtgcatcatttcattgaggcggtcagtaatcaaacgaggccgcaagtctcaggtgaagatgcgattgttgcacaacgtatgattgagcgtattttgcagcagtag

SEQ ID NO: 42302 - DNA, 1536 bp, Yersinia pestis
atgaatctattgaaatcactggccgccgtcagttccatgacgatgttttcccgcgtgctgggctttgcccgcgatgccatcgtggcacgggtatttggtgcaggtatggcgacggacgccttttttgtggcatttaaattgcctaacttgctgcggcgaatatttgctgaaggcgcattttcccaagcttttgtgcctattctggctgaatacaaaagccagcaaggggaagaggcgacgcgaacattagtggcttatgtctctggcctgttaaccttgatattggcggtcgtcaccgtcgcggggatgctggccgcgccttgggtgatcttcatttccgcccccggctttactgatacaccggataaatttgctctgacctcggcgctgttacgggtgactttcccgtatattttgctgatctcattggcctcgctagtcggagcgatccttaatacctggaaccgtttttctattccggcttttgcgccaaccctcctcaatgtcagcatgataggttttgcgctgtttgctgcgcctcatttcaacccgccggtgatggcattggcttgggctgtggtggtggggggagtgttacaattaggctatcaactcccgcacctaaaaaaaatcggcatgttggtattacctcggctgtcgctacgtgataccggtgtttggcgggtgatgcgccagatggggccagcgatcctcggggtatcagtcagtcagatttccctgattatcaatacgatttttgcatcatttttggtatctggttcggtctcctggatgtactacgctgaccgtctgatggagttcccctccggggtgttagggggcgcgttaggtactatcctgctgccatcactggcaaagagtttttccagtgctaatcatgatgaatattccagattgatggattgggggctgcgtctttgcttcttactggccttgccaagcgcggtggcattaggaattttagctaaaccgctaatcgtctcgttattccaatacgggaaatttagcgcgtttgacaccctgatgacacaacgggcgctggtggcctattcggtgggcttgatggggttgatcgtggtgaaggttctggctccggggttttattctcgtcagaatattaaaacgccggtaaaaatcgcgattattaccttgatactcacgcaagtcatgaacttgatcttcattgggccgtttaaacacgcgggcttatcactgtctatcggcctgggggcatgtctgaatgccagtttgctctattggcagctacgtaaacagaaaattttccagccacagccggggtgggccatattcctgactaaattggtcatcggtgttatcgcgatgtctgcggtgctgctagggttactgtgggtcatgcctgattgggatgttggcgggatggcgtatcggttgctacggttatctgcggttgttgttgcaggtgcttttgcctactttgctatgttggcattattgggctttaaagtgcgtgattttgcccgtagaacgggctga

SEQ ID NO: 42303 - DNA, 3891 bp, Yersinia pestis
atggaaatactgcgtggttcacccgctttgtcggcttttcgtatcaccaaactgttgtcccgttgccaggatgctcacctgctggtgagtgatatctacgccgaatatgttcactttgctgatgtcagcgccccactgagtgctgatgaacacgccagactccagcggctgcttcaatatggcccatctcttcccgagcatccccccgcagggcgtttactgctggtcaccccaaggccgggtactatttctccatggtcttctaaagccaccgatatcgcacataactgtggattatcacaaattttacgtttagaacgtggtttggctttctctatccaaggcccggatttaaacgagagtcagtggaaacaattagcggcgttattacatgaccgcatgatggaagctgtcttcaccgatttacagcaagcagagcagctattctctcatcaccaaccagcaccagtacaacgggtcgatattctggggcagggccgcagtgcattggagcaggccaatattaaattgggtctggcactggcgcaggatgagattgactacttactgaccgcttttaccggtttggggcgcaacccaacggatattgagctgtatatgtttgcgcaggcaaactcagagcattgccgccataaaatctttaatgcggattgggtcattgatggtgttgttcagccgaagaccctgttcaagatgatcaaaaacaccttcgaacacacccctgattatgtgctgtctgcatataaagacaacgctgcggtgatggaaggctctcaggtcgggcgtttctatgccacggcggagaaagggatttatgactaccatcaggaagaagcccatatcctgatgaaggttgaaactcataaccacccgacagcgatttcaccgtggcctggggcagcaaccggttcagggggtgaaatccgcgatgaaggtgcaaccgggcgtggtgccaagcctaaagcggggctggtagggttctccgtttcgaacctgcgcattccaggttttgagcagccgtgggaagagaacttcggtaagcctgatcgtatcgtgactgcgctagatatcatgactgaaggcccattaggcggtgccgcgtttaacaatgagtttggtcgcccggcgttgttgggttacttccgcacctatgaagagcgggttaacagccataacggtattgaattacggggttaccataagcctattatgttggcgggtgggttgggtaatattcgtgccgatcatgtgcaaaaaggtgaaatcaccgtgggggccaaattggtcgtactcggtggcccatcgatgaatatcggtttaggggggggcgcggcttcctctatggcatccgggcagtcggatgcggatctggattttgcatcggtacaacgggataacccagaaatggagcgccgttgtcaggaagttatcgatcgctgctggcagttgggcgagtataaccccattctgtttatccatgatgttggcgccggtggcctctctaatgccatgcctgaactggtcaacgatggtggccgtggtggccgctttgaattgcgggatatcctcaacgacgaaccgggtatgagcccgctggaagtgtggtgtaacgagtctcaggagcgttatgtactggcagtcgcacccgcacagatggccctgtttgacgaaatttgccgccgtgaacgcgcgccgtatgctgttattggtgaagcgacagaagaaaaacatctgctcctgaatgatcgccatttcggcaatcaacccattgatatgccgctggatgtgctattaggcaaaacgccgaagatgctgcgtgatgttacccgcctacaggctaagggtgacgcgctgcaacgggctgatattagccttgccgaggcggtaaaacgcattatgcatttaccggcggtagcggaaaaaaccttcctgatcaccatcggcgaccgcacggtaaccggtatggtcacccgtgatcagatggttggcccttggcagatccccgtggctgattgcgcggtaaccagtgccagccttgatagctattatggcgaagccatgtcgctgggcgagcgcgctccggtggcattgctggactttgccgcctctgcccgtctggcggttggtgaagccttgacgaacatcgcagcaacccaaattggtgaattaaagcgtatcaagttatctgctaactggatgtctgctgctggtcacccaggggaagatgctggtttgtatgacgcggtacgtgcggtaggtgaagagctgtgcccagccctggaaatcacgattcctgtgggcaaagattcgatgtcgatgaaaacccgctggcaggaaggtcacgagcagcgcgaaatgacctcaccgctgtcactggtgatcaccgcttttgctcgcatagaagatgttcgccgcaccgtgacaccacaattgcgtacagataaaggtgataacgcgctgttgttgatcgatttgggcgcaggtcacaatgcgctcggtgcgactgcgctgacgcaagtttaccgccagttaggtgataaaccagcggatgtccgtaacgtgcagcaactggctggcttcttcaacgccatgcagcgtttagtagccgatcaacatttgttggcgtaccacgaccgctccgatggcggcttgttggtcacgctggccgaaatggcctttgcagggcattgtggcgtaacggttgatattcagtctttgggtaacgatgctctggctgcactgttcaacgaggaactgggtgcagtgattcaagtccgtgctgagcagcgtgccgacgtggagaaattgctggctgaccacggtctggcaaattgtgttcactatctggggcgtgcggttgcgggcgatacctttgatattcgcagtggtactgacgtggtgtacagcgagaaacgcagcactctgcgcttgtggtgggcagaaacgagctggcaaatgcagcgtctgcgtgataatccggattgtgctgatcaagaacatcaggctaaacaggatgaaagtgatcccggcctgaatgtgaaactgacgttcgaccccgctgaagatatcgcggcaccattcatcctcaaacaggcgcggccaaaagttgctgtgctgcgggagcagggcgttaactctcacgttgagatggccgcggctttccaccgtgccgggtttgatgcggtcgacgttcatatgagtgacctgttggcgggccgcactgatttacaatccttccaaaccttagttgcttgtggcgggttctcttacggtgacgtcttgggggccggtgaaggttgggcaaaatccattctgttcaatgatcgtgttcgtgatgaattcgaggctttcttccatcgcccaacgacattggcgcttggggtttgtaacggctgtcagatgatgtctaatctgcgtgaattaatcccaggtgcggagcattggccacggtttgtacgcaacttatcagatagctttgaagcacgtttcagcctggttgaagtggcaagcagcccatcactgtttatgcaggacatggtcggctcacgtatgccaattgctgtttcacatggtgaagggcaggtggaagtccgtgatgcggcacatttggctgctctggaacagagtcatctggtggcgttacgctttgtgaataaccacggggttgtcactgagcaatatccggctaacccaaatggttccgcgaatggtattacggcggtgaccagtgttagtgggcgggccacggtaatgatgccacaccctgagcgggtgttccgtacggtcagtaattcgtggcacccagaagagtggggcgaggatagcccatggatgcgtatgttccgtaatgcgcgtaagcaattaggttaa

SEQ ID NO: 42304 - DNA, 1266 bp, Yersinia pestis
atgaagttttcacttttcggcgacaaatttacccgttatgcgggtattaccagattgatggatgacctcaacgatggcctgagaacaccgggttctatcatgcttggtggcggaaatccggcacatatccctgagatggatacctacttccaacaactgtgtcaggagatgctaacagaaggcaagttaaccgaggcattgtgtaattacgacgggccgcaaggtaaagacttactgctaaaagcactggcaaaaatgctgcgcgatgagctgggttggcagatagagccacagaatattgcactgacaaatggcagtcagagtgcatttttctacttatttaatttgttcgctggccgttatgccgatggtagccgccgtcgggtgctgttcccactggcgccagagtatctgggctatgcggatgcaggtctggatgaagatttatttgtctccgccaaaccgaatattgagctgttacccgaggggcagtttaaatatcacgtggattttgaacacctcaatattactgatgatattggcttgatatgcgtatcaaggcccacaaaccccaccggtaatgtcattactgacgaagagttaatccgtcttgatgctatcgcgcagcaacgtaatattccgttattgattgataatgcttatggcgtccccttccctggtattatttttaccgacgccacaccgctgtggaacccgaacatcatcttgtgcatgagcctgtcaaaactgggcctaccaggttcacgatgcgggattgtcattgccgatgaaaaagtgatttcggccatcaccaatatgaacggtattatcagcctgtcaccgggcgggatggggcccgcgatcgccgccgaaatgattgagcgtggtgatttattgcgcttatccaacgaggtgatccggccgttttactttgaacgtgtacagcagaccatcgccatcttgcgcaaatacctgcccgctgaacgctgcctgatccacaaacccgaaggcgctattttcctctggctgtggtttaaagatttgccaatcagcaccgaactgctctatcagcgcctgaaaaaacgtggtgttctgatggtaccgggccattacttcttccccggtctgggctatgactggccacatactcaccaatgtatgcgaatgaattatgtgccggctccggaaatgattgaaaaaggtgtcgcgatcttggcggaagagattgaacgagcgtttcaggaagcgaaacaacttactgattaa

SEQ ID NO: 42305 - DNA, 1461 bp, Yersinia pestis
ttgacacgcataaaattaagttactttaccatcggtctggttgctctgcttctggcgcttgcgctgtggcccaatattccttggcgtaatgggcaagagggccaacttgaccaaataaaagcccgtggagaactgcgcgtcagtaccatcagttctcctttgatctactctaccgaaaaggataccccttccggttttgactatgagctagcaaaacgttttgctgactatctgggggttaaactggttatcatcccccatcataatattgacgatctgtttgacgcattagataacgatgacaccgatctgctagccgctgggctgatttataaccgtgaacgcctcaatcgggcgcggactggccctgcctactattctgtttctcagcaattggtctaccggctgggttcgccacggcctaaatcgttcagcgatctgaaaggtcaggtggttgtggcctccggttcggcccatatgaccacactaaaacggcttaagcagacaaaatatcctgaactcaattggagttcatccgtcgataagtccggtaaagaattactggagcaagtcgcggaaggtaagctcgactatacccttggcgattcagccaccattgccctgttacaacgcattcatccgcaattggcagtcgcatttgatgtcaccgatgaagagcccgtcacctggtattttaaacagagtgatgacgatagcctgtatgcggccatgctcgatttctacagtgagatggtggaagacggtagcctcgcacgtctggaggagaaatatctgggtcatgtggggagttttgactatgttgataccaaaactttcctgtccgctatcgataatgtcctgccctcttaccagcacctatttgaaaaacatgcaggggacattgactggaaattgctggccgtgattgcctatcaagaatcacattggaacccgcaagccacctcccctactggtgttcgtggcttgatgatgctaacccgtgcgaccgcggacgggttaggggtcaaggatagggttgaccctgaagaaagcatcagaggcggggctatctatttgcaacggctgatgaaaaaactccctgaaaccatcccagaagatgaacgcatctggtttgcactggctgcgtataatttaggctatggtcatatgctggatgcccgccgtttgactaaaaatcagaacggtaacccagacagttgggttgatgtgaaaatgcgtttaccgatgctaagccaaaaacgctactacccaagcaccacttacggttatgcccgtggtcatgaagcctataactatgtcgagaatattcgccgttatcaggtcagtctggtgggatatttacaggaaaaagagaaaaaagcggctcaacatgccgccattgaggcggagctgggcaaaagcaacccggttgtcggccccggttggtcaatcggtgactaa

SEQ ID NO: 42306 - DNA, 1731 bp, Yersinia pestis
gtgaatattcaggctcttctctcagataaagtcagccaggcgctgattgcagcaggtgctcccgcagattgcgaagctcaagttcgccaatctgccaaagctcaatttggcgattatcaagctaacggtgtgatggccgttgccaaaaaacttggcatgcaaccccgacaactggcagaaagagtcgttgaactgctcgaccttacaggtatcgccagtaagattgaaattgcaggccccggttttatcaatatttttctggatcgtcagtgggtggccgagaaagtcgaatatgctctgactgcgcctaaattgggcgtcgcgcctgtcgaaccgcaaactatcgtagtcgattattcagcacctaacgtggctaaacagatgcacgttggtcacctgcgatccaccattattggtgatgctgcagtacggacattggcgtttttgggccataacgttatccgtgccaaccacgtcggtgactggggtactcagtttggcatgttgatcgcctacctggagaaaatgcagaacgaaaatgccagtgatatggggctatcggatctggagcttttctatcaacaagcgaagaaaacctacgacgaagacgaagagtttgctctgcgtgcccgtgcctatgtcgtaaaactgcaaagtggggacgaatactgccgtcaaatgtggcgtaaattggtggatatcaccatggcacaaaaccaggttgcctatgaccgcctgaatgtcaccttgaccaaagacgacgtaatgggtgaaagcctgtacaatgcgatgctgccagagattgtcgcggatttgaaagccaaagggttggccgtcgagagcgaaggtgcgaccgttgtctatctggatgaatataagaataaagacggtgagccaatgggcgtcatcatccagaaaaaagatggcggctacctctacactaccaccgacattgcctgtgccaaataccgttacgaaacgctgggcgcagaccggatactctattacatcgatagccgccagcatcagcatttgatgcaagcctggaccatcgtgcgtaaagccggttatgtgccagaatccgtgccactggaacaccacatgttcggcatgatgctgggcaaagatggcaaaccgtttaaaacccgctctggtggtaccgtcaaattatccgatttactggacgaggcggttgaacgtgctggcaagttgattgccgagaaaaacccggatatgcctgccgatgaattgaagcaagtgatcaatgcggtggggattggcgcggtgaaatatgccgatttgtccaagagccgaaccacagactatattttcgattgggataatatgctggcgttggatggcaataccgcgccttatatgcaatatgcttatactcgcgtggtttcagtatttagacgtgcgggtgttgatgaaaccagcctgacgctgccattagtggttacagaagatcgcgaagccaccttggcgacccgcctgttgcagtttgaagagatcatcaccacggtggcacgcgaaggtacaccgcatgtcatgtgttcttatctctatgatttagcaggcttgttctccagcttctacgagcattgccagatcctgaatgcagagagcgaagagatccgccaaagccgcttgaaattggcaatgttaaccgctaaaacgctgaaacaaggtctggacaccttgggtattcaaaccgttgagcggatgtaa

SEQ ID NO: 42307 - DNA, 576 bp, Yersinia pestis
gtgcaacgtgaacaagttttaagtaacgcactcaatctgttagaacagcaagggttggcaaataccacgctagaaatgctcgccaaagcgctgtcagttgaagtcagtgacctgacacgcttttggccagatcgtgaggcattgctctacgattgcctgcgctatcacagccaacagattgatacctggcggcggcagctacagctggacgagaccctatcaccgcagcaaaagctactggcacgctatcaaacactgagcgagcaagtgcaaaaccagcgctaccccggctgcttgtttattgctgcctgcagtttctatcctgatactgagcaccctattcaccaattggctgaacagcagaaacaggcctcgctgcactatacaaaagccttgctgcaagagatggatgctgacgatgccgatatggtcgcacagcagatggagttgattctggagggttgcctgagcaaattactgattaagcgtcagttggcagatgttgaggttgccaaatgtttagcggaagacatattaacagtggcccaatgccgtaaaaatggtgccttaagctga

SEQ ID NO: 42308 - DNA, 888 bp, Yersinia pestis
atgagtctgggagcattaatttctgaaagccgtaatccggcaaccatggaattagataaactctctacgttggcgatgctgacctgtatcaatgacgaggaccgtaaagtaccagatgcgattcgtttggtcttaccggcggttgctcaagcggtggatttagctgctgatgcattaaagcagggcgggcggttgatctacttaggcgctggaaccagtggtcgactcggtgtgttggatgcttctgaatgcccgccgaccttcggggttccccatggtatggttattggcctgattgctggtggcccaggggctttgctcaaagcggtggaaggcgctgaagatgatatagctctggggatgcgggacctgcaagatttgcaactcactgccaccgatatggtggtcgggctggccgcatctggccgcacgccttatgtgattggtgcgttacgttatgcccgtgagttggggtgcccaacggccgccatttcttgcaatccagattcccctatcgcgcaggaagcgcaggttgcgatttcaccggtggtagggcctgaggcattgaccggttcgacccggatgaaatcagggactgcacagaaactggtgctgaatatgttatccaccggggctatggttaaactgggtaaggtctatcaaaatttgatggttgatgtgaaggcaaccaatgtgaagttagttgaccgtgcctgccgtattgttgtcgaggccacgggcgtcagccgggcagaggctgaacacgcgttgagacaaacagattttgaggtcaaacccgccattctgatgctcttgaaaggggtgagtgctgagcaggcgcgtcaggatttacggcaacatcatggctatttacgcgcagctctataa

SEQ ID NO: 42309 - DNA, 840 bp, Yersinia pestis
atgagtagcctcctacgcatccgccaaatttattccacgctggcacaaaatgaccgtaagctggcggattttttgctgattaatcccgagcaggctcgccatctcagttcacaaaagctggcgcaacagaccggtgtcagccaatctgctgtggtcaaatttgcccaaaaattaggctataaaggtttccccgcgttgaaactggccctgagcgaagtggtcgctatgccgaaggcggtaacgctgcataatcagatcttgagcaccgacagtttaaaaacaattggggagaagttgctgaacgagaaaaccgcagcactgcgagcaaccctagacattaatagcgaacaacgtctcatccagggattagggatgttacgcgcagcacaaaaggtgcttttaatcggcattggtgcctctggtttggttgccaaagatcttgcctataagttactaaagataggcatcgtcgccatctcagagacagatatgcacgtgcaattggcggcagcacaagcgctgggagagcagggtttactcttggcgatctctttcagtggcgaacgtcgtgagatcaatctggcggcggaagaggcacaatattgcggtaccaaagtgttggcgttaacccgcttttcccctaacagcttgcagcagcgggcagatcactgcttgtataccatttcagaagaaccggttatccgtagcgcggcgatctcttccagtaccgcacaatacgcactgaccgatcttttgtttatggccatgatccagcaagacattgaaaatgcgcaagatcatattaagcacagtgcagcactgatcaaaaagctgatctaa

SEQ ID NO: 42310 - DNA, 2148 bp, Yersinia pestis
atgaaaaagatcctcacggtctgcccctattgcggctcgggatgtaagttaaatttattggtcgaagacggcgagattgtcggtgccgaacccgctgatggtgtcactaatcagggagcgttgtgtctgaaagggtactacggctgggattttcttaacgatacccgcttgttgacgccacggttgaccacgcccttattgcggcgtcagcgaggcgaggcgtttcagcccgtgagttgggaggcggcgattgcgtttatcacggctaaacttagcgccataaaagaacgtcatgggcctgatgccatcatgatgacgggctcttcccgtgggccaggtaacgaagccaattatgtgatgcaaaaatttgctcgtgcggcgatcggtaccaacaatattgattgctgcgcccgcctgtgccatggcccgtcagtggctggattgcagcaaacgctgggtaacggcgcgatgagcaactctatcggtgaaattgagaatactgactgcattttggtctttggttataacgcggcggattctcaccccattgttgccagacgtattctgaaagccaaaaataagggggctaaacttattgtctgtgatccacggcatatcgaaaccgcccgtatcgccgatcaatggttgccgctgaaaaatggtgccaacatggcactggtcaatgcatttattcatgttctgattgaagaaaaactctacgacgcaaattatgtccgcgaccatacccgtggctttgatgaactgaaagcaggcgttgccgcataccgcccagaggatgttgaaccgattacggggctgtctgccaaagcggtgcgtcaggccatgcgcacttatgctgcggcccctgcggccacccttctatgggggatgggcgtgacccaatggggccaggcggttgatgtggtgaaagggctctcttcgttagcgttattaaccggtaatctggggcgaccaaatgtgggcgtcgggccagtacgaggtcagaataatgtacagggcgcgtgtgatatgggcgtgttgccgaataccttccccggctatgaaaaagtgaccgacagtgaggccagagcgcgttttgctcacgcctggggggtcgctgaactgcccgcgcatgttgggtattcgattactgatgtgccgcataaagtggcagaagggaagcttaaggcctactacgtatttggtgaagatccaatccagaccgagccagatttagcggcgatgcgtgcggcttttgccgcactggatctggtcgtggtgcaggatatctttatgaccaaaacggcagaactggcggatgtcgtactgcctgcaacatcctggggggagcatgaaggggtctataccagtgctgaccgggggttccagcactttaataaagccattgaaccgaaaggggatgtgaaaccggactgggagattatcagcctgatatcaaccgccatgggttacccgatggcataccaaaatacgcagcaaatctgggatgagatgcgtggcctgtgcccgccattcgctggggtcacctatgagaaactggcaggattgggctacgtgcaatggccttgcccaaccgaagatcaccctggaacaccttatctctataccgataaccaattcgcgacggctgacggcaaaggtttgctcagttgcgcgccgtggcagccgcctcatgagcagaccgacagtgattatcctctggccctctgtaccgtgcgtgaagtggggcattacagttgccgctcaatgaccggtaactgcggcacgctaaaaatcttggcggatgagccgggctatgtgcaaatccatcctgaggatgccagctatttgggggttatcgatcaggcgctgatctggatttcatcacgacgcgggaaagtgatcgcccgtgccagtgtgaccgaacgggctaatcgtggtgcggtgtatatgacctatcagtggtggattggggcctgtaatgaactgactgtggaccatgttgatcccgtgtcaaaaacaccggaatttaaacattgtgcggttaaggtcgaggcgattagcgatcaaactgcggcagagcaatatgttgagcaacaatacagccagttgaaaaaacggttatcagacgccgcagttgtaccatga

SEQ ID NO: 42311 - DNA, 465 bp, Yersinia pestis
atgcgtaattatgatttgtcacctttacttcgtcagtggattggctttgataaattggccagtacaatgcagggcggtcaggagccacaaggcttccctccttataacattgaaaaaactgacgataaccactatcgcatctcactggcgctagccgggtttaaacagagcgaattagatattgaagtcgaaggcccacgcctgacagtacgtggtaagccaacaccagtggagaaacaggtcgaatacctgcatcaagggctggttcgtaaagagttctcgttgacctttaccttggctgagcatctgaacgttgataatgcccagtttgaaaatggcctgctgcatattgatttactgcgtcaggtgccagaagcactgcaaccacagcgtattgccatcggcagtgccacacctcaggagcgccaggtattagaaagcccggaggcacctgatcagcagtaa

SEQ ID NO: 42312 - DNA, 717 bp, Yersinia pestis
atgttaagagtcatcatcgtcgacgatgaacaacctgcgcgtgaagatttacgcgaaagactgaatgaagaacacggtatcgagatcgtcgccgaatgcagcaatgctctggaagcaattcctgctatccagcgcctacagcctgatgtggtatttctcgacatccagatgcccagaatcaatgggttagaattggcctcaatgctgaaccctgaaagcatgccacatatcgtatttgtcaccgcttacgatgaatatgccattcgcgcttttgaagaacatgcttttgactatctgttaaaaccactcgaccatcaacgtttggcgaagacactgacacgtctaagtcgcgatttaatcgtaaagaataatttacacaaagttatcaaaccaatacttcgtcatatcccctgttcaggccacaaccgtatttttttgctgaaaattgaagaagtagaatacctaagctccgagcttagcggggtgcatgtggtgggaaccgtgcaatcaggttatacccagctatcgttaaaaacactggaggaaaaaactccgtttattcggtgccaccggcaatatatggtgaataccgaacaattgggggaaattcagcttatggataatggtgcggctgaagtcatcactcgttcaggaaagcatatccctgttagccgccgctatttaaagtccctgaaggagaaattaggcatcgcataa

SEQ ID NO: 42313 - DNA, 261 bp, Yersinia pestis
atggctttattgattactaaacgttgtattaattgcgatatgtgcgaaccggaatgcccgaatgaggcaatctccatgggtgcagaaatctatcaaattgatccgatgcgctgtactgagtgtgtaggtcattacgaaacgccaacctgtcaactggtctgccctattgataatacgatttctgccgacccagcttgggttgagactaacgagcagttgtgggataagtttgttcagctacaccatgccgatcgtctgtaa

SEQ ID NO: 42314 - DNA, 381 bp, Yersinia pestis
atggctattcttgggctaggaacggatatcgttgaaatctcacgtattcaagcggttgttgagcgtactggtgagaggctggcgcggcgtattctcagcccgtctgaatggcaacattatcaacagcatcagcaaccggtccgctttttggccaaacgtttcgccgttaaagaagctgccgctaaggcatttggaacgggcatccgcaatgggttggcgtttaatcaattcgaagtggttaacgacgcattggggaaaccgacactgcgtttgcattcgcgggccgcggagttggctgtagaattaggggtgaaatcgctgcatgtcactctggctgatgagcgacgttatgcctgcgcgacagtgattattgaaagttaa

SEQ ID NO: 42315 - DNA, 348 bp, Yersinia pestis
atgagcaatattatcaagcaaatcgaacaagagcagatgaagcaagatgtacctgcattccgtccgggtgattccgtggaagttaaggtatgggttgttgaaggttctaaaaagcgtctgcaggcattcgagggcgtggttatcgctattcgtaaccgcggtctgcattctgcgttcaccgttcgtaaaatttccaacggcgaaggtgttgagcgtgtattccaaactcactccccagtaatcgacagcattactgtgaaacgtcgtggtgccgttcgtcaagcgaaactgtactatctgcgtgagcgtactggtaagtctgctcgtattaaagagcgtcttggctaa

SEQ ID NO: 42316 - DNA, 1797 bp, Yersinia pestis
atgcgtactgaatattgcgggcagttgaatctgtcccacgtgggccaaagcgttacactttgtggttgggttaaccgtcgtcgtgatctgggtggcctgatttttattgatatgcgcgatcgcgaaggcatcgttcaggtattcttcgatccagaccataaagccgcttttgaacaagcttctgagttgcgtaatgagttctgtattcagattaccggtactgtgcgtgcacgtcctgacagtcaaatcaataaagatatgtccaccggtgaagtggaaatctttgctaacacgctgaatatcattaatcgctccgagccattgccgttagattccaatcaaatcaacagtgaagagcagcggttgaaatatcgctatctggatctgcgccgcccggaaatggctgatcgcttgaagtcccgtgccaaaatcaccagttttgtacgccgcttcatggacgatcatggcttcctggatatcgaaaccccgatgttgaccaaagcgacaccggaaggcgcccgtgactatctggtgccaagccgtgtgcataaaggcaagttttacgctttgccacagtctcctcagcttttcaaacagttgctgatgatgtctggctttgaccgttactatcagatcgtaaaatgcttccgtgacgaagatttacgtgctgaccgccagcctgaatttacccagatcgatgttgaaacttcgttcatgagcgcagatcaagtgcgtgaagtgatggaaaaattggtccgtgaattgtggcaggaaaccaaaggcgttgatctgggtgatttcccggtaatgacctttgctgaagcgatgcgtcgttatggttccgataagccagacctgcgtaacccactggaattagtggatgtcgcctctctggttaaagatgttgaatttaaagtgttctccggtccggccaatgatgccaaagggcgagtggctgcgctacgtgtaccgggtggcgcgcaacttagccgcaaacaaattgatgagtatggtcagtttgtcggtatttatggtgcgaaaggcttggcatggctgaaggtcaatgaccgtgctgcaggtcttgaaggggtacaaagcccgatagccaaattcctcagtgctgaagtgttggacgccattttggtggccactcaggcggaaagtggcgatatcctgttcttcggcgcggacagttacaagattgtgaccgatgcgatgggggcgttgcgtctgaaagtagggcgtgatctcgagttgacgcgtctggggacatgggcaccgttatgggtggttgatttcccaatgtttgaagatgatagcgaaggcggcctgacggccatgcatcatccattcaccgccccaaaagatatgagcccggaacaactggccgcagcaccaaccaccgctatcgccaatgcttacgacatggtgatcaacggctatgaagtgggcgggggttctgtgcgtattcatcgcactgaaatgcagcaaacggtctttggtattctgggcatcactgaggatgaacagcgtgagaagtttggcttcttgctggatgcgctgaaatttggcaccccgccacatgcgggcttggcgtttggtctggatcgtctggtcatgttgttgaccggtaccgataacatccgtgacgtcattgccttccctaaaacgactgcggcggcttgtctcatgaccgatgcgccaagttttgccaacccggcctcgttgcaagagttgtccattagcgtggtggcgaagaaaggcactacagatgctggggcagaagagaatcagtaa

SEQ ID NO: 42317 - DNA, 954 bp, Yersinia pestis
atgctaattctgaataaacaaaaaattctcgacaagttcgatgcggatcgcatcacattattgctcaaagagggctttattgcttttagtcagcaacgggtccagatgccgccagtacagcatttactgtttgatcaggccaatggtgattgctgtattaaaagtggttatttacagggcgatgaccagtttgtcgtgaaggtctccggtggattttatgataaccctgctcaaggattagccagtaatcaaggggtgatgatggcattttcggcaaaaaccggtgaaccacaagcgatcttactggatgaaggctggctaacggcgctgcgcacagcactggccgggcgaattgtcgccgagctttgcgcgccacagcacatcagcgcccttggtatcgtggggacaggaatacaggcgcggctgcatctgatgtacctgaaaaatgtgatgacttgccgccagctatgggtctggggccgcagtgaaacggcattagaggagtatcgccaatatgcgcaagcagagggctttgcagtcaacaccacgttgaatgccgcagagctggcccatcacagccaatttattgtcaccaccacgccaagccgggagcctattttacaggctgaagatatccagccggggacacatattacggcggttggggcagatagcgcgggtaagcacgagctctccgccgagttagtcgcgagagccgataaaattctggtggattcaatcgcgcaatgcaccgattttggcgaagtttcgttagcgtttaagcaagggctgttggctcatcacaacttaactgagatcggtttagctttagcgcaaggcatcccttttagagagaatgaccaacagattaccttggcggatttaaccgggttggggattcaggatgtgcagatagtgaaggggattctgggagataaaaagggggtgttgtga

SEQ ID NO: 42318 - DNA, 741 bp, Yersinia pestis
atgtggatcggtgttattagcctgtttcctgagatgttccgcgcaataaccgattacggggtaactggccgggcagtaaaaaatggcctgctgagcgtgcagtgttggagtcctcgtgacttcacctacgatcggcatcgtaccgtggatgaccgcccatatggcggaggcccgggaatgttgatgatggtgcaaccgttaagggaagccattcatgcagcaaaagcagcggcaggcgagggagcaaaggtgatttatctgtcacctcaagggcgcaaactggaccaacagggtgtttgcgaactggcgatgaatcagaaaatgattctggtttgtggccggtacgaaggagttgatgagcgcgtaatcaaaacagaaattgatgaagaatggtcaattggcgattacgttctcagcggtggcgagctgccagcaatgacattgattgattcagtctcccgttttattccgggcgtactggggcatcatgcctcagcggaggaagattcctttgttgatgggttgctggattgcccacactacactcgtcctgaggtgttggaagggatggaggtaccgccagtattactgtcaggtaaccatgccgagattcgtcgctggcgcttaaagcagtcgctgggccgtacctggcttagaagacctgaacttctggaaagcctagctctgactgacgagcaaatggtgttgctggctgagttccaacgggaacataagccctga

SEQ ID NO: 42319 - DNA, 810 bp, Yersinia pestis
atggctattgaactgatcgctattgatatggatggcacgttgctgaatccacagcatgaaattacgccacgggtaaagcaggcgattgctgctgccagggctaaaggcgtctgtgtggtgctggccactggtcggccttatattggggttcaacgttatttacgtgaactgaatatggagaacagtggcgattattgcatcagtaacaacggtgcattagtacaaaaggcggcgactggcgagtgtattttacaagagactctcagttttgaggattatctctattttgaagcgttatcccgtgagttgggggttagtttccaggcctttgatttcaatacattatataccgccaacaaggacatcagtaaatatacgcttcatgaagtgatgttgacggggatccctctgaagtaccgggcagtagaggagatggatccaacattacgtttccctaaagtgatgatgattgatgagccagagcggttggatcgtgcattggctatgatgcctgccgaagtatttgagcgttttactattatgaagagtgcgccattttatctggaaatcctgagtaagcgggcggataaaggtactggcgtgaaaatgctggctgagcatttaggcattgcgcagaaaaatgtcatggcgttgggtgatcaggggaatgacatcgcaatggttaactacgccggagtgggggttgccatggggaatgcgatccctgagctgaaggagatagcgcagtatgtgacggggaccaactgcgaggatggtgtggcgactgcgattgagaagtatattggctga

SEQ ID NO: 42320 - DNA, 549 bp, Yersinia pestis
atgagcaagcaactcaatcctgcagttcccgaccagccgattgttctcggtaaaatgggttctacttacggcattcgcggttggctcagagtattttcatccaccgagaacgccgaaagcatttttgactatcagccgtggtttatccagcaggcgggtaagtggcagcatgtcgagttggaagactggaagcgccacagtcaggatctgatcatcaaagtgaaaggtgttgatgatcgggaagccgcgaatttactgactaattgcgaaattatcgtagattccacacaactccctgcattggaagaggatgattactactggaaagaccttatgggttgccaagtagtaaccaccacgggttatgaactgggtaaaatcatcgatatgatggaaaccggttctaacgatgtcatggtcgtgaaggcaaatctgaaagatgcattcggtatgaaggagcggttggtcccgtttcttcatgggcaggttatcaagaaagtcgatctcactgctcaacgtgttgaagtagattgggatcctggtttttga

SEQ ID NO: 42321 - DNA, 1647 bp, Yersinia pestis
atggcagctaaagacgtaaaattcggtaacgacgctcgcattaaaatgctacgcggcgtaaacatccttgctgatgcagtgaaagtgactctgggccctaaaggccgtaacgtagttctggataagtctttcggttctccaacgatcactaaagacggtgtttctgttgcacgtgaaatcgaactggaagacaagttcgagaacatgggcgcacagatggttaaagaagttgcctctaaagcaaatgatgctgcgggtgacggtaccacgactgcaacagtattggctcaatccatcatcactgaaggcctgaaagcagttgccgcaggcatgaacccaatggatctgaagcgcggcatcgacaaagccgttatcgcagcggtagaagagctgaaaaaactgtctgtaccttgctctgattccaaagcgattgctcaggtcggtaccatctctgcaaactccgactcaaccgttggcgaactgatcgctcaagcgatggaaaaagtcggtaaagaaggcgttatcaccgttgaagaaggttcaggcctgcaagacgagttggacgttgtagaaggtatgcagttcgatcgcggctacctgtctccttacttcatcaataaaccagaaactggctctattgaacttgaaagcccattcattctgttggctgacaagaaaatctctaacatccgtgaaatgctgccagttctggaagccgtagcgaaagccggcaagccactgctgatcattgcagaagacgttgaaggcgaagccctggcgactctggtagtgaacaccatgcgcggtatcgttaaagttgcagcggttaaagcacctggcttcggcgaccgtcgtaaagcgatgctgcaagacatcgcgaccctgactgcgggtactgttatctctgaagagatcggtctggaactggaaaaaactactctggaagatctgggtcaggcgaaacgtgttgttatcaacaaagacaccaccatcattattgatggcgtaggcgatgaagcggcaatccaaggccgtgtggctcagattcgtcagcagattgaagatgccacttctgactacgacaaagaaaaactgcaagagcgtgttgctaaactggctggcggcgttgccgttatcaaagtgggcgccgcaactgaagttgaaatgaaagagaagaaagcacgcgttgaagatgctctgcatgcaactcgtgccgcagtagaagaaggcgtcgtagcgggtggtggtgttgcactgattcgtgcagctcacgctatcgctggcctgaaaggcgataacgaagaccagaacgtgggtattaaagtggctctgcgtgcgatggaatctccactgcgtcagatcgtggttaacgcgggtgaagaagcctctgttatcgcgaacaaagttaaagcgggtgaaggtagcttcggttacaacgcttatactgaagaatacggcgacatgatcgcgatgggtatcttggatccaactaaagtgacgcgttctgctctgcagtacgcagcctctattgctggtctgatgattaccaccgagtgcatggttactgacctgccacgtgatgacaaaggtgctgatatgggcgctggcggcatgggtggtatgggtggtatgggcggcatgatgtaa

SEQ ID NO: 42322 - DNA, 978 bp, Yersinia pestis
atgagcgacacggcaagctggcagccaagtgcacctatcgccaatttgttgaagcgcgcagcaataatggcagagattcggcgctttttcgccgatcggggcgtattagaagtagaaacgccaaccatgagccaagcgacagtgacggacattcatttagttccattcgaaacccggtttgttggcccgggcgctgccgatggtttgacgctgtacatgatgaccagcccggaatatcacatgaagcggttgttagcggcgggcagtggccctatctatcaactgggccgcagtttccgcaatgaagaggctggccgctatcataatcctgaattcaccatgctggaatggtaccgccctcattatgatatgtatcgtttaatgaatgaggtggatgacctgttgcagcaaattttggattgcaacagcgcagagaccttatcctatcagcaagcgtttttgcgccatttaaatattgatccgttgtctgctgaaaaagcacaattgcgtgaagtggcggcaaaactggatttaagcaatattgcggataccgaagaagatcgcgatacgttgctgcaattgttgtttactgtgggtgtcgaaccttatattggccgtgataaaccggcatttatttatcatttcccggcatcgcaggcatctctggctgaaatcagtaccgaagaccaccgtgtggcggaacgctttgaggtgtacttcaaggggatagaactagcgaatggtttccgagagctgactgacggtgatgagcaactgcaacgctttgagcaggataaccgtaaccgtgcgaaacggggcttaccacagaacccaatcgatatgaatcttatcgcagcactaaagcagggtttacccgattgttcaggtgtggctttaggggttgatcgcttggtgatgctggcgttaaatgcggaaaggttgagtgatgttattgccttccccgtcaatatcgcctaa

SEQ ID NO: 42323 - DNA, 249 bp, Yersinia pestis
atggtaacaattcgtttggctcgtggcggcgctaaaaagcgtccgttctatcaagtagtagtgaccgacagccgtaatgctcgtgacggtcgttttatcgaacgtgtaggcttctttaacccgatcgcatctggtcaggctgaagcactgcgtttagacctggaccgtatcgaacattggatcggcctgggtgctaccgtttctgatcgcgtatctgtgctgatcaaagacgctaagaaagcagcttaa

SEQ ID NO: 42324 - DNA, 2415 bp, Yersinia pestis
atgtcgaatacttatgactcctcaagtatcaaggtattaaaagggctggatgccgtgcgtaagcgtccgggcatgtatatcggagatactgatgatggtaccggtctgcaccacatggtattcgaggttgtggacaacgctattgacgaagccctcgcgggtcattgtaaagaaattctggtaaccatccacgcggataactccgtttctgtacaggatgatggccgtggtatcccaaccggtatgcacgatgaggaaggggtatctgcagcagaggtcatcatgaccgtgttgcatgctggcggtaaatttgacgataactcctataaagtttccggcggtttgcatggcgtaggggtatccgttgttaacgccctgtctgaaaagttggaactggttattcgccgtgaaggtaaagttcacgagcaaacctacaaaatgggcgtgccacaggcaccgctgaaagtggtgggtgaaactgagcaaaccgggactactgtgcgtttctggccaagtttccagacctttaccaataacaccgaattccagtatgagatcctggctaaacgcctgcgcgaactctctttcctgaactcgggtgtttcaatcaaactgaaagacaaacgtaacgataaagaagaccacttccattacgaaggtggtatcaaggcgtttgttgaatatctgaacaaaaacaagaacccgatccacccgaaagtgttctacttctccaccatgaaagacgatatcggggtggaagtggcgctacagtggaacgatggtttccaggaaaatatttactgcttcaccaataacattccacagcgtgatggtggtacccatttagttggtttccgtacggcgatgacccgtaccctgaacagctatatggataaagaaggctacagcaaaaaagcgaagatcagcgccaccggtgatgacgcccgtgaaggcttgattgctgttgtctcagtgaaagtgcccgatcctaaattctcctcacagaccaaagataaattggtttcttctgaggtgaaaacggcggtcgaaacgctgatgaacgagaagttggttgagtatttgttggaaaacccaactgacgccaaaatcgttgtgggtaaaatcattgatgcggcccgcgcccgtgaagctgcgcgtaaagcccgtgaaatgacacgccgtaaaggtgcgctcgatctggcgggtttacccggcaaactggcagactgtcaggaacgtgacccggcattgtccgaactctacttagtggaaggggactctgcgggcggctcggctaaacaaggccgtaaccgtaaaaatcaggccattttgccgctgaaaggtaaaatcctgaacgttgagaaagcgcgttttgacaaaatgctctcttcacaggaagtggcgacactgatcaccgcgttaggttgtggtattggccgggatgaatataacccggataaattgcgttatcacaatatcattatcatgaccgatgccgacgtggatggctcgcacatccgtacgttgttgttgaccttcttctaccgtcagatgccggaaattattgagcgtggtcatgtgtttatcgctcagcctccgctgtataaagtgaagaaaggtaagcaagagcagtacatcaaagatgatgatgcgatggagcagtaccaaatgacactggctctggatggcgcggcattgcataccaatgctcacgcaccagcactggctggtgagcctttggagaaactggttgctgagcattacagtgtccagaagactatcgcccgcatggaacgccgttatccgcgtgctttgctgaataacctgatttatcagcctaccttgcaagaagaggatttgggcaataaagaggttgtgacgcaatggattgattcgctggtggtcttgctgaacgaaaaagaacaccatggcagcagctacagttcagtggtgcgtgagaaccgtgagcgtcaactgttcgagcctattttgcgtattcgtacccacggggttgataccgattatgatctggacttcgatttcatccatggtggcgagtaccgtaaaatctgtctattgggtgacaaactgcgtggcttaatcgaagacggtgctttcgttgaacgtggcgagcgtcgtgtgccggtttcaagcttcgaagaggcgctggactggttagtgaaagagtctcgccgtggtttggcaatccagcgttacaaaggcttgggtgaaatgaaccccgatcagttgtgggaaaccacgatggatccagagagccgtcgtatgctgcgagtcatggtgaaagatgccatcgccgccgatcaactcttcactactctgatgggtgatgctgttgaacctcgtcgtgcctttatcgaagagaatgcactgcgcgcagccaatattgatatctaa

SEQ ID NO: 42325 - DNA, 1362 bp, Yersinia pestis
atgtttgagaacttaactgatcgattgtcgcgcacactgcgcaatatcagcggccgtggccggctgacagaagaaaatattaaagaaacgctacgtgaagtgcgcatggcattacttgaagctgacgtcgctctgcccgttgttcgtgactttataaaccgagtaaaagagcgggctgttgggcatgaagttaataaaagtctgacgccaggccaagaattcgtcaaaatagttaaaaatgaattgatcagcgccatgggcgaggtcaataacgaactgaatctggctgcacaaccgccagcagttgtgttaatggctggcttgcaaggtgcgggtaagaccaccagtgtagcgaaactggggaaatttcttaaagaaaaacagaagaaaaaagtgctggtcgtgtctgctgacgtttatcgccctgcggcgatcaaacagttggaaaccctggctcagggtgttggcattgatttcttcccgtctgatgcacaggaaaaaccgattgatattgtgaatcgtgccctgcaacaggcaaagcttaaattttatgatgttctgattgtcgataccgcaggtcgcttacacgttgatgaagcgatgatggacgaaatcaaacaggttcatgcggcgattaagcctgttgaaaccttgtttgtcgtcgatgcgatgaccggtcaggatgcggcgaataccgccaaagcattcaacgaagcactgccactcaccggtgtcgtgctgactaaagtggatggcgatgcgcgcggtggtgcggctttatctatccgccatatcaccggtaaacctattaaattccttggcgtcggtgagaaatctgatgcactggaaccgttccatccagaccgaatagcttcacgtatcttgggtatgggcgatgtgctgtcgctgattgaagatatcgaaagcaaagttgaccgtgcgcaagcggagaaactggcaacaaaactgaaaaaaggcgatggtttcgatctcaatgacttcctcgaccagttgaagcagatgcgcaacatgggggggatggccagtatgttgagtaaaatgccaggggcaggtcagttgccagaaaacgtaaaatcgcaaatggatgataaagtcacggtgcggatggaggcgatcatcaattctatgacgctgaaagagcgcgctaaacctgaaattatcaaaggttcacgtaagcgccgtatcgcaaccggttctggtgtgcaggtacaggatgttaaccgtttgctgaaacagtttgatgaaatgcagcgcatgatgaagaaaatgaaaaacggcggtttggccaaaatgatgcgtggcatgaaaggtatgatgccacccgggttcccaggtcgctaa

SEQ ID NO: 42326 - DNA, 894 bp, Yersinia pestis
gtgcaaacgatctctgccctcacgtcggagaacggttggagaggaacgctctcaacgctatactggctatctaattcccttagccgatgctcatataacgctatgcccgtgttttccattttggctttgcttgcttattcgctcagcttggggctgattatcccaagtctggtgcggaaaaatagtgcttaccggcggttagcgctggtttctgccgtcgtggcactagtgtgccatgctattgccttgaaaaatcaaatttttgatgttggcgttggtcagaatcttacgttactgaacattggttctattgttgggctgatgatctgtacgattatgaccattgtcgcttcacaagggcgtggctggtttttactccctattgtctatagcttcgccatgatcaatctggcgcttgccagcctgcttccaggggagtttattacccatttggaagccagcccagagatatttatccacatcggtctggcgctttttgcttatgccacgcttatcatcgcggcgctgtatgcgctacaactggcttggcttgattatcagttaaaacataagaaactgacgtttaatgctgatatgccgccgttaatgagcattgaacgaaaaatgttccatatcacccaaattggggtggtattacttacactgacactttgtaccggtttgctttatatggataatctcttcagtaaagaaaatgtccataaagcggtgttatcgattatggcctggtttgtctatatcgttttattgtggggccattatcatgaaggttggcgtgggcgtagggtcatttggttcagttttgcgggcgcctttctacttacactggcttattttggtagccgtctggtccaggaaattatggttcgctag

SEQ ID NO: 42327 - DNA, 1101 bp, Yersinia pestis
atgaaatttatcattgaacgtgagcatctgctaaaaccactgcaacaggtcagtagcccgctgggtggacgccctacgttgcctattttgggtaacttgttgctgcaagtcacggaaggctctttgcggctgaccggtaccgacttggagatggagatggtggcttgtgttgccttgtctcagtcccatgagccgggtgctaccacagtacccgcacggaagttttttgatatctggcgtggtttacccgaaggggcggaaattacggtagcgttggatggtgatcgcctgctagtgcgctctggtcgcagccgtttctcgctgtctaccttgcctgcgattgacttccctaatctggatgactggcagagtgaggttgaattcactttaccgcaggctacgttaaagcgtctgattgagtccactcagttttcgatggcccatcaggatgtccgttattatttgaacggcatgctgtttgagaccgaaggcgaagagttacgtactgtggcgaccgatgggcatcgcttggctgtatgctcaatgcctattggccagacgttaccctcacattcggtgatcgtgccgcgtaaaggtgtgatggagctggttcggttgctggatggtggtgatacccccttgcggctgcaaattggcagtaataatattcgtgctcatgtgggcgattttattttcacatctaagctggttgatggccgtttcccggattatcgccgcgtattgccgaagaatcctgataaaatgctggaagccggttgcgatttactgaaacaggcattttcgcgtgcggcaattctgtcaaatgagaagttccgtggtgttcggctctatgtcagccacaatcaactcaaaatcactgctaataatcctgaacaggaagaagcagaagagatcctcgatgttagctacgaggggacagaaatggagatcggtttcaacgtcagctatgtgcttgatgtgctaaatgcactgaagtgcgaagatgtgcgcctgttattgactgactctgtatccagtgtgcagattgaagacagcgccagccaagctgcagcctatgtcgtcatgccaatgcgtttgtag

SEQ ID NO: 42328 - DNA, 1389 bp, Yersinia pestis
gtgtcactttcgctttggcagcagtgtcttgcccgattgcaggatgagttacctgccacagaatttagtatgtggatacgccccctacaggcggaactgagtgacaatactctggcgctttacgcacctaaccgttttgtactggactgggtccgtgataagtacttaaacaatatcaatggcttacttaatgatttttgtggcaccgaggtccctttactgcgttttgaggtagggagtaaacctgcggcaagagcacacaataatccagttacagccagcgtgagtgcgcctgttgctccggttacccgcagtgcacctatgcgcccgagctgggacaactcacctgctcagcctgaactttcttatcgttcgaatgtgaatccaaaacacacatttgataactttgttgaaggtaaatctaaccagttggcccgcgctgccgcccgtcaggtagccgataacccaggtggtgcctataacccgttatttctttatggcggaacaggcttgggtaaaacccatctgctacacgcggtggggaatggcattatggcccgtaaagccaatgctaaagtggtctatatgcattccgagcgttttgtgcaagatatggtcaaagccttgcaaaataatgctatcgaagagtttaaacgctattatcgttcggttgatgctttattaatcgatgatattcaattttttgccaataaagagcgttctcaagaagagtttttccacacctttaatgcgttgctagagggtaatcagcagatcattttgacctcagatcgctatccaaaagagattaacggggtggaagatcgtctgaagtcgcgttttggttgggggctgacggtcgccattgagccaccagagctggaaacgcgtgtagcgatcctaatgaagaaagcggatgaaaatgatattcgcttaccaggagaggtcgcgttctttattgccaagcgtctgcgttccaatgtgcgtgaattggaaggggcattgaaccgtgtgatcgccaatgccaattttactggccgcgctatcacgattgattttgttcgcgaagccctgcgtgatttgttggcgttgcaagaaaagctggtcactatcgataatattcaaaagactgttgctgaatattataaaattaaggtcgctgacctgctctccaaacggcgttcccgttcggttgcccgccctcgccaaatggctatggcattggcaaaagagctaaccaaccacagcctgcctgaaatcggcgatgcgtttggtggccgcgaccataccacggtgttgcacgcttgccggaagattgagcaattgcgtgaggaaagtcacgacatcaaagaagatttctctaacttaatcagaacattatcctcctag

SEQ ID NO: 42329 - DNA, 141 bp, Yersinia pestis
atgaaacgcactttccaaccgtccgtattgaagcgcaaccgtagccacggtttccgtgctcgtatggccacaaaaaatggtcgtcaagttctggctcgccgtcgtgcgaaaagccgttctcgtctgactgtttctaagtaa

SEQ ID NO: 42330 - DNA, 360 bp, Yersinia pestis
gtggttaagctcgcatttcctagggagttacgtttgttaactcccagtcatttcactttcgtcttccagcaaccacaacgggctggcacgccgcaaattaccatcctcggccgcctgaacgagctggggcatccccgcatcggtcttactgtcgccaaaaaacatgtcaaacgtgctcatgaacgtaatcggataaagcgcttaactcgcgaaagcttccgtttacatcagcatgcgttaccgtctatggattttgtcgttttggtaaaaaaaggtgtggctgacctcgataaccgtgcgttgacggaagctttggaaaaattatggcgtcgccactgtcgccaggctcccgcatcctga

SEQ ID NO: 42331 - DNA, 1254 bp, Yersinia pestis
atgttggggtcgttgactgtaatgacactggccgtcgctgtttggcggccttttatctatcacccagagcatgaacctgttgccaagagcgtggtgctagataccagtcaatcccgcattttattgccagaagccagtgaacctctcgatcagccaacgcctgacgatgcaatcccacaagatgaattagacaccaaagatgccaatgacactggtgtccatgagtatgttgtgtcaacgggtgatacgttgagcagcattcttacccagtatgggattgatatctctgatgtttctttattagcgaaccaaaaccgtgacttacgtaatctgaagatcgggcagcaaatctcctggacagtgaatgacaccggtgatttacaaagcctgacttgggaagtgtcgcgtcgcgaaactcggacgtataaccgtgttgggaacaatttcaaagagactaaagagctgcagaaaggcgagtggaagaacagtgttctgacgggccgtcttgatggtagttttgtcggcagtgcgaagaaagcagggctgacagccgctgaaattcgtgccgtgaccaaggcactacagtggcaattagatttcagtaagctgcgtaaaggcgatcagtttgcggtcttaatgtcacgggaaatgctggatggtcgcagtgagcaaagccagctcgttggggtacgcatgcggtctggaggtaaagattattatgctatccgggctgaagatggcaaattctatgatcggcagggctctggccttgcacgtggtttcctacgtttccctacactgaaacaattccgtgtctcatccaattttaaccctcgtcggttaaatccggtgactgggcgtattgcgccgcataaaggcgtggatttcgcgatgcctgtcgggacaccggtattagccgtgggcgatggcgaagtcttaatctcaaaattcagtggtgctgccggtaactatgtggttatccgccatggtcgccaatacaccacgcattacatgcatttgaaaaaattgctggttaaacccgggcagaaagtaaaacgtggtgaccgtatcgcgttgtcgggtaataccggccgttcgactgggccacatctgcattatgaattttggatgaaccagcaagcggttaatccactgacagctaaattgccacgttcagaagggttgagtggtaaagatcgcagtgagtatttggccattgttaagcaagttattccgcagttacaactggattag

SEQ ID NO: 42332 - DNA, 1641 bp, Yersinia pestis
atggattcgcaacgcaatcttctactcatcgctctgctgttcgtgtctttcatgatctggcaagcttggcaagtggataacaatccacaaccaaccgctcagaccacgcaacagactacgaataccgctaccggtgataaagcaagccaggctgtgccaggcagcggtcagggtcaactgatcactgtaaaaactgatgtgctgtctctgactattaatacccgtggcggtgacattgagcaggctaacctgctggcttacccagatactttgggttcaagtaatacgttcgaattactggaaaccactccaagtttcgtttatcaggcacaaagtggtctgacaggcaaaaatggcccggataacccagcgaatggcgaccgtcctttgtttgaagtgccacaaaccagctttgttctggcagatggtcaggatgaactgcgcattccattgaccttcacaagtaaagatggctctgttttcattaagactttcgtgctgaaacgtaacgattacgccattggcgtggattatcacgttaacaacgcctccgctgccccactggagctgacgctgtttggtcaattgaaacaaagcatcaacttgcctaaaaagcgtgataccggtagcaataactttgcgctacagacttatcgtggtgcggcttactcttctgatgaaactaaatataagaaatatagctttagtgacatcgaagacaaaaatctggacatcaccaccaaaggtggttgggtcgctatgttgcagcagtatttcgccacagcatggatcccagcggctaacgaaaccaacaccttctactctgctgagttaggtaacggcctggccgcaattggtttcaaaggtgcacctgttgttatccaacccggtgaacagaaacaactgagtgccacactgtgggtgggcccagagattcagaataaaatggcggaaattgcgccacatctggacctgactgttgattatggttggttgtggttcatttctcagccactgttcaaactgctgaagtttatccacagctttgtggggaactggggcttctccatcatcgttattacctttatcgtgcgcggtatcatgtacccgctaacaaaagcgcaatacacctcgatggcgaaaatgcgtttgctgcagcctaaactggccgccatgcgtgagcgtatcggtgacgataagcagcgtatgagtcaggagatgatggcgctgtacaaagcggagaaggttaacccgctgggtggctgcttaccgctgatcattcagatgccaatcttcttggcgttgtactacatgttgatgagttctgttgagttgcgccatgcgccattcattctgtggattcatgacctgtcagcacaagacccgtactacattctgccaattctgatgggtatcaccatgtacttcattcagaagatgtcaccaaccaccgtgactgatccaatgcagcagaagatcatgacctttatgccggttatcttcacggtattcttcctctggttcccggcaggtctggtgctgtactatatcgtcagcaacctggtgaccatcctgcaacaacagctgatttatcgtggtctggaaaaacgtggcttacacagccgcgagaagaaaaaataa

SEQ ID NO: 42333 - DNA, 1443 bp, Yersinia pestis
atgtccagacggctcagaaggaccaagattgttactacactggggccggctactgaccgcgacaataatctggaaaagattattgctgcaggtgcgaacgtagtccgcctgaatttttcccatggtagcgctgaagatcatgaattacgggccaataaagtccgtgaaatcgctgccagactggggcgtcatgtagctattcttggtgatttgcaaggtcctaaaatccgggtatcgacgtttaaagaaggtaaagttttccttaatataaacgataaattcctgctggatgccaatatggcaaaaggcgaaggtgataaaaacaaagtgggtatcgattacaaaggcctgccagctgatgtggttcccggtgatattttattgcttgatgatggccgcgtgcagttaaaagtggttgaagttcagggcatgaaagtcttcaccgaagtgaccgtcggtggcccgctctctaacaataaaggcatcaacaagttaggtggcgggttatcagccgaagccctaaccgaaaaagataaagccgatattgttaccgctgcaaaaattggtgtggacttcctggcggtctctttcccacgtactggtgaagatttgcattatgcacgccgcctggcccgtgatgctggctgcaatgcacagatcgtcgcaaaggttgagcgcgctgaagcggtcgccactgatgaggcgatggatgatatcattctggcctctgacgtcgtcatggtcgctcgtggtgatttgggtgttgaaattggcgacccagaacttgttggtatccaaaagaaactgatccgccgtgcccgccagctaaaccgtgccgtgatcacggcgactcagatgatggagtcaatgatcaccaacccgatgccaacccgagcagaggtgatggatgttgccaacgcagtgctggatggtaccgatgcggtcatgttgtcagcagaaacagcagcaggccagtacccggcagaaaccgtagcggcaatggcgcgtgtctgtctaggcgcggaaaaaatcccaagcatcaatgtgtcaaaacaccgtctagatgtgcaattcgataacgtcgaagaagctatcgcgatgtcgaccatgtatgcggcaaaccacctcaaaggtatcaccgcgattatcgccatgactgaatcaggccgcacggctttgatgatgtcgcgtatcagttccggtttacctattttcgccatgtcgcgccatgatcatactttaaacctaaccgccatctatcgtggcgtgacgccggtctattgtgatccccatactgacggtgttcttgccgccacagaagcagtaaaacgcttgcaagataaagggttcttggtgtcaggtgatttggttatcgttactcagggcgatgtgatgggcaccattggtacgaccaataccagtcgtatcatccgcgtcgaataa

SEQ ID NO: 42334 - DNA, 1365 bp, Yersinia pestis
atgagcaccactgatactatcgtggcccaagcaacgccccctggtcgtggcggtgtcggcattctacgtgtttcaggtcgtgctgcctcagaggttgcacacgccgttctgggtaaattacctaagccacgttatgccgattatctgccgtttaaagacgtggatggcagcacgctggatcaaggtatcgctctctatttccccggtccaaattctttcactggcgaagatgtattagagctgcaaggccatggtgggccggtgatactggatttactgttaaaacgcattctggccctgccagggctgcgtattgcccgcccaggggagttttccgagcgtgccttcctcaacgacaagctggacttagcacaggctgaagccattgccgacctgatcgacgccagttcagagcaagcagcacgttcggcagtaaactcattgcaaggcgcattttcagcgcgtatccatcaattggtggaagcacttactcacctgagaatctacgttgaagctgccattgactttccagatgaggaaattgacttcctttctgatggcaaaatcgaaggccaactgaatggtgtcatggccgatctggaacaggtacgtactgaggctagacaaggcagcttactacgtgaagggatgaaagtggtgattgctggccggccaaacgcagggaaatccagtttactcaatgcgttagctggccgtgaagcggcgattgtaacggatatcgcgggcaccacccgtgatgttttacgggaacacattcatattgatgggatgcctttacatatcattgataccgcagggttgcgggaagccaatgacgaagttgagcgcattggcattgaacgcgcgtggaacgagatagaacaggctgatcgtgtattgtttatggtggatggcaccaccaccgatgccaccgaacctgcggctatctggccagagtttatggcacgcttaccggcaacactgcccatcactgtggtacgcaataaagcggatataacaggtgaaacgctggggctgaccaaagtgaatggtcactcacttattcgcctgtcggcacgcactggagaaggtattgacctgctgcgtgaccatttaaaacaaagtatgggctttaccagcaacactgaaggcggtttcctggctcgacgtccccatttacaggcactggagactgccgccaggcatttgatacaaggccatgagcagttagtgagcgcttacgctggtgaattactggcagaagaactgcgtttagcacaacaatcattgagtgaaattaccggtgaatttagttctgatgacttactggggcggattttttccagtttctgtatcggaaaatga

SEQ ID NO: 42335 - DNA, 1485 bp, Yersinia pestis
atggcagtaatgaatacagtccaggtagcccaggcgtgtgacctggtgattttcggcgctaaaggtgatttggctcgccggaaactgctgccttctctttaccaattagaaaaagcgggtcatatccacccagatactcggataatcggtgttggccgtgctgagtgggataaagatgcgtacaccgctgtggtaaaggaagccctcgatacctttatgaaagagccgctggatgacgagctatggcaaaaactcagctcgcgcctcgacttctgcaatctggatgtgaatgacagtaagcatttcaccaaattaggtaaaatgctcgatcaaaaacatcgcaccacgattaactactttgctatgccgccgagtacatttggtgcgatttgtaaaggcctgggagaagccgggttaaacaaagagcctagccgagtggtaatggaaaaaccattgggaaccgatttagcgccctcaagggtaattaacgatcaggtagccgagtatttcaacgaatgtcaggtttaccgtattgaccactatttagggaaagaaacggtattaaacctgttggcgcttcgcttcgctaactcgttgttcgcctcaaactgggacaaccgcactatcgatcatgtgcaaattaccgtcgcagaagaggtcggaattgaagggcgttggggctattttgatcaggccggtcagatgcgtgacatgatccaaaaccatctgttgcaaatcctgacgatgatcgccatgtcaccccccgcagatctcagtacggatcgcatccgtgatgaaaaagtaaaagtactgcgttcgctgcgccgtattgatcacaccaatgtgcgcgaaactacagttcgtgggcaatatactgccggctttgtacagggcaataaagtgccgggttatctggaagaggaaggcgcgaataagaatagcaataccgaaacatttgtgtctattcgggtggatatcgatgactggcgttgggctggggtacctttctacctgagaaccggtaagcgcctacccagcaaatgctctgaagttgtggtttactttaagaaccccgcactgaatctcttccgcgaatcttatcaacaactgccacaaaacaaactgacaattcgtttgcaaccggacgaagggatcgaaattgaagtgctgaataaagtccccggattggaacataagcatcgtttacaaaccactaagcttgatctcagtttctccaaaaccttcaatgagcagcatattgctgatgcctatgaacgtctgctactggagaccatgcggggtattcaagcgctgtttgtgcgccgtgatgaggtcgaagaggcgtggaaatgggtcgattctattatgaatgcgtgggcggcagataatgaagcaccaaaaccataccagtccggtacatgggggcctgtggcatccgttgctatgatcacccgtgatggccggtcatggaatgagttcgagtaa

SEQ ID NO: 42336 - DNA, 1908 bp, Yersinia pestis
atgccgattcagattctgcctccacagcttgccaaccagattgccgccggtgaggtggtagagcggcctgcatcggtagtcaaagagttggtagaaaacagtctggatgcgggtgctacacggattgatattgatattgaacgtggtggggcgaaacttattcgcatccgtgataatggctgcggcatcagtaaagatgatttggcactggcgttggcccgccacgccaccagcaaaatcagttcactcgaggatttagaagccatcctcagtatggggtttcgcggtgaagccttggccagtatcagttcagtttcacgtcttatcttaacctcacgtaccgctgagcaaagcgaagcctggcaagcctatgccgaaggtcgcgacatggcggtcaccatcaagcctgcggcacacccggttggcagtacacttgaagtgttggatttattttataacacccccgcgcgccgcaaatttatgcgaactgaaaagacggagtttggtcatattgatgaggtcgtcaggcgcattgcgctggcgcgcttcgatgtggcaataaatttgaaccacaatggtaagttaattcgccaatatcgtgcggcaccagaccctgcccaacatgagcgtcggttggcaagtatttgtggtccggcgtttttgcaacatgctttggctatcgcttggcagcacggggatttgaacattcatggttgggtggcggatcctgccgcgagccatacgctgagtgaaatgcaatattgctatgtcaataaccgcatgatgcgtgatcggttgattaatcacgcgattcgccaggcttatcaagatcgactcaacgatgctcaacagcccgcttatgttttgtatctggatatcgatccgcatcaggttgatgtcaacgttcatccggctaagcatgaagtgcgttttcatcaggctcggttggtacatgactttatttatcaggcagtcactgcggttttacaacaaactaatgcgccgatactgaacatcagtgaagaaggtgaagttgacgctccacgttggcagcaggaaaaccgggtagcggctggcaccaataaatatgctcaaccggaagcggcgaaatccagtgcggcggagcaggctgtggctcgcgagcgttcgtctgcccgtgaacgcgctgcgccggcctataaagaagatcacccctatcagaagcaacaaggggagttataccgccagctattgcaaccgtcagcggcagccaaacccgcaacatcgccagcggcaatacctgcgtcatctgtttcctcaccatccatcccggttcaacgaattactcaggcagaagagccgcttcacggtgataattacagttttggccgagttttaacggtttttccaccttgttatgctttgattgaatatcagggcggggtagcattgctatccttagccgttgcggagcgttggttgaaacaagctcagctcagcccgccagaagaggggttacgccctcaaccgttattgattccactcaaaatcacattagacaaaaatgaaatagcggcttgtcagaaccatgaaaaattgctaattaccatgggaatagagctgagtgtcgagcaggggcgggcgaccttacgtgcggtttctttaccattacgccaacaaaatttacaaaaactgataccggaactgttaggctatctgtcgcagcatgaagagatatcgccagatacactggccacatggcttgcccgccatcttggtagcgaacatgaggtatggaatgtgtctcaagcgatacagttattgacggaagttgagcgtctttgtccgcagttggtgcaatctcctcctgctgggctattacaacctattgatataaaggccgcattggcaactttgacacatgaatga

SEQ ID NO: 42337 - DNA, 186 bp, Yersinia pestis
atgcttattctgactcgtcgagttggtgaaacactcatgattggcgatgaggttacggttactgtattaggggttaaaggcaaccaggttcgaattggtgtaaatgctccgaaagaggtttctgttcaccgtgaagaaatctaccagcgcatccaagcagaaaagtctcaaccgacgacttactga

SEQ ID NO: 42338 - DNA, 2628 bp, Yersinia pestis
atgagcaagagcaccgctgagatccgtcaagcgtttctcgatttcttccatagcaagggacaccaggttgtatcaagcagcactttggtccctaataatgaccctacgctgttgtttaccaatgccgggatgaaccagtttaaggacgttttcttaggtttggataaacgggcctattcccgtgcgacgacctctcagcgctgcgtgcgagcgggtggtaagcataacgacctggaaaacgtaggttataccgcgcgtcatcatactttcttcgaaatgttgggtaacttcagcttcggcgattacttcaagcatgatgctatcaacttcgcttgggagttactgaccagtgaacagtggtttaatttaccaaaagaaaaactttgggtaacggtgtacgagaccgatgacgaggcctataacatctgggctaacgaagtcggcgttcctcatgagcgtatcatccgtatcggtgataacaaagggggggcctttgcctcagataacttctggcaaatgggtgataccggcccttgtggcccatgttcagagattttctttgaccatggtgatcatatctggggtggtcctccagggtctgcagaagaagatggcgatcgctatatcgagatctggaatatcgtctttatgcagtttaaccgtcagtctgacggtacgatgctgccattgccgaagccatcggttgataccggcatggggctggaacgtattgctgcggtattacagcatgttaactccaactatgagattgacctgttccgtgatttgattgccgcagtcgcagatgtcacgggggcgacggatttatccagcaagtcgttgcgggttattgctgatcacattcgttcttgtgctttcttgatttcagatggtgtgatcccatcgaatgaaaaccgcggctatgtcttacgccgtattattcgccgtgcaattcgccacgggaatatgttgggtgcgaaagagactttcttctacaaactggtggctcccttgatcgcggttatggggcctgctgctgctgagttaaaacaacagcaagcgatggtagagcaagtattaaagacggaagaagagcagtttgccaggacgttagagcgcggtttggcgctgcttgatgacgagctcagcaagcttaccggcgatacccttgatggggaaacggccttccgcttgtacgatacctatggcttcccagttgatctaacggcagatgtttgtcgcgaacgtaacctgaaagtcgatgaagctggctttgagcaagcgatggaagctcaacgtcgccgtgcccgtgaatccagtggttttggcgcagattacaacagcttgatccgtgttgatagcgcaagccaattttctggttatgaccatgtccaacaacacgcgacggttactgctctattccgtaatggcgaggccgttgatgagattcacgcaggtgaagaagccgttgtcgtactgaatcggacaccattctacggtgaatcgggtggtcaggtcggcgataagggggaactgaaaaatgcgacagcaacctttagcgttactgatactcagaaatatggtcaggctatcgggcacgtaggaatattgactaccggcacgttaagagttaaccacagcgtcgaagcattggttgatgttgtgcgtcgtaaccgtatccgtctgaatcactccgcgacccacttactgcatgctgcgttacgtaacgtcttgggcgagcatgtggcccagaaggggtcactggttaatgacaaatatctacgctttgatttctctcatttcgaagcaatgaagccggaacaaatccggttggtagaagatctggtcaatgaacaaatccgccgtaacatgccggttcagaccgaagtgatggaactggatgcggcgaaagaaaaaggtgcaatggcactgttcggcgagaagtatgacgaccaagtacgtgttctgaccatgggtgacttctcaacagagttgtgtggggggactcatgctagccgcacgggggatatagggttattccgcatcctgaccgaatctggcacggctgcgggtattcgtcgtattgaagccgtcactggcgagggcgcgattgctttattgcatcagcaaagcgacctgttacaggacgtcgctcatctggtgaaaggtgatattcataatctggcagacaaagtccgggcggtattggatcgcagtaaaatgcttgagcgtgagttgcaacagttgaaagatcagcaggcagctcaggaaagtgcctcgttgtcttcaagcgcgaaattgatcaatggtgtgaagcttttggtcagtcagttggataacgttgaaccaaaaatgctacggacaatggtcgatgaccttaaaaatcaactgggttctgccattattgtattggccaccacagctgatgataaggtaagtttgattgttggggtgaccaaggacctgacaggtaaagtaaaagcgggtgaattaatcgcggacattgctcagcaggtgggcggtaaaggcggtggtcgtcctgatatggctcaggcggggggtactgatgtgcaggctttgccagcggcattagccagcgtagaagcatgggtagcatcccggatgtaa

SEQ ID NO: 42339 - DNA, 564 bp, Yersinia pestis
atgaatgaccagttaagtcgtgcaatgagactactctcccagcgtgaccatagtgaatctgaactgcgtcgcaagcttgcggcacctccattttcggcaaaagggaattggggaaagcgttcaggtgctaaaagcagtgatgtagttgaaagtaatctagttgaaagtaacccagttgaaagcaatttagctgaaagtaatgcaattgaagagagtgatcctcaggttatcgagcaggttattgactattgttatcagcacaattggttggatgattcccgttttgccgccagctatattaatagtcgtagccgtaaaggatatggcgtacagcgtatccgttcagaactgatgcaaaaaggtgtcgataaagaacgaattctggctgcttttgagaacagtgagatcgactggtgccaactggcaaaagaggtcgcccagcgtaaatttagtgaaactttacctgttgaatggaaagaaaaggctaaagttcagcgttatctcctctatcgtggcttcttccaagaagaaattcagtcaatttacactgattctgtcgaatga

SEQ ID NO: 42340 - DNA, 1071 bp, Yersinia pestis
atggctattgatgagaataaacaaaaggcgttagcagcagcactgggccaaattgaaaaacaattcggtaaaggctctattatgcgccttggcgaagaccgctcaatggatgttgaaaccatctctaccggctccctttcccttgatattgcactgggggctggtggcttaccaatggggcgtatcgttgagatttatggcccagaatcatcaggtaagacgacactgacattacaggttatcgccgccgcacagcgtgaaggcaaaacgtgtgcatttatcgatgccgaacatgcccttgacccaatctatgccaagaaattgggtgtagatattgataacctattgtgttctcagccagatactggcgagcaggcactggaaatttgtgatgcgctgactcgctctggtgcggttgacgttatcatcgttgactccgtagcggcattgacaccaaaagctgaaattgaaggtgaaattggcgattctcatatgggccttgccgcgcgtatgatgagccaggctatgcgtaagctggcgggtaacctgaagaatgcgaataccttactgatttttatcaaccaaatccgcatgaaaattggcgtgatgtttggtaacccagaaaccactaccggtggcaacgctcttaaattttacgcttctgtacgtttggatatccgccgtattggtgcagtaaaagatggtgatgtggtcgtggggagtgaaacccgcgttaaagtcgttaaaaacaagattgctgcgccattcaaacaagctgaattccagatcctctacggtgaaggcattaatatcaacggtgaactggttgacttaggtgttaaacacaaactgattgagaaagctggcgcatggtatagctataacggtgataaaattggtcagggtaaagccaatgccagcaactatttaaaagaaaacccagccattgctgctgagttagataaaaaactgcgtgaaatgctacttaatggcggcaatggtgaacaacctgttgctgcggcaacagcagaattcgccgatggtgcagatgaaaccaacgaagaattttaa

SEQ ID NO: 42341 - DNA, 738 bp, Yersinia pestis
atgaatctacatcatctgactgattggctattagccccgcaatatcttggttggctgtgggatggttttttactgacgttgtggatttccgcctgtacggtggtggctgccacgttattgggatttttgctggccgcggccagagacagtgagttaaaggccttgaaaggctttgctattggctacagtgccttattccgaaatactcctctgctgatccaattattcttttggtactttgctgccagccaattcctgccagcttcttggatcccttggctcaatactccccatgaaattacgcttgccggattaactctggcctggccctcttttgagtttttagccggttttgtcgggttgacactctattccaccgcatttattgctgaagagctgcgtgcgggcatcagcggcgtagccaaggggcagaaatatgctgcacatgcgctggggctgacggggtggcaatcgatgcggtatgtggttttgccgcaggctttgaaaatagccatgcctccgttgctgggccaatatatgaatattattaaaaactcttcattggcaatggctattggtgtagctgaactctcctatgcttcccggcaggttgaaactgaaacattacggacgtttcaggcattcggggttgcaaccctattgtatattttcatcatcgcgctaattgaggcttggggtatgtggcgtcaacagcgaaccgtcgtccgagggcactga

SEQ ID NO: 42342 - DNA, 1488 bp, Yersinia pestis
atgtcaacgccaatcattctggctattgatgaagggacaaccaacgccaaagccattgcggtagatcgtgccgggcgagttctggcgaaagcctcggtaccattacaactggagcatcctcagcccggttgggcagaacaggatccgctggcgatttggctggcggtttctcaggcggttgaggggtgcctaaatcaattggcgggcgcacaggtggcggggattgccatcagtaatcagcgtgaatcggtactgatttgggaacgggaaaccggcacgccgctcacgccagtcgtaagctggcagtgccgtcgttcagaggctttctgtctggctttgcgccaattaccggctgcggcgatggttgcggaacggactggattgcagattgatcccctgtttcctgcggctaaaattcatggcatgttggcgcagatccctcatggcgctgaacgtgccgctcacggtgagctgtgtgttggcacgcttgattgctggctgacctggcagtttagcgaagggcaaagtttctcgactgacttctctaatgcggcccggacccagctgtttaatatccattcaggtcaatgggaccccgatttactggcgctgtttggtatcccaagtctttgcctgcccgccgtcttaccctcggcatccatccacggacacaccgcgcgcaccgggattctcggcctggagcagggcgtgcctatcgtggcacacattggtgattcgcacgccgcgctgtacgggcaaggcggcgaccaggccggtgaaatcaaagccacttatggcaccggctcctctctgatgatgacgctaaaacaggccagtgcaccaagccacggcctaagcaccaccattgcctggcatgacggcgaattacgttatgcccttgaaggtaacatcacccataccggctcaggagtggcatgggtctcgcgcatgttagggatcagtgatttgtcacgtctgactgacatggcagaaagccaatcaggtaatcaaggcgtctattttgtaccggcattatcaggactgggtgcgccttattgggacagtcaggcgcgtggtttgttctgtggtctgacggatgccacgacaccggccgtactggcgcgagcggcacttgaatcagtcgcttatcaaatagccgatgttttctttgcgatggagaatgcggctcatcatcgccttgaacggctgcgggttgatggcggcgcgaccagtaatcgctggctgatgcagtttcaggccgatttattgcagcgcacattgatacgtaatcacacggcagaagtgtcagcactgggtgccgcgtatttgggcgggaaaacccttggctggtggcaggatagccaacaactggctgcgctcccccgtgaagtggaatacatcgaaccgcgcattcacagtgcggagatgcaagataactatagcctctggcaaacggccatcgcgcgtgcgcgttttcagccgaaataa

SEQ ID NO: 42343 - DNA, 945 bp, Yersinia pestis
atgagtaatgcagaacatttggcctcagtgatggtcgagcagtttatcaaggcggtcgataacggcgttgatttggtccccgtggttgctgactcgacttcaacggcaaaaattgggccgtttatcacacgcttccctgatcgggtggtcaacgttgggattgccgaacaggcgatggtgggcatggcggtcggcctatccatgggggggaaaattgcggtgacctgtaatgccgcaccgtttctgatttcgcgtgctaacgagcagttgaaaattgatgtttgttacaacaacagcaatgtaaaactgttcggtttgaactccggtgccagctacgggccactggccagtacacatcactgtatcgatgacatcgccatcctacgtggcttcggtaatatcgaaatctacgcccctgctgatccccaggagtgccgtcagatcattgattatgcgttggcccatcagggtccggtatatattcggttggatggtaaagcgttgccgccactgcatgatgagcattatcgatttgctcccggtcaaattgatgtcttgcaagagggacgggatattgctctggtcgcgatgggatctacagtacatgaagcggtcagcgcggcagccatactggcagacaacaatatttctgctgcggtggtcaacgtttcctctatccgcccgtgtgatactcagcaactgttcgccatcctccaacagagtcagcgggtgattaccatagaagagcacaatattaatggcggcgtggggagtctggtcgcggaagtgctggctgaggcggggagtggtactccattagtgagactgggtattcctgacggtggttatgcgattgccgctgatcgggctgagatgcgtgcctatcatggttttgatgcggcaggcattgtggctcgtgctctgcggttttgccgaggggaataa

SEQ ID NO: 42344 - DNA, 777 bp, Yersinia pestis
atgagtatggctactgacgtcaccaacagtaaaattcaggttcgcgatttgaacttctactatggcaaattccatgcactgaagaatatttcgttggatattgccaagaatcaggtcactgcgttcatcggcccgtcaggttgcggtaaatctactttactgcgtactttcaataaaatgtaccagctgtatccagaacagcgggcggaaggtgacatcttattagatggccaaaatatcctaaccgataaacaagatattgctttgctacgggcaaaagtcggtatggttttccaaaagccgactccgttcccgatgtcgatttacgacaacatcgcttttggtgtcaaactgtttgagagcttatctcgcgccgatatggatgagcgggtgcaatgggcattgaccaaagcagcgttatggaatgagaccaaagataagttgcaccagagcggttatagcttatcgggcgggcaacagcagcgtctgtgtattgctcgtggtatcgccattcgccctgatgtattactgttggatgagccttgctcggcgcttgacccgatctctaccggccgtattgaagagctgattagtgaattgaaatcggactatacggttgtgattgtaacgcacaatatgcagcaagctgctcgctgttcagatcacacggcatttatgtatctgggcgagcttattgaattcagtgatacagataccctgtttacgacgccacagcaaaaacagacagaagattatatcactggtcgctatggttga

SEQ ID NO: 42345 - DNA, 1260 bp, Yersinia pestis
atggcgtggaatcagcccggtaataacggacaggaccgcgatccgtgggggagcagcaataataatggcggcaactctggcggaaataataataaaggtggtcgtgaccaagggccgccggatctggatgatatcttccgtaaactgagcaaaaaactgagtagcctcggtggcaaaggtagcggaagtggtggtaatggcgcatcacatggccctggtttcagtggtcgtgttgtgggtatcgctgttgttgctgttgtggtcatctgggctgcaagcggtttctataccattaaagaagctgagcgtggtgttgtcacccgtttaggtaaattgagccacattgtgcagcctggcctgaactggaaaccgacctttatcgatgaagtggttccggttaacgtcgaggccgtgcgtgaattggccgcttctggggtcatgctgacctccgatgagaacgtagtgcgcgtcgaaatgaacgttcagtatcgtgtgactgatccggccgcttatctgtttagcgtgacgaatccggatgacagtctgcgtcaggcaacagacagcgcagtacgtggtgttattggtaaatacaccatggataaaatcctcactgaaggccgtaccatcgtccgtagtgatacccaacgtgtgctggaagaaacgattcgtccgtaccaaatggggattacgttattggacgttaacttccaggctgctcgtccgccagaagaagttaaagcggcatttgatgacgcgattgctgctcgtgaaaacgaacaacaatacattcgcgaagcagaagcctataccaacgaagttcaaccacgtgctaatggtcaggcgcagcgtctgttagaagatgctcgtgcttatgccgcacgtaaagtgttggaagcacagggtgaagtcgctggttttgctaagttgctgccagagtataaagcggcaccggaaattacccgtgagcgtctgtacatcgaaaccatggaaaaggtcctgggcaaaaccaataaagtgctggcgaatgataaaggcaataatttgatggtgttgccactggatcaaatgctgcgtggtcaaggtgctgctaataaagttgatggcaacaaagataccagtctgattcgtttgaatccggcacccagcagccaacaaactggtgcgagtaattcaaataccagctcaggcagtggttctatcatggatcagcgccgggtgaatgctcagcgtgatacttccactcgcgtagggagagaataa

SEQ ID NO: 42346 - DNA, 1299 bp, Yersinia pestis
atgggtaagaacgtcgtcgtactgggcacccaatggggtgacgaaggtaagggcaaggtcgttgacctgctgactgaacgggctaaatatgttgtgcgctatcaaggtggccataacgcgggccatactttggttatcaacggtgagaaaaccgttcttcatttaattccctcaggtattctacgtgaaaacgtaatcagcatcatcggcaacggtgttgtactggctcctgacgcgttgatgaaagagatgacagagcttgaagcgcgcggtgtgcctgttcgtgagcgactgttactctccgaagcatgcccattgatcctgccttatcatgtggctctggataatgcgcgtgaaaaagcacgtggtgcaaaagctatcggtactaccggtcgtggtattggccctgcctatgaagataaagttgctcgccgcggcctacgcgtcagtgacttgttcaataaagaaaccttcgctatcaagctgaaagaaattgtggaataccacaacttccagttggtgcattactacaaagaagcggcggttgactaccaaaaagtgctggatgatgtattggctatcgccgatattctgacggccatggtagttgatgtttctgaattgttggacaatgcccgtaagcaaggcgagttgatcatgttcgaaggcgcacaaggcaccttgctggacatcgaccacggtacttatccgtatgtcacctcatctaacaccaccgcgggtggcgtagcgacaggctctggcctgggtccacgttatgttgattacgtgctgggtatcgtaaaagcctattctacccgtgtaggtgcaggtccattccctaccgaactgaacgatgaaactggtgagttcctgcgcaagcaaggtaacgaatatggcgcgactaccggccgtagccgtcgtactggctggttggatatcgtagccgttcgccgtgcagtgcagatcaactccctgtctggtttctgcatgaccaaactggatgtgctggatggtctgaaagaagtgaagctctgtgttggctaccgtatgcctgatggccgcgaagttgatacaacgccactggctgcagaaggctgggaaggcatcgagccaatctacgaaaccatgccaggttggtcagaaaccacctttggtgtgaaggaacacagtaagttgccacaggcagccctgaactacattcaacgtgtagaagagctgacaggtgtgccgattgatatcatctctaccggccctgatcgtgacgaaaccatgatcctgcgtgatccatttgatgcataa

SEQ ID NO: 42347 - DNA, 957 bp, Yersinia pestis
atggctgcgtacaagccgacgatcaaagcaccgagtaaatacggtgacatcattttcagtgcgctagtaaaactggctgcgctgattacgctatttctgttgggcggcattatcatttcattgattgttgcttcctggccgagtatagaaaagtttggttttgcttttctctggaccaaagagtgggatccaccggctgagcagttcggggcattagtaccgatttacggcacaatagtcacctcggttattgccctgattattgccgtgcctgtcagttttggtattgctttgttcttaacggaactggcgccaaattggttaaaacggcctttgggcgtcgcgattgagttgttagcggcgatcccaagtattgtttacggtatgtggggcctgtttgtctttgctccattatttgcccgctattttcaagagcctgttggcaacgtgatgtccggtattccaattgttgggactttgttctccggccctgcattcggtatcggtattttggctgcgggtattattttagccatcatgattattccttacattgcggcagttatgcgcgatgtctttgaacaaacgcccgtgatgatgaaagagtcagcttatggcattggctgtaccacttgggaagttatctggcgcattgtgctgccttacaccaagaatggggttatcggcggtgtgatgttaggtcttggccgtgcattgggtgaaaccatggcggtgacatttattatcggtaacacctaccagctcgatagtttctcactgtttatgcctggtaacagtattacctctgcgttagcgaatgaatttgcagaagcagaatctggcttacataccgccgcgttaatggagttgggacttattttgttcgttattacctttatcgtgctggctctatctaagttaatgattatgcgtctggctaagaacgaggggcgttaa

SEQ ID NO: 42348 - DNA, 975 bp, Yersinia pestis
atggtgaatatatattcaatgcggagaaaaataatgaaaaataccctactgaaatcctgtcttaccgcagcattaatctcaatggcaggcgttgctggtgcggccagcaatggtctgatcgccatcatcaccccctcccacgataatccgttctttaaagcagaggctgaaggtgccaaagcgaaagcgacggaactgggatacaccacactggttgcttcgcatgatgacgatgtgaacaaacagaaccaactcattgagaccgctatcgcccgtaaagccaaagcgatcattctggataacgccggctctgacgcgaccatcggcccattgaaaaaagccaaagccgcgggtatcccggccttccttattgaccgtgaaatcaatgaaaccgggattgccgtctctcagattgtctctaacaactatcagggcgcgcagctgggcgcggagaagtttgtcactctgatggggggcaaaggtaaatatattgaattactggggcgcgagtctgacaccaacgctcatgtacgttcgcagggttatcacgacgtcattgacgaacatagcgacatgaagatggttgctcaacagacagcaaactggagccagactgaagcattcaaccgtatggaatctattttgcaggctaacccagatattacaggggtcatttccggtaacgacacgatggcattaggggccgaagccgcattaaaagcggcgggccgcaatgatgtggtggtggtggggtttgatggcagtgactatgtccgcgactcgatcattaacaacggcaatatcaaagccaccgtattgcagccgggttgggcgcaagcacaaatggccgttgtccaggccgatcagtatctgaaaaccggtaaaaccggtctggaagagaaacaactgatggactgtgtattgattgacgaaaataacgctaagaacctgaatgtctttgcgctgaaagactag

SEQ ID NO: 42349 - DNA, 1830 bp, Yersinia pestis
atgtgtggaattgttggcgcagtagcgcaacgtgatatcgctgagattctgatcgaaggcttacgtcgccttgaataccgtggctatgactccgctggtttagcggtagttgatagtgaaggtcacctgactcgtttacgtagggtgggtaaggttcatgctttgtctgatgctgctgaaaagcaggatttacacggtggcacgggcatagctcatacccgctgggctacccatggggagccgtcagaggctaatgcacaccctcatgtttctgactatatctccgtcgtgcataacggcattattgagaatcatgaaccgttacgtgaattattaattagccgtggctatcgttttagctctgaaactgacaccgaagttattgctcacttagtacattgggagcagcagcaaggggggtctttgctggaagttgtgaaacgtgtgattccgcaattacgcggtgcatacggtactgttgtgatggatagccgtgacccaagtcgtctgattgccgctcgttcaggtagcccgctggtgatcgggtgcggtgtgggtgaaaactttattgcttctgaccagcttgctttactgccagttactcgccggtttatcttcttggaagaaggtgatgtggttgaagttactcgccggagcatctctatctttgataagcagggtaatgctattgagcgccctgaaatcgaatctcaggtgcaatacgatgcgggtgataaaggtatttaccgccattacatgcagaaagaaatttatgaacagccaatggcgattaagaatacgctggaaggccgtttaagccacgggatgattgatctgtcagaacttggcccaaaagctgatgccctgttggcagaggttcaacatattcaaatcattgcctgcggtacgtcttacaactcagggatggtttctcgttattggtttgagtctttagcgggtgtgccatgtgatgtcgaaattgcctctgaatttcgttatcgcaaatcagctgtgcgtccaaatagcctgttgatcactttgtcacaatctggcgaaacggctgatactctggcagctctgcgtttatctaaagagttggggtatttaggttcactggccatttgtaacgttgcaggatcttctttagttcgcgaatcagatttagcgctgatgaccaaagcaggtactgagattggtgttgcttcaacaaaagcctttaccactcaattgactgttttgctgatgctggtggggcgtataggtaagctgaaaggtgctgatgccagcctggagcacgatattgtccatgcgttacaggcattgcctgcacgtattgagcagatgttatctctggataaaaccattgaagcgttggctgaaggtttctctgataagcatcatgcactgttccttggccgtggtgatcaatacccgatcgcaatggaaggggcgctgaagctgaaggagatctcttatattcacgcagaggcttacgctgcgggtgaattgaagcatggcccattggcattgattgatgcggatatgccggtcattgtggtggcaccgaacaatgaattattggaaaaactcaaatccaatattgaagaagtgcgtgctcgtggtggtttgctatacgtgtttgctgatcaagatgccgggttcactgatagcgaaggtatgaaaataattcagctgccacatgtcgaagaaattattgcgcctatcttctataccgtaccgctacagctactgtcttatcatgtcgcgctgattaaaggcactgatgtggatcagccacgtaacttggcaaaatcagtaacggttgaataa

SEQ ID NO: 42350 - DNA, 2214 bp, Yersinia pestis
atgttaaaaaaaatcttacccgtactaataactctcgccattgtacataatacacctacggcttgggcagcagaagcacccaagactgatagtttttacttacccaaaagcctcgatctctctccactccgtttacataatatagagtccaatccttacggaaaggattttaattatgctcaacagtttaaaacactggatcttgaagcagtaaagaaagatataaaaacagttcttaccacatcacaagactggtggcctgctgattatggtaattatggtccattctttattcgtatggcgtggcatggtgcgggaacctaccgcatatatgatggccgtggtggtgccgatggcgggcagcaaagatttgagccactcaatagctggccagataacgccaaccttgataaagcgcgtcggcttctgtggcctataaaaaagaaatatggcgctaaaatatcgtggggcgacctgatggtccttacaggcaatgtcgcgctcgaatctatggggtttaaaacgctggggtttgcaggaggccgtgaggatgattggcaatccgatctggtctactggggggcaggcaacaagatgctgtctgataacagggataaaaatggcaagctacccaaaccgctggcggcgacacaaatggggttgatttacgtaaaccctgaaggaccaaatggtaaaccagacccggttgctgcggcaaaagatattcgtgaagcgtttgccaggatggcaatgaatgatgaggagaccgtggcattgattgcgggagggcataccttcggtaaagcgcatggcgcagcgtctcctgaaaaatgcctgggtgcagcaccgggtgaagcggggctagaacaacaaggtttaggatgggcgaataaatgtggttcaggtaatggtaaggacacgataaccagtgggttggaaggggcatggacaaccgatcctacgcattttacgatgcaatacctgagtaatttatacaaacatgagtgggtattgaccaagagcccagctggggcctggcaatggaagcctaaaaatgcagccaatgtcgttccagatgcaaccgatccaactaagttccatcctttgatgatgttcacaacggatattgccctaaaagttgatcctgaatacaagaaaataacgacacgtttcctggaaaaccctgaagaattcaagatggcatttgcccgcgcgtggttcaaactgacacaccgtgatatggggccagcagcccgttatttgggggatgaggtacctaaagaaacatttatctggcaagacccgctgcctgctgccaattataagatgattgacagtgcggatatttctgaactgaaagataaaatattgaagacaggtttatctgatacaaaactgattaagaccgcttgggcttcagcatccacattccgtggtaccgatttccgtggcggtgataacggcgcccgaattcgtctggcaccacaaaaagactggccagtcaacgatcccgcagagctacacagtgtactggcggcactcatggaggttcagaacaatttcaataaagacagaagcgatggtaaaaaagtatccctatcggacctgattgttctgggcggaaatgcagccattgaggatgcagctaaaaaagcgggatacagtatcagtattccatttacaccgggtcggacagatgcttctcaggaagaaaccgatgtcagttctttcgcggtactggaacccacagccgatggattccgtaattactacgatgcaaaaagaaatacgctttcgcctatcgcgtcgttgattgatcgggcgaataaactggaactgaccgtgcctgaaatgacagtactgattggtggacttcgtgtactggatgttaactcgggagggtctaaggctggtgtgttgacgaatacgccagggcagcttaataacaacttttttgttaacctgcttgatatgtcaaccaaatggactaaatcacctaaagctgaaggatatttcgatgggtatgatcggaaaacagggaaacttaaatggacagcaagttctgtagatttagtctttggttcaaaccctgaactcagagcggttgcggaagtttatgcctctgatgatgccaaagaaaaatttgttcatgactttactaaagtatgggaaaaagtcatgaaccttgatcgctttgatataaaaaataactaa

SEQ ID NO: 42351 - DNA, 273 bp, Yersinia pestis
atgctttgtgcgatttacagaagccctaaacgagatcaaacctacctttatattgagaagaaagatgatttttcacgggttcccgctgaattattagccagttttggcaagccacagtttgcgatgcttcttgcgttaaatgaacgcaagaccttggcgaccgctgatgtggagaaggtgaaaaatgcgcttattgagcaaggtttttacctgcaagttcctccaccgccggaaagtttactgaaaatgcacttgggtgaaaccaaagcataa

SEQ ID NO: 42352 - DNA, 1371 bp, Yersinia pestis
atgtctaacagctcaatgagtgtcgtcatccttgccgcgggtaaggggacacgtatgtattccgaccttcctaaggtattgcacccattggcaggtaagccaatggttcagcatgttattgatgctgccatgaagctaggtgcacaacatgttcatctggtttatgggcacgggggtgagttactgaagaagaccttggccgatccatccttgaattgggtattacaggctgagcaactgggtactggccatgcgatgcagcaagctgccccacattttgctgatgatgaagatattttgatgttgtatggcgatgtgccgctgatctctgttgatacgctacaacgtctgctggccgctaagcccgagggcgggattggcttgttgacagtaaaactggataacccaagcggttatggccgtatcgttcgtgagaatggcgatgtcgtcgggatcgttgaacataaagatgccagcgatgcacaacgggaaatcaacgagatcaatacggggattctggtcgcaaatgggcgcgatttaaaacgctggctatcattgttggataataataatgctcaaggtgagttttatatcactgacattattgcgttagcgcatgccgatggtaagaaaattgccactgtccatcctacccgcttgagtgaagtggaaggggtgaataatcgcctgcaattgtctgctcttgagcgcgtatttcagacagaacaagcggaaaaattattgttagcgggcgtgatgctattggatccctcccgttttgatttgcgcggagaattaactcatggtcgcgatattactatcgataccaatgtcattattgaaggtcatgtgattttaggtgaccgggtgcgaattggtacggggtgtgtactcaaaaactgtgtgattggtgatgactcagaaataagcccatataccgttttagaagatgcccgcctggatgccaactgtactgttgggccatttgctcgtctgcgtcctggcgctgaattggctgaaggtgcacatgttggtaattttgttgaaatcaaaaaagcccgtttgggtaaaggctctaaagccggtcatctctcttatctaggtgacgctgagattggggctggcgtcaatattggcgcgggaactataacgtgtaactatgacggggctaataaatttaaaactattattggcgatgatgtttttgtcggatcggatactcaattagttgccccggtcaccgttgcaaacggtgcaaccattggcgcgggtacgactgtcacccgtgatgttgccgaaaatgaattagtcatcagccgggttaagcaggttcatattcagggatggaagcgcccggtaaagaaaaagtaa

SEQ ID NO: 42353 - DNA, 657 bp, Yersinia pestis
atgtatcaacatagagactggcaaggggctttgctggatttccccgtaaataaagtggtttgcgtcggcagtaactatgccgaacatatcaaagagatggggagtactgcctctgtggagcctgtactgtttatcaaacctgaaaccgcattatgcgatatccgccaaccggtatcgataccgaaagattttggctcagtgcatcatgaaattgaattagccgtgttgatcggaacgccgttaaagcaagccagcgaagatagagtcgcacgggcgattgccggttacggtgtggcattggacttaacgctacgtgagctgcaggcaggttttaaaaaagcggggcaaccatgggaaaaagccaaggcgtttgatggttcttgcccgatatccggttttattcccgttgctgagtttggtgatgcacagcaggcagatttatcgctaacgattaatggggaaatccgtcaacagggaaatacccgtgacatgattacaccaattattccgttaatcagttacatgagccgtttctttaccttacgtgctggcgatatcgtgctgaccggtacgccgcaaggcgtagggccgatgcagtcaggtgatatgcttaaaattatgctcaatggcaaaacagtgaatacccgcataatataa

SEQ ID NO: 42354 - DNA, 1542 bp, Yersinia pestis
atgcaactgaattccaccgaaatcagcgaactgatcaagcagcgcattgctcagttcaatgtagtgagcgaagctcacaatgaaggtactattgtttccgttagtgacgggatcattcgtgtacacggtctggccgatgttatgcagggtgagatgatcgcactgccaggcaaccgttacgcaatcgcactgaacttggagcgcgactccgtaggtgctgtagttatgggtccgtacgccgatcttgccgaaggcatgaaggttaaatgtactggccgtatcctggaagttcctgtcggtcgtggcctgttggggcgtgtcgtcaatactctgggtgaacctattgatggtaaaggttctatagaaaacgacggcttctcagctgttgaagctatcgcacctggtgttatcgaacgtcaatccgttgatgagcctgttcagacgggctataaatccgtcgatgccatgatcccaattggtcgtggtcagcgtgaattgatcatcggtgaccgtcagacaggtaaaactgcactggcgattgatgcgatcatcaaccaacgcgattccggcattaaatgtgtgtatgttgctatcggccagaaagcctctactgttgcaaacgtagtgcgcaagctggaagaacatgacgcattagctaacaccattgtggttgttgctactgcatcagaatctgcagcattgcagtatctggcaccttactccggttgtgccatgggtgaatatttccgtgatcgcggtgaagatgcgctgattatttatgatgacctgtctaaacaggctgttgcatatcgtcaaatctccttgctgcttcgtcgtccaccaggtcgtgaagcctatcctggcgacgtattctacctccactcccgtttgttggagcgtgctgcgcgtgtaaacgctgagtatgttgaggcctttaccaagggtgaagtgaaaggtaaaacaggttctttaaccgcattacctatcattgaaactcaggcaggtgacgtttctgcgtttgttccgaccaacgtaatatcgattacagatggtcagatcttcctggaatccagcctgtttaacgccggtattcgtcctgccgttaacccaggtatctccgtatcccgtgtgggtggtgcagcgcagaccaagatcatgaaaaaactgtccggtggtattcgtaccgctctggcacagtatcgtgagcttgcagcgttctcccagttcgcatccgatttggatgatgcaacacgtaaacagctgagccatggtcagaaagtgaccgagcttctgaaacagaaacaatatgcgccgatgtcggttgcacagcagtctctggttctgttcgcagctgaacgtggttatctgggtgatgtcgagttggcgaaggtgggtagctttgaagctgcactgttggcatttgctgaccgtgagcatgctgagcttctgcaacaaatcaaccaaactggcgcgtataacgatgagatcgaggccaagctgaaaggcatcctcgatacatttaaggcaacccagtcctggtaa

SEQ ID NO: 42355 - DNA, 534 bp, Yersinia pestis
atgtctgaatttgtaactgtagctcgcccctacgccaaagcagcttttgactttgctgttgagcaccaggcagttgagcgttggcagaatatgctggcgtttactgcccaagtgactcgcaatgaacagatcgctgaattactttccggtgctgtagcgccagagacaatgtcgacgacgtttattgcagtctgtggtgatcagctcgatgagcccgcacagaacttcattcgagttatggcggagaatggccgtttactggttcttcctgaggtgttacagcagtttattcaactgcgtgcctcattggagtctaccgtcgacgttgaagtgtcctctgcgagagcacttaacgacgaacagctagcgaaaattgctgctgcgatggaaaaacgtctgtcacgcaaagttaagctgaattgcaaaattgataagtctgtaatggccggcgtagtaatacgtgcaggcgatatggtgatagatggcagcgttcgcggtcgtcttgaacgcctggcagacgtcttgcagtcttaa

SEQ ID NO: 42356 - DNA, 471 bp, Yersinia pestis
gtgaatcttaacgcaacaatcctcggccaggccatcgcgtttgtcctgtttgtcatattttgtatgaagtatgtatggccgccaattatggctgctatcgagaagcgtcaacaagaaattgctgacggtctctcttctgcagagcgtgccaaaaaagatttggacttagcgcaagccaatgcgaccgaccaactgaagaaagccaaagcagaggcacaggtgatcattgagcaagcaagtaaacgcaaagctcagatccttgatgaagctaaagcagaagctgaacaggaacgtaacaaaatcgtggcgcaagcgcaggcagagatcgacgccgaacgtaagcgcgctcgtgaagagttgcgtaagcaagtcgcgatgttggctatagctggcgccgagaagatcatcgaacgttccgtggatgaagctgctaacagcgacatcgttgataaactggtcgctgaactgtaa

SEQ ID NO: 42357 - DNA, 240 bp, Yersinia pestis
atggaaaacctgaatatggatctgctgtacatggctgccgctgtgatgatgggtttagcggcaatcggtgctgcgattggtatcggcatcctgggtggtaaatttttggaaggcgctgcacgtcagcctgacctgattcctctgctgcgtacacagttctttatcgtcatgggcctggttgacgccatccctatgatcgctgttggtctgggtctgtacgtgatgtttgctgtcgcgtaa

SEQ ID NO: 42358 - DNA, 1653 bp, Yersinia pestis
gtgagggaaagtgcccatgtcggtgtagcattaccacggggttgtgatcagatcattgcggtactggcgattcagtggctcggtgcggcttatgtacctatcagtgtggaatggcccgcgtgtcgccgatcacaggttatcactttggctgatatccatttccttattggtgatcgcacgctgggctggccggaagaggtcgatgtgctttcggtggagagtgaaccggtttctgacgagcgccccacgccacgggtagtgagtgcagatagcctggcttatcttattttcacgtccggcagtacgggtgtccctaaaggggtggcggttagccatggcgcggcggtcaataccattgagtcggtcaatcgtcagcatcaaatcaacccacaagatacggccttggcattatcagcgctgtattttgacctctccgtttgggatgtttttggtgtgttgtctgccggcgcgaggttagtccttattccgcagcaggcacagcgagaggcggcaatatggttatcactggtccaacaacatcaagtgacggtgtggaacagtgtgccagcgttattagagatgatgctgttatttaatgaacagatatttaatgaacaggatgaacagccgccagcgttgccctcgctgcgagtggtgatgctctcaggggattggatagtaccggagttgcctcaacgcctgcggcggtttgcgccaaatgctcactgtgtcgccatggggggggccacggaagcggctatctggtccaattattggatagcagatacagcgctaaccgggtggtgctcggtgccttacggcgtgccattgcctaatcagcaattccgaattgtgaatgagcaagaagaggattgccctgactgggtggcgggtgagttgtggattggagggcaaggggttgcacagggctattatggcgatagcgccggcactgaacagcaatttatcctacgcgatgggcaacggtggtaccgcacaggggatactggccgctatcgccctgacgccatcatcgagtttctggggcgcaaggaccagcaagttaaaatctcgggttaccgcgtagaactagaagaaattacgttagccctaaaaagctatccttcgatcgaggatgtggtcgcttttgttattcaacacaatgaccgctctgttttagcggctgttgctgttacgccaacccccctggataggcaggcggtgaccgcatttcttcgcgagcggctaccggagtatgccatcccctcccggttagggcattgctgcgcatggccactgacggataacgggaaacgtgaccagcatgccctccgtgccttcgtcacaccgtctttcgaaccgaccgaaacacctcaggtaacccagcccatgacggctatggagcaattactgtgcgagcagctccagttactgctgaatgtggtgtcgattcaatctcatgacaacttttttgcgcttggcggcgactcctttattgccattcgcctgacatccgtattgcgccgaaactatggggttgaactcccactgtggaaaattttcagcgtacagacaatcgcacaaattgctttagttatggagcctgcacaccagagtgcagggcgtattcaatttgtggaagactcaatttga

SEQ ID NO: 42359 - DNA, 264 bp, Yersinia pestis
ttggctaatatcaaatcagctaagaaacgcgccgtacagtctgagaaacgccgcaagcataacgctagccgtcgctcaatggtgcgtaccttcattaagaaggtgtatgcggcaattgcagctggcgataaagacgcagcgcaaaaagcatttaatgaaatgcaaccaatcgtggatcgtcagtcctgtaaaggtctgatccacaaaaacaaagcagcgcgtcataagtcaaacttggtcgcgcaaatcaacgcaatgcagtaa

SEQ ID NO: 42360 - DNA, 2448 bp, Yersinia pestis
atgaaaaaaaccaacaaactattaattagtattgtttccgcaatatcattctcagcttactcaaatgatataaatgatgcaaaggtctgtttttatgagttggaaaatttttctggtgaatcattttgtgcctatgagggcgaatcacagtccactatcaataatgattttgacaaaaaaattaaatcaatttcaattcctccaggaatggtaatcactctctatgatggcattgattttaccgggaaaaaaaagaaattaaaaaatgatgtcaacctagacggtatgaaatcatttggactatataataaaataagttcatatcacatagatcctgcagtatgtttttatacagaagataattttcaaggagacagtacttgtttagcggcaagtcaacacatagatttatatagtgatgctgaagggtttgctaactctaatcgtaccgtgttacctattcataatgacagcatccaatcaataaaagttcctcttggaatgatgacaacaatctataaaaatgaccaatttaatgctcctttcttcgagttaacagaaaatatcaacttagaaacattaaaaactctggctatggacaatcaactcaccagccttaaggcatcggaaaaaaaaggtctgtactgtgatcaaaaatgtattattttagaaaaacatgaaataaatttacctgaggttttcggtgagtactggcatgattctcgtttagtcaataaacaagttatactgtcttttaatagtcaagaaaatggaattaatgatgattataaaattaacttaacaaacggccccagcgttagaatattaaaaaatgaaattatcttttctgactacaatatgattaccaaattttcttttgatcgcattgataaatttgataaactttcatttattttacaaatagaaaaagacatcgtacaagttcaatacatccaaacattagatgatcaactaatcgatctatcacccattatttcatttaaatggacacacatgattgatgatactcccacattaaccattaaaaataaaaatacagacaagccattaattcttaataaatccattattaccgcagatacaggcgatcaaaattgggaaaagagagacatcgaaaatacaagtcaaataatatgcgcattcactccattcctaaacctttataattatattgtacaaggaacatgccgccaactagatggaattattttcaaagcagatcaatatttcaacagtaataccaaagggaaaacattacatattgcagggaaaagtttcccattaaagcctgatttattaacagaattaaacaatgatgggctacatgaaaataaaatgctgttaacttacattgacaatgtaaataacaatcagtcgctcagtttacctgcagtcgcaaaaacctgtatggtatcgatccactctatacttagcacacgccagactcgccaaatcaggcctgcgtgtatcgattggacgctagaaataatgactgacttcacattattattcggtagcagtctacggacttggaataccgaatatttcggtagaattatacagtctattattacaacaggaaataccggtgttgcagtagaaaatacagagatagaaaaaaggctcagtcatgcggtaaaaaaagccattatgtcacaatcaatagatagcactcttgaccacattaagactgcgtttgactatgctcagctaaattactttgactacagccttttttatgtgtcagaagatacgccatctcaggtagaacaactaccactcggcatctatgagctattattaccctcgtttatctatagaccaataccacccattattattgaaaatagcgaacgagtagaacaacatgagttagcttttgaaatagaaattttaccaagcctattccctgaagatgcaaggccttccgatactgaaattgaacatgctcgagaattgcgacaaaaaatcagtgaaactatcgctcaatgggggcaacaataccaaggcgctcatgcaattgatgatgttgaccaagaggtcaacgctgatgaaaatgccgccttaagtcaacttctccatgctgggcatattgttactggcattattcatcgtagattaattcttaaccgccctggggaaatttatgtggtggtcaaattaaggggagagataatcgcaattgtcttggctgatcgttttaataatagggatgaagttgaactggtggcctcagcaacgttgcctgactatgtcttatcgcccgatagtgaaggtaccgtaagaggggcaggcactgccgcggtttacgagctagctcgatacttacaacagcaaggtgccaaaacattattttctgagactatttcccagccatcagcacgcgtcaaacaaaaagtcggatttacctttaaatcagaattctaa

SEQ ID NO: 42361 - DNA, 288 bp, Yersinia pestis
atgctgtataccgtcagtcattcaccttatcactgcgatttatctgcgctgttgagattagcgacatctgaggatgatattttgttgctgcaagatggtgtgatagcggccttgaaagagagtgaaactcttaagctgttgttaaataaccccgcttctctatttgtattggaagacgatgttattgcacgtggcttggttggccaaatttcagacaacgcaacactaatcagctatactcacttcgtggatttgaccctaagacatcagcagcaactggcatggtaa

SEQ ID NO: 42362 - DNA, 1674 bp, Yersinia pestis
atgatgaatttaaaggttaacaggagcattattagtgcttcgatatcggtcatcttagctgcgggcgtcatgggtggccctgcatatgctgatgatgtcaaactcaaagcaacaaacaccaatgttgctttcgctgattttacgccaaaagaatacagcacgaagaataagccaaatatcattgtcttaaccatggatgacttaggttatgggcagctcccttttgataagacctcctttgaccctaagtcgatggaagatcgggacgttgttgatacctacaaaataggcattgataaagccattgaagccgccaaaaagtccacgccaacactactctcgttgatggatgaaggggttcgtctgacgaatggctacgttgctcatggcgtatcagggccttcgcgggcggccattatgacgggccggtcccctgcaaggtttggtgtttactccaataccgatgctcagaatgggatttcattagaagagacattcctgcctgagttattgcaaaacaatggctattacacggcggccatcggaaaatggcatctttcaaaaatcagtaatgttcctgttcctgaagcggagcaaacgcgcgattaccacgataactttacaacttactcagccgatgaatggcagcctcaaaaccgaggcttccagtattttatgggttaccatgccgcgggaacggcttattataattccccgtctcttttccataataaagagcgggtgaaagccaaaggttatatcagtgatcaacttaccgatgaggctatcggtgttgccaatagagctaaatccttagatgagccattcatgatgtatttggcttacagtgctccccatttacctaatgataatccagcgccggatgaatatcagaaacactttaatacaggtagccaaactgctgataacttctatgcctctgtctattctgttgaccagggcgtaaaacggcttcttgagcagcttaaaaagaatggtcaatatgacaatacgataattatgtttacctctgataacggtgccgttatcgatgggccattaccgttgaacggtaatcagaaagggtataaaagccaaacatttcctggcggaacccatactccaatgtttatttggtggaaggggaaattgcaaacaggaaattatgacaagttgatctctgcaatggatttcatgcctacagcgcttgaagccgctgagattgatgctccaaataatttagatggtgtctcactgcttccttatttgacggggaaaagcaaagctgaaccgcataaatatcttacctgggtgacatcctatacccactggttcgatgaagagaatattccattctgggatggttaccataaatttgtgcgtaatgaatccaatgaatatcctaaaaacccaaataccgaagatcttagtcaattctcttataccatccgcagtaatgactactctttaacctatacctatgaaggtaataagttaaatctgtataaactgagtgatttaaatcaaaaacaagaccttgcaagtacccatcctgatgttgttaaggtaatgcaagccgagatgaggaacttcattaatcagagtcaatctcctgttagtgaagttaatcaggataaatttaataaaattaagcaatcgcttggtatgaattaa

SEQ ID NO: 42363 - DNA, 372 bp, Yersinia pestis
gtgaaaattcatctatcgagctggcgttatttcgccttattaacgctaccaccgctggtgctggcttttaatcttttgtactcgttcgccagcttggtgctgctaatgctgtttttggtgacgcattactattgctggcgtttatggctggatgaacgacttttcaccctgctgaataaagaaagcagtctcgctgagtttgatgaaggaatggcccaattgtggatagccaagtcgggagcgactcgcacgttgacagagcgctggtgtggggttaggggactgttttatcgggctatgttctcacttattgcgctgtggctgacctcattgagttccgtgctttatctgacgttaacgttggttgattag

SEQ ID NO: 42364 - DNA, 516 bp, Yersinia pestis
atgaaacaccctttttcaacccgcctagcggcggttcaacattacctttcaggaaaggccactctgcgggaaaccgcacgtcaattcagtgttggcaaatcccctcttacgcgttggatccgagcttttcgccgtcaaggtgaggctggactggagcaccatctttccagaacttatactccagaattcaggctttgcgttgtccgctatatgatggcaaacagatgtagcgctgccgatgcttctgctcattttaacattcccaacgagacgattatccaaaactggatgaaacgttatcgagagggaggaaaagaagcgcttaacccatcgaaaacgggtcctactatgccaaaagataaatatgagcacgattcaaaaccgttcagcgagatgacgcatgcggagctagagaaagaacttgagtatctgcgcgcggaaaacgcttatctaaaaaagcggaaagccctgagagaagaaaaggcactcagggagcagcagaaaaaaccagaatag

SEQ ID NO: 42365 - DNA, 516 bp, Yersinia pestis; identical to SEQ ID NO: 42364

SEQ ID NO: 42366 - DNA, 516 bp, Yersinia pestis; identical to SEQ ID NO: 42364

SEQ ID NO: 42367 - DNA, 516 bp, Yersinia pestis; identical to SEQ ID NO: 42364

SEQ ID NO: 42368 - DNA, 786 bp, Yersinia pestis; identical to SEQ ID NO: 42275

SEQ ID NO: 42369 - DNA, 516 bp, Yersinia pestis; identical to SEQ ID NO: 42364

SEQ ID NO: 42370 - DNA, 459 bp, Yersinia pestis
atgaaaaaatatttgttattatttggggttctgtcatttatgccattgattgcgcagtctgatgtttcacttgatatcaacatgcccggcatcaatctgcatttgggtgatcaagataaacgtggctattactgggatggatacgactggcaaccaccacagtggtggaaagatcatcgcggcgctcacattggtgagcgtaatgaacgtggttactcttgggatggaggccgttggcagaaaccgcaaatacaacaagggcgtaatccgtttcgtgagcaagaccgtggtaatggcatgaataataatcctcaaccaccacgcggagaggggccccagaagcattccgacaataataataagggaggtaatgggcagggccaaaggactataagcaataatgcaggccctggcactcaacaggtctaccctcaacaggataatcatggccatcgttaa

SEQ ID NO: 42371 - DNA, 786 bp, Yersinia pestis; identical to SEQ ID NO: 42275

SEQ ID NO: 42372 - DNA, 786 bp, Yersinia pestis; identical to SEQ ID NO: 42275

SEQ ID NO: 42373 - DNA, 219 bp, Yersinia pestis
atggccaaagaagacaatattgaaatgcagggcaccgttcttgatacgctgccgaacaccatgttccgcgttgaattggaaaacgggcacgtggtaaccgctcatatctccggtaaaatgcgtaaaaactatatccgcatcctgacgggtgacaaagtcactgtagagctgaccccgtacgacctgagcaaaggccgcattgtcttccgtagccgttaa

SEQ ID NO: 42374 - DNA, 1419 bp, Yersinia pestis
atgagtcagaacgtttatcagtttatcgacttacagcgcgtcgatccgcctaaaaaaccgctgaagatccgtaaaattgaatttgttgaaatttacgagccattctcagaaacacaagccaaagcacaggccgatcgctgcctgtcctgcggcaatccgtactgtgaatggaaatgcccggttcataactacatccctaactggctgaaactggccaacgaggggcggattatggaagcggctgatctggcacaccaaacgaacagcctaccggaggtctgtggccgtgtttgtccacaagatcgcttgtgtgaaggatcttgtactctgaacgacgaatttggtgccgtgaccatcggcaacatcgagcgttatatcagtgacaaagccattgcgatgggctggaaaccggatatgtcacatgttcaccctaccggtaaacgtgtggccgtgatcggggccggccctgccgggctggcctgtgctgatgtattagcacgtaacggtgttcaggctgtggtctttgaccgccatccagaaattggggggttactgaccttcggtatcccagcgtttaagctggaaaaagaagtgatgattaaacgccgtaagatcttctccgagatgggaattgaattccaactgaatactgaagtaggcaaagacatcaccatggaagcactgctgaaagattacgacgccgtgttcctgggggttgggacctaccaatctatgcgtggtggtttggaaaacgaagaggctaacggtgtatatgatgccttgcctttcctgattgctaatactaaacagctaatgggctatgaagcgacggctcacgaaccgtatatcaacatgcaaggtaaacgcgtcgtggtgcttggtggcggtgataccgcaatggactgtgtgcgctcctcaattcgtcagggggcaaccgatgtggtttgcgcctatcgccgcgatgaagtgaatatgccgggttccaagcgggaagtgaaaaacgcccgtgaagaaggggtagaatttaaattcaacctgcaaccattaagcattgaagtgaacagcaatggcaaagtctgtggtgtcagaatggtccgcacccagttgggcgcgccagatgcacagggccggcgcatggctgaacagatccctggctcagaacatgtattgccagcagatgccgtagtgatggcatttggtttccgcccacacagtatggaatggctggccgctcacgatgtgaagctggataagcaaggccgggtgattgcaccggaaagcactgataatgccttccagaccagtaacccgaaaatctttgcgggcggcgatattgtccgtggttccgatttagtggttaccgccattgccgaaggccgtaaagccgcagacggcatcatgaattatctggaagtctaa

SEQ ID NO: 42375 - DNA, 786 bp, Yersinia pestis; identical to SEQ ID NO: 42275

SEQ ID NO: 42376 - DNA, 117 bp, Yersinia pestis
atgaaagttcgtgcttccgtcaagaaattatgtcgtaactgcaaaattgttaagcgtaacggtgtcgttcgcgtgatttgcagtgccgaaccaaagcataaacagcgtcaaggctga

SEQ ID NO: 42377 - DNA, 840 bp, Yersinia pestis
atgtataaaataaaaaaattctctcaaataacggggatctctgaatttaatttacgctattttgaccagattggtctactgccagctgaacgtgataatagtcgttatagactctatcacccacggcaaatcgccatggctcatttgattttaagtctacaaaaagcacatgtttctaatgaaaaaatcaagagcatcttgatggattactcatcccaaaatagccagtccgcattatgttacgcacaacatgctattgatgagacgttgcaccaattaacatgtgccagacatttcctcacaacgcaaattgagcgtcagatgctcatcaatgacgccaaacgtcgattaaataatccatttattgaggaaagaaatatcgaaccgctggggatattctcgataaatacgcctaacattatcgatttttttaaatatgtctctgaagtatcaggaaacccggattggtatttacgtcatcgctacggatttattgttgaaagagaatccattcaaaaaaacaactataaattaatgaattttttctgcaatgagcctaatataatcaataaacatggtggggattttccagctggaagttattttagtggtttttataaaggaagtttggaaaataacccagcggtatctaaacacctatcgcaagcggatgataacggaatgaaccattcgtctaaggttattattgaacatatcagtggtccagccacagttaagtgcaagagtgaattcctgattaaagtgatgtatccctgccatcatcaactggacgggtcccacgagacaccaacagtattgactccttcatcaacaaattaa

SEQ ID NO: 42378 - DNA, 156 bp, Yersinia pestis
atgtcagttgaacaagcaccacctgaactacaactggcagtagatcttatctatctgctggaatgtaacgaaatagcaccggaaacggctctcgcagcattggctatcgtacaacttgattaccaacgtaaacttcgccataaagaatcagactga

SEQ ID NO: 42379 - DNA, 786 bp, Yersinia pestis; identical to SEQ ID NO: 42275

SEQ ID NO: 42380 - DNA, 366 bp, Yersinia pestis
atgaaaaaagtattagcattaatggttgccgccaccctgggtctatcttcagttgctttcgctgctgacacaacagcaacggctacacctgcggcaaccagtacgacagccacagttgctgctcaaactaaagcaactcaacatcaaaaacataaagtgacgaagaaaaccacagaacagaaagcacaggctgctaaaaaacacgagaaaaaagcatcagttcaaaaaacacccgtgcagaaagcacaagcagcgaaaaagcatgtgaaaaaagcatcagttcaaaaagcgcccgtgcaaaaagcacaggcagcgaaaaagcaccataaaacggctaaaaaaccagtagcggcacccgcagcataa

SEQ ID NO: 42381 - DNA, 471 bp, Yersinia pestis
atgaccgacattgaaaaagcagtgactacttttcaagcgtaccgagctgcgattggttacccgaaaattccaccctatgagggggaggttattgagtatgattttgggcgtaagattgaatctaatcagccagatttctggacgcaatatcatgaattcctacgcttgagtgatggacttgctgctgatggtgtttatttttatggcatagcctgtgaaggtaagttgatcgggaatcgccttatcgacaacaacgatgcgttgcgcgatggagagatgtacgatgaaagcatggacggattgatcgcaatagggtcaagcaatagcgatatttttgtttatgataccaatacccataaatgggaaagccgtgaccgaatagcgattgatgacatcaatgaatcttacgataccttagctgaactgatagatagccagttacagagaatcaatataggtgatgccttttaa

SEQ ID NO: 42382 - DNA, 489 bp, Yersinia pestis
atgacccagcttaataacattgtggatgagcttaattcattggctctaaagttagaatatgacgttcttccaccagccgtgtttccgtcttcactctatgaatatgattttggactaaagataggtaaagcacctcaagaattttgggatcaatataaggcgcttgtagaactcgctgatggtttcgatttggatggttttcgtatgtatggaattgaaaaacatggggattatgaaaatgatttgtttacttataatggctataaggcccgcttagacaaggaggccccatcgttaatgagcgatgaaagtcgttattgtatagagatcggttcatcatcactggatacctatacatacgatgtacgatacggtaaatgggaatctagagatcgtgttcagtatgacaacctctttatttcgtgtagtaatctgattgattttcttgccgctatattggcagagatccgtgaagctaatgtccagtag

SEQ ID NO: 42383 - DNA, 396 bp, Yersinia pestis
atgaataatagattatttaaaacattaggtgcaatcatagcattattaatatttacgccaatgatatatttagtgagcacttacatcatttcattaataaaaatggaagacataataaaattctccggacctattttcatagctttcctatcatcccctatactactttactctctcgtaggatctgtttggttttttatctttaataagttacctaaatttaataaatttattattaagtatttatccataccaatgtttttatcatttatcgtcagcttccctatttctttatatgttgattacaaattaaaaagtaatggttatgtggtatgtgacagaatttcatggatgtcgccgaatacttatgtaaaagacttatcactttgtagataa

SEQ ID NO: 42384 - DNA, 459 bp, Yersinia pestis
atgccagaaaataacatcaacacttactgtattcaggaaggaacgctggaatgtccagagggtttcactgaccgtacggtgaacctctttatgaaaggtaaaccgggcgctgcttttgccctgaatatcgcccgcgatgtccccgaggcccatgaagtcctgagtgactacgtacaacgccagattggcatattaaaagataaccttaaaaagtatgaagtcaaaaagcaccagcagattgacgtcggggcgcaacacatccccggagaatatgttgaagccacttatatggctgaaacccgaagggtgtggcagagacaggtcgcgattcaggtaggtgaccatatgatgatttttacggccacgaatgcctcgccgtttaacccgcaacagcaggctacctgggagcagtggatccacagctttgcgccgtgggccagggaggccggccatgtttga

SEQ ID NO: 42385 - DNA, 786 bp, Yersinia pestis; identical to SEQ ID NO: 42275

SEQ ID NO: 42386 - DNA, 177 bp, Yersinia pestis
caaataacgctcccgctacaaaaagagatgggtttttacggtgttcgaaatacagcccaagcgggtaacatcatactcagtagccccgcaggacgtattcgtctggttatctcaagccgtgggcgtataaggttatgtagtgaacaacaatccatggcaggcatccatttatgcctt

SEQ ID NO: 42387 - DNA, 180 bp, Yersinia pestis
atggcaaagactattaaagtaactcaaacaaaaagcagtatcggtcgtttgccgaaacataaggcaactctgatcggtttaggtctgcgtcgtattggtcatactgtagagcgtgaggatactcctgctgtgcgtggtatggtcaacttggtttcctacatggttaaagttgaggagtaa

SEQ ID NO: 42388 - DNA, 516 bp, Yersinia pestis; identical to SEQ ID NO: 42364

SEQ ID NO: 42389 - DNA, 237 bp, Yersinia pestis
atgagcactatcgaagaacgcgttaagaaaatcatcgttgaacaactgggtgttaaagaagacgaagtgaagaacagtgcttctttcgttgaagatcttggcgcggattctctggacaccgtcgagctggtaatggctctggaagaagaatttgataccgagattccagacgaagaagcagagaaaatcactactgttcaggcagctattgattttatcaacgctaaccagcagtaa

SEQ ID NO: 42390 - DNA, 312 bp, Yersinia pestis
atgcagaaccaaagaatccgtatccgcctgaaagcgtttgatcatcgtttgatcgatcaatcaactgcggaaatcgtcgagactgccaagcgcactggtgcgcaggttcgtggtccgatcccgctgccaactcgcaaagagcgctttaccgttctgatttctccgcacgtcaataaagatgcgcgcgatcagtacgaaattcgcactcacaagcgtctggttgacatcgttgagccaaccgagaaaaccgttgatgctctgatgcgtctggatctggctgccggtgtagacgtgcagatcagcctgggttaa

SEQ ID NO: 42391 - DNA, 303 bp, Yersinia pestis
atgattcgtgaagaacgtctgctgaaagtactgcgctcgccgcatgtatctgaaaaagcgtccgctgcgatggaaaagaataacaccatcgttctcaaagttgccaaagacgcgaccaaagcagaaattaaagctgcagtgcagaaactgtttgaagtcgaagtcgaagacgttaacaccttgctggttaaaggcaagagtaagcgtcacggtcagcgtgttggtcgtcgtagcgactggaaaaaagcttacgtcaccctgaaagaaggccagaatctggacttcatcggcggcgcagagtaa

SEQ ID NO: 42392 - DNA, 192 bp, Yersinia pestis
atgaaagcacaagagctgcgtgaaaaaagcgttgaagagctgaacactgagctgctcaacctgctgcgtgagcaatttaatttgcgcatgcaggcggctagtggccagctgcaacaaactcacctgttgaaacaagtgcgtcgtaatgtcgcgcgtgttaagactttactgactgagaaggcgggtgcgtaa

SEQ ID NO: 42393 - DNA, 369 bp, Yersinia pestis
atgtcaactatcactaaagaccaaattctggaaggcgttgcagctctgtctgtaatggaaatcgttgaactgatctccgctatggaagaaaaattcggcgtttcagctgctgctgttgctgcaggtcctgctgctgctgttgaagctgcagaagaacaaactgaattcgacgttgttctggcttcattcggcgagaacaaagttgcagtaatcaaagctgttcgcggcgcaactggcctgggcttgaaagaagctaaagatctggttgagtctgcaccagcagttctgaaagaaggcgtgaacaaagacgaagctgagacgctgaaaaaatctctggaagaagctggtgcttctgttgagatcaagtaa

SEQ ID NO: 42394 - DNA, 1032 bp, Yersinia pestis
atgattaagtttatatcaacatcaataatatcacttgaattttataaaacttcattaaaaaaatcattcatagcaatatctgccttaccattactcatgtccagcatggcatgggcacagccagatgtggtaaggcttggtaatttaaaattcgctcattatggcgctatttcatatatgaaagagatagcaccaaaatataacataaagatagaagaacgaatgtttgcaaaggggatagatattgctcccgcaatcgtcgcggggcaaattgatatagcggccagtgcagttgatgcggcaatcgctgcccgcgctcaaaatatccccatctatgttattgccggatttgccaaaggcggtgcccgaattgttattggcaataatagcagtattaaatccgttgctgattttaaaggtaaaaaagtgggggttgcccgtggtggtgctcaggaacttcttcttctggcagagttggataaatatgggctgacatggtctgatcggccaggaaaagatgttcagattatttatatggcttatgccgatcttaatcaggctcttcagtctggtaatctggatgctattagccaatctgaaccgcatgccagccaggcaattaatatagggtatggtgtcgagttgttgaagccctacgatacccccgtaggcgttccaattcgcgcgttgatcatgacggaagccatgtataaagagaagccagaggtggctgctcgcgtacttaaactgtttgttgacgcgaccaatacctttattcaacaacctgaaatagcggaagaatatgtccgtaaagagatgttcaagaaccaaattacctcgcaagattatcaagatgctattggtaattccccattcagttacgacatcacggtggaacatgttcaggtgacgactgacttaatgcggaaatatggcatcggccgaatgaataatccccccgttgccgctgattgggtaaagaatgatcttcttgaggctgcaaagaaaagcattggggttaatgggtcataa

SEQ ID NO: 42395 - DNA, 387 bp, Yersinia pestis
gtgctgttaagaagtcatattttactcaagagtaatgtcttactgaagattaagacattacttggcctttcagccgtactggtgttggcgggttgtagctcctctaacacattgagttcggcgggtgagcaagtgaagttttctgatactcagcctggcagtgagtgccagctagtcgggcaagtaaccggtactcaaagtaactggttatcaggtcagggcggggaaagcagctcaatgcgtggtgcagcaaatgacctgcgtaataaagcagcggcaatgggtggcaacgtcatctatggcgcaaccagcccgagtgaaaccttcttatcaagctttgcaccactagaaagtaaaatggttggtcaagtttataaatgcccttaa

SEQ ID NO: 42396 - DNA, 387 bp, Yersinia pestis
atggcttacagcgaaaaagtaatcgatcattacgaaaatccacgcaacgtggggtcgttcgacagtcaagaccctactattggtagtggcatggttggcgcacccgcttgtggtgatgtcatgaagttgcagatcaaagtgaatgaagccggtattattgaagacgcccgctttaagacttatggttgcggttctgccatcgcctccagctctttagtcactgaatggatgaaaggcaagtctctcgatcaggctgaagccatcaaaaatactcagattgctgaagaactggagttaccgccagtcaagattcactgctcaattttggcagaagatgctattaaagccgcaatcgccgactacaaaagcaagcatactgccaagtaa

SEQ ID NO: 42397 - DNA, 270 bp, Yersinia pestis
atgtctctaagtgttgaagcgaaagctaaaattgttgctgacttcggtcgcggtactaatgacaccggttcaagcgaagttcaggttgctctgttgactgctcaaattaaccatttgcaaggtcacttctccgagcacaaaaaagatcaccatagccgtcgtggtctgttgcgtatggtatccacgcgtcgtaagctgctggactacctgaagcgtcaagatgtagcgcgttacgcttccctgatcgaacgtttaggtctgcgtcgctaa

SEQ ID NO: 42398 - protein, 95 aa, Enterococcus faecalis
MEGGQTRMTEERNQRKVYQGRVVSDKMDKTITVVVETKKNHPIYGKRMKYSKKYKAHDENNTAKVGDIVKIMETRPLSATKRFRLLEVVEEAVII

SEQ ID NO: 42399 - protein, 62 aa, Enterococcus faecalis
MKVKEIRELTTAEMLDKEKQLKEELFNLRFQLATGQLENTARIKEVRQSIARIKTVLREQAN

SEQ ID NO: 42400 - protein, 72 aa, Enterococcus faecalis
MAKEDMIEVEGTVVETLPNAMFKVELENGHQVLATVSGKIRMHYIRILPGDKVTVELSPYDLTRGRITYRFK

SEQ ID NO: 42401 - protein, 121 aa, Enterococcus faecalis
MARIAGVDIPRDKRVVVSLTYIYGIGNTTAKKVLANVGVSEDVRVRDLTNEQTDAIRAEIDKLKVEGDLRREVNLNIKRLMEIGSYRGIRHRRGLPTRGQNTKNNARTRKGPTKTVAGKKK

SEQ ID NO: 42402 - protein, 38 aa, Enterococcus faecalis
MKVRPSVKPMCEHCKVIRRKGRVMVICPANPKHKQRQG

SEQ ID NO: 42403 - protein, 229 aa, Enterococcus faecalis
MAKKSKKMQEALKKVDATKAYSVEEAVALAKDTNIAKFDATVEVAYKLNVDPKKADQQIRGAVVLPNGTGKTQTVLVFAKGEKAKEAEAAGADFVGDDDMVAKIQGGWFDFDVVVATPDMMATVGKLGRVLGPKGLMPNPKTGTVTMDVTKAVEEVKAGKVTYRVDKAGNIHVPIGKVSFDNEKLVENFNTINDVLLKAKPSTAKGQYIKNISVTTTFGPGIHVDQASF

SEQ ID NO: 42404 - protein, 209 aa, Enterococcus faecalis
MTKGILGKKVGMTQIFTESGELIPVTVVEATPNVVLQVKTVETDGYEAIQVGYQDKREVLSNKPAKGHVAKANTAPKRFIKEFKNVELGEYEVGKEIKVDVFQAGDVVDVTGTTKGKGFQGAIKRHGQSRGPMSHGSRYHRRPGSMGPVAPNRVFKNKRLAGRMGGDRVTIQNLEVVKVDVERNVILIKGNIPGAKKSLITIKSAVKAK

SEQ ID NO: 42405 - protein, 1217 aa, Enterococcus faecalis
MIDVNKFESMQIGLASPEKIRSWSYGEVKKPETINYRTLKPEREGLFCERIFGPTKDWECACGKYKRIRYKGIVCDRCGVEVTRSKVRRERMGHIELAAPVSHIWYFKGIPSRMGLVLDMSPRALEEVIYFASYVVIEPGDTTLEKKQLLTEREYREKREQYGQAFKAAMGAEAVKQLLDNVDLDGEVAQLKEELKTASGQKRTRAIRRLDILEAFRASGNQPSWMVMDVIPVIPPDLRPMVQLEGGRFATSDLNDLYRRVINRNNRLKRLLDLNAPSIIVQNEKRMLQEAVDALIDNGRRGRPVTGPGNRPLKSLSHMLKGKQGRFRQNLLGKRVDYSGRSVIVVGPFLKMYQCGLPKEMAIELFKPFVMRELVQREIATNIKNAKRKIERGEDEVWDILEEVIQEHPVLLNRAPTLHRLGIQAFEPVLVEGRAIRLHPLVCEAYNADFDGDQMAVHVPLNEEAQAEARMLMLAAQNILNPKDGKPVVTPSQDMVLGNYYLTMEEEGREGEGMIFRDMNEAVLAWQNGYVHLHSRIGVQTTLLGDKPFTDWQKERILITTVGKIIFNEIMPVEFPYLNEPTDYNLTVQTPDKYFVEAGTDIPAHIKEQELVLPFKKKNLGNIIAEVFKRFHITETSKMLDRMKDLGYKHSTYAGMTVGIADIMVLHEKQAIIDAAHKQVETITKQFRRGLITDDERYERVIGVWNGAKDEIQQKLIESMEARNPIFMMSDSGARGNISNFTQLAGMRGLMAAPNGRIMELPIISNFREGLSVLEMFISTHGARKGMTDTALKTADSGYLTRRLVDVAQDVIIREDDCGTDRGLEIEAIREGNEIIEPLDERLLGRYTRKSVVHPETGAIIIGADQLITEDLAREIVDAGIEKVTIRSVFTCNTKHGVCKHCYGRNLATGSDVEVGEAVGTIAAQSIGEPGTQLTMRTFHTGGVAGDDITQGLPRIQEIFEARNPKGQAVITEVTGEVIDISEDPATRQKEVTIKGKTDTRTYTVPYTARMKVAEGDIIHRGAPLTEGSIDPKQLLQVRDVLSVENYLLREVQRVYRMQGVEIGDKHIEVMVRQMLRKIRVMDPGDTEILPGTLMDIAEFKDRNYDTLVAGGVPATSRPVLLGITKASLETNSFLSAASFQETTRVLTDAAIRGKKDPLLGLKENVIIGKIIPAGTGMARYRNMEPKEVGVASENVYSISDIEAQMAAEDAMKNINK

SEQ ID NO: 42406 - protein, 146 aa, Enterococcus faecalis
RTTYMAKAGEVERKWYVVDATDVPLGRLSAVVASVLRGKNKPTFTPHVDTGDFVIVINADKVKLTGKKATDKIYYRHSMYPGGLKSVTAGELRDKNSRRLIETSVKGMLPKNTLGRKQFTKLNVYGGAEHPHAAQQPEVLDITNLI

SEQ ID NO: 42407 - protein, 144 aa, Enterococcus faecalis
MLVPKRVKHRREFRGKMRGEAKGGKEVAFGEWGLQATESHWITNRQIEAARIAMTRYMKRGGKVWIKIFPHKSYTSKAIGVRMGKGKGAPEGWVSPVKRGKIMFEIAGVPEEVAREALRLASHKLPVKTKIVKREEMGGESNEG

SEQ ID NO: 42408 - protein, 146 aa, Enterococcus faecalis
MKLHELKPAEGSRQVRNRVGRGTSSGNGKTAGRGQKGQKARSGGGVRLGFEGGQTPLFRRLPKRGFTNINRKDYAVVNLDTLNRFEDGTEVTPVVLKEAGIVKNEKAGIKVLADGELTKKLTVKAAKFSKSAQEAIEAAGGSIEVI

SEQ ID NO: 42409 - protein, 166 aa, Enterococcus faecalis
MVYIDPKHLELEDRVVAINRVTKVVKGGRRLRFAALVVVGDKNGHVGFGTGKAQEVPEAIRKAIEDAKKNLVEVPMVGSTIPHEVIGVFGGGRILMKPAVEGSGVAAGGPVRAVLELAGVADITSKSLGSNTPINVVRATVEGLKQLKRAEEVAALRGKSVEEIIG

SEQ ID NO: 42410 - protein, 59 aa, Enterococcus faecalis
MAELKITLKRSVIGRPQNQRATVKALGLGKVNSTVTKPANEAIKGMVNTISHLVDVEEV

SEQ ID NO: 42411 - protein, 476 aa, Enterococcus faecalis
MNFETVIGLEVHVELKTNSKIFSSAPAHFGAEPNSNTNVVDWSYPGVLPVMNKGALEFGMKAALALNCEISKETHFDRKNYFYPDNPKAYQISQFDQPIGHDGWIEIEVEGKKKKIRIERVHLEEDAGKNIHGTDGYSYVDLNRQGTPLIEIVSEADMRSPEEAYAYLEALRSIIQFTEVSDVKMEEGSMRCDANISLRPYGQEEFGTKAELKNLNSMNFVKKGLAYEEKRQAKVLLSGGEIQQETRRFDEATSTTLLMRVKEGSSDYRYFPEPDVPRFSIDDEWIEKVRASLPEMPASRRARYISELGLPEYDAMVLTLTKEMSDFFEATLANGADAKQASNWLMGEVSAYLNSEKVELADTKLTPENLAGMITLINDGTISSKIAKKVFKELIENGGDAKEVVEAKGLVQLSDPAQLLPMINEVLDNNQQSIDDFKNGKDRAVGFLVGQIMKATRGQANPGVVNKLLQEELSKR

SEQ ID NO: 42412 - protein, 218 aa, Enterococcus faecalis
MGQKVHPIGMRVGIIRDWDAKWYAEKEYAEFLHEDLRIRKFIATKLADAAVSTIEIERAANRVNISIHTAKPGMVIGKGGSEVENLRKELNKLTGKRVHINIVEIKKPDLDAKLVGEGIARQLENRVAFRRAQKQAIQRAMRAGAKGIKTQVSGRLNGADIARSEGYSEGTVPLHTLRADIDYAWEEADTTYGKLGVKVWIYRGEILPTKKNTEKGGK

SEQ ID NO: 42413 - protein, 127 aa, Enterococcus faecalis
MSYRKLGRTSSQRKAMLRDITTDLIINERIVTTEARAKEVRSTVEKMITLGKRGDLHARRQAATFVRNEVASVREEDESIVVESALQKLFNDLGPRFAERQGGYTRILKTEPRRGDAAPMVVIEFVK

SEQ ID NO: 42414 - protein, 312 aa, Enterococcus faecalis
MIEFEKPRIEKIDENRDYGKFVVEPLERGYGTTLGNSLRRILLSSLPGAAITNIQIDGVLHEFSTIPGVREDVTQIILNIKGLALKLYAEEEKTLEIDITGPATVTAGDIIVDSDVEILNKDLVICSVAEGATFHARLTVKPGRGYVQADENKKEDMPIGVLPVDSIYTPVLRVNYQVENTRVGRRDDFDKLTMEIWTDGSIIPQEALSLAAKIMTEHLDIFVNLTDEAKNAEIMVEKEETQKEKMLEMTIEELDLSVRSYNCLKRAGINTVQELTNKSEPEMIKVRNLGRKSLEEVKLKLHDLGLGLRKDD

SEQ ID NO: 42415 - protein, 207 aa, Enterococcus faecalis
MPNVALFKQDGTQNGEITLNEEIFGIEPNESVVYDAIIMQRASLRQGTHAVKNRSAVRGGGRKPWRQKGTGRARQGSIRSPQWRGGGVVFGPTPRSYSYKFPKKVRRLAMKSVLSDKVAENNLVAVEGLSFDAPKTKEFKQVLANLSIDTKVLVVLENGNDFAALSARNLPNVSVVTSDNVSVLDVVSANKVLATQTALTQIEEVLA

SEQ ID NO: 42416 - protein, 140 aa, Enterococcus faecalis
MAKKVEKIVKLQIPAGKATPAPPVGPALGQAGINIMGFTKEFNARTADQAGLIIPVVISVYEDRSFTFITKTPPAAVLLKKAAKIEKGSGEPNKTKVATVSSDQVKEIAELKMADLNAADVEAAMRMVAGTARSMGIIVE

SEQ ID NO: 42417 - protein, 179 aa, Enterococcus faecalis
MNRLKEKYIKEVTPSLVEKFNYSSVMQTPKVDKIVINMGVGDAVSNAKNLDKAVEELALITGQKPLITKAKKSIAGFRLREGMPIGAKVTLRGERMYEFLDKLVTVSLPRVRDFHGVSKKAFDGRGNYTLGIKEQLIFPEVDYDLVDKVRGMDIVIVTTANTDEESRELLAQLGMPFQK

SEQ ID NO: 42418 - protein, 132 aa, Enterococcus faecalis
MVMTDPIADFLTRIRNANMVKHETLEVPASKIKRDIAEILKREGFIRDVEYIEDDKQGVIRVFLKYGKNEERVITNLKRISKPGLRAYVKADEVPKVLNGLGIAIISTSEGVITDKEARAKNIGGEVIAYVW

SEQ ID NO: 42419 - protein, 61 aa, Enterococcus faecalis
MAKKSMIAKNKRPAKHSTQAYTRCERCGRPHSVYRKFHLCRICFRELAYKGQIPGVKKASW

SEQ ID NO: 42420 - protein, 89 aa, Enterococcus faecalis
MAISQERKNEIIKEYARHEGDTGSPEVQIAVLTEDINQLNEHARTHKKDHHSYRGLMKKIGHRRNLLAYLRKTDIQRYRELIQRLGLRR

SEQ ID NO: 42421 - protein, 704 aa, Enterococcus faecalis
MTEKQVFKTTWGGRPLEVEIGQLAKQANGAVLVRYGDTVVLSAAVASKEAKDVDFFPLTVNYEEKMYAVGKIPGGFIKREGRPSERATLTARLIDRPIRPMFSEGFRNEVQITNIVMSVEQDCTPEMAAMFGSSLALAISDIPFDGPIAGVDVGRINGEYVLNPTVEQAEQTDIELTVAGTKEAINMVESGAKEVSEEDMLGALLFGFDAIKELVAFQEEIVAAVGKPKMDVDLLQVDADLKKEIFDAYYNTMKTAVMTEEKLAREVEIDKVKDTVKEVYAEKFSEHEEEAQLLKEVKQIAEDLEKDVVRELITIDKIRPDGRKLDEIRHLSSEVSILPRVHGSGLFTRGQTQALSVCTLAPLGEHQIIDGLGVQDSKRFIHHYNFPQFSVGSTGRAGSPGRREIGHGALGERALAQIIPSEEDFPYTIRLVAEVLESNGSSSQASICAGTLALMDAGVPIKAPVAGIAMGLVSDGENYTILTDIQGLEDHLGDMDFKVAGTKDGITALQMDIKIQGITEQILTEALDQAKKARMEILEELTTTIAAPREELSQYAPKIEMIQIKPAKIKDVIGKGGETINSIIDETGVKIDIDQDGNVSIASSDAEMIKKAIKIIEELTKEVEVGQVYLAKVVRIEKFGAFVNLIKGKDGLIHISQLANERVNNVEDVVKLGDEVLVKVTEIDKQGRVNVSRKALLNEENKEK

SEQ ID NO: 42422 - protein, 30 aa, Enterococcus faecalis
MSLLKVLFGKFLGTTNQMKEQQRLVTFSFV

SEQ ID NO: 42423 - protein, 258 aa, Enterococcus faecalis
MKEITSTKNNQLKEWKKLHKKKYREELNQYIIEGFHLVEEAVKANADVQWILFNQRGQQEWGTWLAEQETEKLIFVSDEVLNSLSELPTSQGILAIVTLETQQEQSLSFKGGWLLLDNIQDPGNVGTMIRTADAAGLAGVILGKGTADIYNTKVLRSMQGSHYHLPVLQRELTEVVQAFKKQGLPVFGTELNEAAIAYYEQEAVENYALILGNEGSGVSPELLAETTKNLYIPMKGQAESLNVAIAAGVLMFYFENNQ

SEQ ID NO: 42424 - protein, 276 aa, Enterococcus faecalis
MAIKKYKPTTNGRRNMTSSDFAEITTSTPEKSLLQPLKNNAGRNNNGRITVRHQGGGHKRQYRVIDFKRNKDNVAAVVKTIEYDPNRSANIALVHYEDGVKAYILAPKGLEVGMRLVSGPEADIKVGNALPLENIPVGTVIHNIEMKPGKGGQLIRSAGTSAQVLGKEGKYVLIRLNSGEVRMILATCRATIGSVGNEQHELINIGKAGRSRWMRKRPTVRGSVMNPNDHPHGGGEGKTPIGRKAPVSPWGQPAIGYKTRNKKAKSDKLIVRRRTK

SEQ ID NO: 42425 - protein, 92 aa, Enterococcus faecalis
MGRSLKKGPFVDDHLMKKVEAQQGAEKKKVIKTWSRRSTIFPSFVGFTIAVYDGRKHVPVYIQEDMVGHKLGEFAPTRTYRGHVADDKKTKR

SEQ ID NO: 42426 - protein, 399 aa, Enterococcus faecalis
MSKEMLNALDVLEAEKGIPKDTVIEALQAALVSAYKRHYGQASNVEVEFEPKKGNIHVYAVKEVTEEVFDSQLEVSLKDAVALNGAYEIGDKIRFEVTPKDFGRIAAQTAKQVILQRVREAERTIIYNEFSEYENDIMQGIVERQDRRYIYVNLGKIEAVLSKQDQMPNEFYQPHDRIKVYVSRVENTSKGPQVFVSRSHPDLLKRLFEQEIPEVYDGIVEIVSVAREAGDRSKVAVRSTDPNIDPVGTCVGPKGQRVQAIVNELKGENMDIVEWNEDPAIYISNALNPAQVLDVIFDPENSKACTVVVPDYQLSLAIGKRGQNARLAAKLTGHKIDIKSESDMAEFYEQQANQEVAEVAEEMDEAIIHSDMTADDYENLAAEEAVVEAEITEELPEQE

SEQ ID NO: 42427 - protein, 178 aa, Enterococcus faecalis
MSRIGNKVVVLPAGVEIKQDGNNITVKGPKGELTREFSSDIKMNIEGNEVTFIRPNDSKEMKTIHGTTRANFNNMVVGVSEGFQKALELIGVGYRAQVQGNKLTLNVGYSHPVEMTAPEGVTFEVPANTQVIVKGINKEVVGELAANIRGVRPPEPYKGKGIRYVGEFVRRKEGKTGK

SEQ ID NO: 42428 - protein, 130 aa, Enterococcus faecalis
MAQVQYSGTGRRKNAVARVRLVPGTGKITVNKKDVEEYIPHADLREVINQPFGVTETKGAYDVIVNVNGGGYAGQSGAIRHGIARALLQVDPDFRSALKRAGLLTRDARMVERKKPGLKKARKASQFSKR

SEQ ID NO: 42429 - protein, 79 aa, Enterococcus faecalis
MAQQRRGGRKRRKVDYIAANHIEYIDYKDTELLKRFISERGKILPRRVTGTGAKNQRKLTIAIKRARIMGLLPFVSDEQ

SEQ ID NO: 42430 - protein, 188 aa, Enterococcus faecalis
MINNVVLVGRLTKDPDLRYTASGSAVATFTLAVNRNFTNQNGDREADFINCVIWRKPAETMANYARKGTLLGVVGRIQTRNYENQQGQRVYVTEVVCENFQLLESRSASEQRGTGGGSFNNNENGYQSQNRSFGNNNASSGFNNNNNSFNPSSSQSQNNNGMPDFDKDSDPFGGSGSSIDISDDDLPF

SEQ ID NO: 42431 - protein, 463 aa, Enterococcus faecalis
MSIFRKKEITVPVNDSGGMKKNLKTMDLIFLGIGAVVGTGIFVVTGVAAERYAGPGLVLSFLVAAAAIILSGLCYAEFASRIPVIGGPYAYMYVVFGEIVAWMTGWMIICEFFLAVSSVASGWSGYVHGFLDSLGFSLPQALSGAYNPTNGTYIDLIAMLVVVAVTFWVSLEAKTALRLNNLMVFVKFGIILLFVLVGIFYVKPTNWQPFIPYGFSGVFSGAALVFFAFLGFDAVSMAAEEVKNPKKDIPKGIIGSIIISTLLYIVVTLVLTGIVPFTDLGVKDPVAFAMRFINHGAIATIISVGAILTLLTVTIAMMYSLARVIYAISKDGLLPQFMSKIDEKRHTPKNATYVAGFLAMVFAGIVPMEMLAELTNIVTLFYLMFLALGIIKLRTMKGEPQAGEFKVPLVPVLPLISIVVCAALMFQLSLATWQVFGVAVVIGLAIYFFYGRHHSIVRFETKE

SEQ ID NO: 42432 - protein, 118 aa, Enterococcus faecalis
MITKPDKNKTRQKRHRRVRNKISGTAECPRLNIFRSNKNIYAQVIDDVAGVTLASASALDKEISGGTKTETAAAVGKLVAERAAEKGIKKVVFDRGGYLYHGRVQALAEAARENGLEF

SEQ ID NO: 42433 - protein, 98 aa, Enterococcus faecalis
MQTMLLTMNLQLFAHKKGGGSTSNGRDSESKRLGAKSADGQTVTGGSILYRQRGTKIYPGVNVGIGGDDTLFAKVDGVVRFERKGRDKKQVSVYPVAN

SEQ ID NO: 42434 - protein, 114 aa, Enterococcus faecalis
MIKGSFKRTGSGRIVSFELTGHAEAGPYGSDVVCAAVSALAISTVNGIDALAGFEPIVEVDDVEGGYLYVEMLTTVNQEQKNIAQILLENLLLGLQSIENENTEFIQIKTITEK

SEQ ID NO: 42435 - protein, 325 aa, Enterococcus faecalis
MKVFDYEDVQLIPNKCIVNSRSECDTTVTLGKHSFKMPVVPANMQTIIDETIAETLAENGYFYIMHRFDEEARVPFIKKMQQKGLITSISVGVKEGEYAFVETLAREGLVPDYVTIDIAHGHSNAVINMIQHLKKSLPETFVIAGNVGTPEAVRELENAGADATKVGIGPGKVCITKIKTGFGTGGWQLAALRWCAKAARKPIIADGGIRTHGDIAKSVRFGATMVMIGSLFAGHEESPGETKVEDGVVYKEYFGSASEFQKGEKKNVEGKKIWLRHKGKLADTLVEMQQDLQSSISYAGGRDLEAIRKVDYVIVKNSIFNGDTI

SEQ ID NO: 42436 - protein, 415 aa, Enterococcus faecalis
MKVMTERTLKRPEVLAPAGTLEKLKVAIRYGADAVYIGGNAYGLRSRAGNFTPEEMAEGVAFAREHNAKVYVAANMVTHEGNQEGAGAFFRELRDIGISAVIVSDPALIEICATEAPGLPIHLSTQASATNYETLEFWKNEGLERVVLAREVSMEEVAAIRENTDIEIEAFIHGAMCISYSGRCTLSNHMSMRDANRGGCSQSCRWKYELFDMPFGTERRSKTSEGEVEEEFSMSAVDMSMIEHIPELIENGVDSFKIEGRMKSIHYVSTVANVYKKAVDSYMEDPENYVCQQEWIDELWKVAQRELATGFYYNTPSENEQLFGERRKIPQYKFVGEVIAYNEKTQVATIRQRNLFSVGDEIEFYGPGFTHFHQTVKEMYNEDGEAIDRAPNPMMLLTMEVTQPVAVGDMIRKKK

SEQ ID NO: 42437 - protein, 1204 aa, Enterococcus faecalis
MAGHVVKYGKHRERRSFARISEVLELPNLIEIQTDSYQWFLDEGLREMFEDILPIDDFQGNLSLEFVDYELKEPKYTVEEARAHDANYSAPLHVTLRLTNRETGEIKSQEVFFGDFPLMTEMGTFIINGAERVIVSQLVRSPGVYFHGKVDKNGKEGFGSTVIPNRGAWLEMETDAKDISYVRIDRTRKIPLTVLVRALGFGSDDTIFEIFGDSESLRNTIEKDLHKNASDSRTEEGLKDIYERLRPGEPKTADSSRSLLTARFFDPKRYDLANVGRYKVNKKLDLKTRLLNLTLAETLVDPETGEIIVEKGTVLTHQIMETLGEYIDNGLNSVTYYPSEDAVVTEPMTIQVIQVLSPKDPERIVNVIGNGYPDDSVKTVRPADIVASMSYFFNLMEDIGNVDDIDHLGNRRIRSVGELLQNQFRIGLARMERVVRERMSIQDTETLTPQQLINIRPVVASIKEFFGSSQLSQFMDQTNPLGELTHKRRLSALGPGGLTRDRAGYEVRDVHYSHYGRMCPIETPEGPNIGLINSLSSYAKVNKFGFIETPYRRVDRATGRVTDQVDYLTADIEDHYIVAQANSLLNEDGTFANDVVMARLQSENLEVAVDKVDYMDVSPKQVVAVATACIPFLENDDSNRALMGANMQRQAVPLIQPRSPWVGTGMEYKSAHDSGAALLCKHDGVVEFVDAKEIRVRRDNGALDKYMVTKFRRSNSGTSYNQRPIVHLGEKVEKGDTLADGPSMEEGEMALGQNVLVAFMTWEGYNYEDAIIMSRRLVKDDVYTSVHIEEYESEARDTKLGPEEITREIPNVGEDALKDLDEMGIIRIGAEVQDGDLLVGKVTPKGVTELSAEERLLHAIFGEKAREVRDTSLRVPHGGGGIVHDVKIFTREAGDELSPGVNMLVRVYIVQKRKIHEGDKMAGRHGNKGVVSRIMPEEDMPFLPDGTPVDIMLNPLGVPSRMNIGQVLELHLGMAARQLGIHVATPVFDGATDEDVWETVREAGMASDAKTVLYDGRTGEPFDNRISVGVMYMIKLAHMVDDKLHARSIGPYSLVTQQPLGGKAQFGGQRFGEMEVWALEAYGAAYTLQEILTYKSDDVVGRVKTYEAIVKGEPIPKPGVPESFRVLVKELQSLGLDMRVLDIEEAEIELRDMDDDDDDLITVDALTKFAEQQSAKQLEKEAESVVKEEAQDVVQEIETAEDRD

SEQ ID NO: 42438 - protein, 857 aa, Enterococcus faecalis
MYSIIVNGQSETCETNKKLMDFLREDLGLTGTKDGCNQGSCGACTVLVNGKASKACLFTLEKLAGKEVTTIEGLSQRQKDVYAYAFAKTGAVQCGYCIPGMVISAQGLLNKKPEPTKEDIQKAIRGNICRCTGYVKIIEAIQLAAKMFCEEASIPEEHSNGKLGEDFQRVDAVEKTLGTGIYVDDIDIEGMLHASALRSAYPRAKVLSIDSTQALAHPDCVAVFTAKDVPGNNKIGHLEFISDWDVMIPEGEITRYVGDAVALVVSKRKETLPEIKNLVEVDYEEMIPLTSCEAALAEGAPAIHEKGNILSHEHLVRGNAEEVLENSAFVVTEHYSVPINEHAFMEPECAIAQPEGEGILLFSAGQSIYDEQREVARMLGLDKEKIHVQSKLVGGGFGGKEDMSVQHHASLAAWLLKKPVKVLLSREESLMVHPKRHGMEMDFTTGCDEEGNLTAMKAVIYADTGAYASLGGPVLQRACTHAAGPYKYQTIDVEGFAVYTNNPPAGAFRGFGVCQTAFAIESNLNLLAEKVGLSPWEIRFKNAVAPGDTLPNGQLVSKNAALKEALLAVKDVYEQAEVAGISSFFKNSGVGVGLPDTGRCIISVEEGKIHVRTSAACIGQGMATVTTQIACETLNLPPEMIVAEAPDTRRTPNSGTTTASRQSLFTGEATRRAAMQLRYELDMGRALSDLEGEEFYGEYSAKTDPLINDKKSPVSHAGYGYAAEVAILDDKGKVAKFVAAYDMGQVVNPRAAEGQIEGGIAMGMGYALTEKFALEEGYVKAKYATLGLVNATQVPPIETILVHADNLHEGLAYGIKGVGELATIPTAPALAGAYFALDGQLRPSLPLENTPYQKKKR

SEQ ID NO: 42439 - protein, 122 aa, Enterococcus faecalis
MIQQESRLRVADNSGAREILTIKVLGGSGRKTANIGDVIVATVKQATPGGVVKKGEVVKAVIVRTKSGARRADGSYIKFDENAAVIIRDDKSPRGTRIFGPVARELRENNFMKIVSLAPEVL

SEQ ID NO: 42440 - protein, 103 aa, Enterococcus faecalis
MFVKKGDKVKVITGKDKNKEGVVLAAFPKQDKVIVEGVNVVKKHQKPNQAAPQGGILEVEAPIHVSNVMVIDPSNGEATKVAFKEVDGKKVRVSKKTGEVLDK

SEQ ID NO: 42441 - protein, 592 aa, Enterococcus faecalis
  MISC_FEATURE (180)..(180): X=any amino acid
  MISC_FEATURE (183)..(183): X=any amino acid
  MISC_FEATURE (187)..(187): X=any amino acid
  MISC_FEATURE (190)..(190): X=any amino acid
  MISC_FEATURE (215)..(215): X=any amino acid
  MISC_FEATURE (241)..(241): X=any amino acid
DKKKNQVILEETAPLSFKNDKATQTLKQSSQENYFGGGTQNGRFTHKGTAIQIVNTNNWVDGGVASPNPFYWSTAGYGVVRNTWKPGNYDFGSHDPQKTTTTHEGTDFDAFYFFNDSSAGILKDYYELTGKPALMPEYGFYEAHLNAYNRDYWVKVAKEPREQLSLKMVIFTKNTNQAIXETXMARXNLXMEKKRIINFLHAQLLIDIRKTICRXGGSCQMTATVLAMAKQIHWTAMYKTXKNLQSMLKPMVLKWGCGLNLILHPADPKNPKKGERDIAKEVSVAGVKALKTDVAWVGYGYSFGLNGVEDAANVFVKETDGAVRPMIVSLDGWAGTQRHAGIWTGDQTGGQWEYIRFHIPTYIGTSLSGQPNVGSDMDGIFGGKNKEINIRDFQWKTFTPVQLNMDGWGSNPKTPFAFDQEATDLNRAYLKLKSMMMPYNYSIAKESVDGLPMVRAMALEFPNEGTAYTKDSQYQYMWGPNLLVAPIYNGNQDEAGNSIRDGIYLPDEKQVWVDLFTGEKYQGGRVLNGVKTPLWKVPVFVKDGSIIPMTNPNNNPKEIQRDQRSFLIYPNGTTSFNMYEDDGISTSYEAGQ

SEQ ID NO: 42442 - protein, 44 aa, Enterococcus faecalis
MIKGSFKRTGSGRIVSFELTGHAEAGPYGSDVVCAAVTALKFTK

SEQ ID NO: 42443 - protein, 129 aa, Enterococcus faecalis
MAAKKVSRKRRVKKNIESGVAHIHSTFNNTIVMITDTHGNALAWSSAGSLGFKGSKKSTPFAAQMAAEAATKVAMEHGLKTVDVTVKGPGSGREAAIRSLQATGLEVTAIRDVTPVPHNGCRPPKRRRV

SEQ ID NO: 42444 - protein, 914 aa, Enterococcus faecalis
  MISC_FEATURE (71)..(71): X=any amino acid
  MISC_FEATURE (75)..(75): X=any amino acid
  MISC_FEATURE (81)..(81): X=any amino acid
  MISC_FEATURE (84)..(84): X=any amino acid
  MISC_FEATURE (88)..(88): X=any amino acid
  MISC_FEATURE (119)..(119): X=any amino acid
  MISC_FEATURE (135)..(135): X=any amino acid
  MISC_FEATURE (148)..(148): X=any amino acid
  MISC_FEATURE (162)..(162): X=any amino acid
MSIQVHKEAPNMTILELTFATNQLTTTFFNHKLEPLHQKTFPFEALTIEETVPELCQLILAEAAPILGGIVADFPADFFSPEETLALVPQAVIQAFAEQLNTPLLTAAEQAAAPNLLEAFEEKRQYLAWHLDYYGYVPGKNEYAVESLLTVGNGFLGLRGTTPEMTISDDHYPATYIAGLYNTAASEVAGQVVENEDFVNAPDNQHIALKIGDATDWLTISPDTLQQLHRQLNLKTGLFVAEMILKDADNQQIKLTTKKIANMAQPNDYHLQYTFEPLNFSAPITLKTVTDGSVYNYNVARYRNLTAKHFQVTALSAQENKTVIEVCTNQSNLSVRETSLITGDFFEKEAITIQEEAEKIAQVVTVMAHQGTRYTLEKQVFVQASHAEQSWQVPFTPKDSFAAAAQESARAWQTLWQQANITVTGDLMSQKLLRIHSYHLLASASPFSNQAQALDVSITARGLHGEAYRGHIFWDEIFILPFYIQHYPDTAKQLLLYRYHRLEKAKENAAASQYRGAMYPWQSGRDGRETTQKLHLNPLNGHWGEDHSILQRHVSLAIAYNAWLYWHSTQDHEFMKQYGGEMLLEIAQFWNSAATLDDATGRFFIDKVMGPDEFHEGYPDQAESGLKNNAYTNLMVVWLFEELTNILALFSEEEQAQLFAKTQTTSADLARMQQIQNSLEIEVNSDGIIAQYEGYFGLKEIDWTAMKEKYGNIYRMDRILKAEGESPDDYKVAKQADTLMLFYNLDKTRVDQILEDLGYQLPADYLEKNLLYYLKRTSHGSTLSRIVHAQLAEMAQFHELSWQLYQEALYSDYRDIQGGTTAEGIHTGVMAATIHVTLATYAGVDTRQNELSICPNLPEHWQALAFQFIHQGVTYQFSLTQTSVTITADRDTQLLVQGALIPLTAERPKEVHYQ

SEQ ID NO: 42445 - protein, 203 aa, Enterococcus faecalis
MSRYTGPSWKVSRRLGISLSGTGKELARRPYKPGQHGPNSRGKVSEYGMQLTEKQKLRHMYGMNERQFRTLFIKASKIKEGKHGVNFMVLLEQRLDNVVYRLGLATTRRQARQLVNHGHITVDGKRVDIPSYHVEVGQVIGVREKSQNISTIKEAVEATVGRPAFVSFDTEKLEGSFTRLPERDELYPEIDEALVVEYYNQKL

SEQ ID NO: 42446 - protein, 693 aa, Enterococcus faecalis
MAREFSLEKTRNIGIMAHVDAGKTTTTERILYYTGKIHKIGETHEGASQMDWMEQEQERGITITSAATTAQWKGYRVNIIDTPGHVDFTIEVQRSLRVLDGAVTVLDSQSGVEPQTETVWRQATEYKVPRIVFCNKMDKIGADFFYSVESLHDRLQANAHPIQIPIGAEEDFTGIIDLIKMKAEIYTNDLGTDIQETDIPEDYLEKAQEWREKLVEAVAETDEDLMMKYLEGEEITEEELVAGIRQATINVEFFPVLAGSAFKNKGVQLMLDAVLDYLPSPLDIDAIKGIDTKTDEETTRPADDEAPFASLAFKVMTDPFVGRLTFFRVYSGVLESGSYVLNASKGKKERIGRILQMHANTRQEIDKVYSGDIAAAVGLKDTTTGDTLCALDAPVILESIEFPDPVIQVAVEPKSKADQDKMGVALQKLAEEDPSFRVETNVETGETVISGMGELHLDVLVDRMKREFKVEANVGAPQVSYRETFRAATKAEGKFVRQSGGKGQYGHVWVEFTPNEEGKGFEFENAIVGGVVPREYIPAVEKGLEDSMNNGVLAGYPLVDIKAKLYDGSYHDVDSNETAFRVAASMALKAAAKNANPVILEPMMKVTITVPEDYLGDIMGHVTSRRGRVEGMEAHGNSQIVNAMVPLAEMFGYATTLRSATQGRGTFMMVFDHYEDVPKSVQEEIIKKNGGNA

SEQ ID NO: 42447 - protein, 589 aa, Enterococcus faecalis
MSALQELLKDTFGYDDFRPGQETIIRHVLRQENVLGIMPTGGGKSICYQLPALLLDNLTLVISPLISLMKDQVDALNLMGIPATYINSTISYQEMNHRIQLAVNKEVKLLYVAPERLESYDFQQMLTHVPIDLLAVDEAHCISQWGHDFRPSYLRLAEIIDQFQQQPTVIALTATATPQVAEDIVKQLRIPSENEIKTGFARENLSFQVVKDQNRDVFLLEYLKMNTGQSGIIYASTRKEVERIYHLLESKKIAAGMYHGGMSEQLRSENQEAFLYDQVQVMVATNAFGMGINKSNVRFVIHAQVPGNIESYYQEAGRAGRDGLPSDAVLMFAPQDLQIQQYFIEQSEMTIDYKQKEYLKLREMSQYANAQMCLQKYILRYFGEEGTDCGRCSNCLDNRELVDITVDAQKVLSCVKRMGERFGKGLVGKVLTGSKDQKIDQWHFDRLPTYGLMKGRTQKEVTQLIDYLTAERYLIPSDGQFPLLSVSTEGVQVLLGERKVFRKEDQKVRKVAVDDALFERLRELRMDMAQEAGVPPYVVFSDSTLKEMCEKLPQTTIQLLQIKGVGQNKLDKYGTAFLEVIKEYQETKK

SEQ ID NO: 42448 - protein, 412 aa, Enterococcus faecalis
MKRVVITGMGAVTPLGNTVKEFWHNLVDGKLGIGKITKFDSEDTGVALAGEVKEFDPSAVLERKEQKRMDLFSQYGLVAALEAWEMSGLTEATIDPTRLGVIVGSGIGGMTTLQDQVRVMDKKGAKRVTPFFVPMVIANMAAGNISIRLGAKGPSQTIVTACASATNAIGEAFRTIKYGLADMMVTGGTEATVCEIGIAGFAALNALNTTEDATRASIPFDKERKGFVMGEGAGMLVLEELEHAQKRGATIYGEIVGYGSNCDASHMTAPLKDGSGAAAAMEMAIAEAGITPEQIGYINAHGTSTPANDAAETTAIKRVFGERASQIPISSTKSMTGHLLGAAGGIEAIACVQTLQEGKAHPTVGYQVADPDCDLDYVTEGARDITADYTISNSFGFGGHNGVICLKKWEEN

SEQ ID NO: 42449 - protein, 96 aa, Enterococcus faecalis
MELLDVIKRPVITEKSMLAMDEKKYTFEVDTRANKTLVKQAVESAFDVKVANVNILNVRPKFKRMGKYAGYTKKRRKAIVTLTEDSKEIQLFEAAE

SEQ ID NO: 42450 - protein, 122 aa, Enterococcus faecalis
MALNIENIVAELETATILELSELVKAIEEKFDVSAAAPVAVAGPAAGGAAEEQTEFTVELTAAGDQKVKVIKAVREATGLGLKEAKAVVDGAPAPVKEAVSKEEAEALKAALEEVGASVTVK

SEQ ID NO: 42451 - protein, 244 aa, Enterococcus faecalis
MRLDKFLADVGIGSRKEIKQLLKKKVVTVNGDVVKEAKTQVNEETDQIALMGEILTYQKFFYYMLHKPQGVISATEDQRDETVIDLLTDQDYRADLFPVGRLDKDTEGLLLLTNDGQLAHQLLSPKKHVDKEYLAEVEGLVTAEDCQLFAQGFALKDGEMVKPSRLVIETINEEEGTSVVRLVIQEGKFHQVKRMLATVGKPVTYLKRLRMGELWLDETLELGEYRPLTEAELQQLQPKQSYLN

SEQ ID NO: 42452 - protein, 433 aa, Enterococcus faecalis
MEQIIVHGGNTKLEGTVKIEGAKNAVLPILAATLLAEEGVTTLKNVPILSDVFTMNQVIKHLNVAIDFDEDANEVTIDATQPLGIEANYEYVSKMRASIVVMGPLLARNGHAKVAMPGGCAIGKRPIDLHLKGFQALGAKIIQKNGYIEAIADELIGNTIYLDFPSVGATQNIMMAAVRAKGTTIIENVAREPEIVDLANILNKMGANVIGAGTETMRIEGVDKLHAVEHSIVQDRIEAGTFMVAAAMTEGNVLIEEAISEHNRPLISKLTEMGAIIEEEENGIRVIGPKHLKPTDVKTMPHPGFPTDMQAQMTAIQMFAEGTSIVTETVFENRYQHLEEMRRMNADLKIDGNIAVINGGNELQGAAVEATDLRAAAALILVGLRANGITRVSNLKYLDRGYYEFHKKLQKLGANVERVNDEKIEEKQATTVI

SEQ ID NO: 42453 - protein, 1189 aa, Enterococcus faecalis
MENSRKEGPCLNIIERISQTEIAKSWRSQLMTTGTRQLITGLSGSAKTLLMAGALQKTHQKIVIAVPNLYYANQLVDDFLNILPSEQVHLFPVDEVLSAEMAFSSPEARADRVSALNFLMTANAGIVVVPVAGLRKYLPTKETWQNAQLYWEIGTEVEPEILAQRLVLMGYERQAMVGKPGEFSIRGSIVDVYPLNAEYPVRVELFDVEIDSIRYFEADTQRSLENLEEVTISPMTDLVFSKADMNHGMTRLQDALEKRLATAKDQTETDFLEEYFGQLLSSWEQGIPTENAHYYTDFLYQQKTTLLDYLPENSLLFVDDYSRMMETEREIAREEAEWQTLKIEEMRVFSEQTFGVDFHDQLRKTARNTTFFSLFQKGMGNLRFQEVHNFQYRSMQQFFGQMPLLKAEVDRWQKQNQTVVVFVPTKERIQKVEELFQDFDIPSVVSNWDQLLDGHVQIVQGALQTGFELPKNKLVAITEKEIFHTTTKKRARRQTISNAERLKSYSDLKTGDYVVHANHGIGKYIGMETLEVDGVHQDYMTILYQNDDKLFIPVTQLNLIQKFVASESKTPKINKLGGSEWTKTKRKVASKIEDIADDLILLYATRESEKGYAFPPDDAYQKEFEEAFPYSETDDQLRSAAEIKHDMEKSRPMDRLLVGDVGFGKTEVALRAAFKAVSNNKQVAFLVPTTILAQQHYETIQERFEGFPVEIGLLSRFRTKKQQNETIEKIKHGQVDIVIGTHRLLSQDINFSDLGLLIIDEEQRFGVKHKERLKQLRSQVDVLTLTATPIPRTLHMSMLGVRDLSVIETPPENRYPIQTYVMENNPGAIREAIEREMARDGQVFYLYNRVDTIERKVEELQALVPDARIAYAHGQMTEVQLENTLFDFIEGQYDILVTTTIIETGVDIPNANTLFVENADYMGLSTLYQLRGRVGRSNRVAYAYFMYEQQKILNEVSEKRLEAIKDFTELGSGFKIAMRDLSIRGAGNLLGAQQHGFIDSVGFDMYSQMLSEAVARKQGKNIQDQKTSVEIDLGIDAYIPGTYITDERQKIEIYKRIRQLENMDMYEELEADLLDRFGEYPDEVAHLLTTGRIKMDGDRALLESIRKRDQKVKFVLSKIGTKTYSVEQLFEALSATSLKADLAVEKEQMTISLKLPKDCKEAVWIQEIAAFTTALRQEKYKHSQGTDSL

SEQ ID NO: 42454 - protein, 323 aa, Enterococcus faecalis
MSKHYFDPRLKIFSLNSNRPLAEKIADAVGVELGKCSVTQFSDGEIQVNIEESIRGAHVYVIQSTSSPVNDNLMELLIMIDALKRASAKTINVVMPYYGYARQDRKARAREPITAKLVANMIEKAGATRMLTLDLHAVQIQGFFDIPVDHLMGAPLIADYFIEHGIQGDDVVVVSPDHGGVTRARKLAEFLKAPIAIIDKRRPKANVAEVMNIIGHVEGKTCVLIDDMIDTAGTISLAANALKEAGAKDVYASCTHPVLSGPALQRIEDSAIERLVVTDSIYLSDDRKIVKIDEVSVGELIGDAIKRIHENKPVSPLFETKNK

SEQ ID NO: 42455 - protein, 102 aa, Enterococcus faecalis
MAKQKIRIRLKAYEHRILDQSADKIVETAKRTGADVSGPIPLPTERSLYTVIRATHKYKDSREQFEMRTHKRLIDIVNPTPKTVDALMKLDLPSGVNIEIKL

SEQ ID NO: 42456 - protein, 43 aa, Enterococcus faecalis
MKRIEKQNKCFSKQEKILSKKRRKSLLTLSFHSIIKKVLFTGV

SEQ ID NO: 42457 - protein, 216 aa, Enterococcus faecalis
MKNKLYYQFAGSCFLLVFMFLGYVVRFYPTWLKGFDQTITSFVRRPFPQLNNFFIWYTKFANSLTIIILAIVVIALFIVWKYYAEALWLFINTALIAGVGNSLLKLFFMRQRPTLEHLVTEHTYSFPSGHAVGSTLFYGTILLILPIFIKNKTVRLCVQILLGIGIFMIGVSRIYLGVHFPSDILGGFCLGLAWLLLSYPIYLEKRFVWRFQSKQR

SEQ ID NO: 42458 - protein, 764 aa, Enterococcus faecalis
MKRSKWKELIVTGICHILVFPILIQTTVFAETLPSTKQVREGTNHSLTAEKAESEQPQTKDKLHDEETLALSKSELIDNEANVTSQTIRERIETPNLTYRYGFINEEGQPVNANEILLQYHSWQGNSPDGINVWEGESQPVTASTVANLKEVVIPSEKVAVYSDMSTVLAASNQTFFLPRYYTSLSLYNKKGEIDPNYPLPTISDASGNQYPTTISQFELEKMSAQQYSQKTGVTFNISESQKLIVPLYNQVKVDSSNQSGLLNYFKFSGPVYYHVTNRKVTEHFVDTQGKPIPPPPGFRQGKQTLIERDPYTFKQKDLLPSSYEIDSKTYQFQGWYKGKTKPENLEKSVTPSYDITYDDNDDLTVVYKEIPQKNYTFEDVNGVEIAPPSDFIQDHQQPITTDGFRYLAGKKLPQQYSVNGKTYLYQGWYQDKTKQESLEKTKRPINSPVFNEMNAITAVYKEITAKAEMQIEGLVKVMPSGYIQIWQIMLTNVGEVPLKKINLKPASGWSPGLARPIQVTIRVGSEPNKIVPITDENWRVGITLNTEVPIGQTATIMMTTIATGEPDQVLQAAVEMNGNFSAVHAADTVRIQPKNQEIVAPDEEGFISTPTFDFGKVAISSNTQQHGLKQAADYYENGQENPYLRLKKSQPNWALTAELSPFEGRVDQLSSMTKLLLGTTNVSGFIQYNQPTETKVALGKTTAIQLVANGVASHIVANGQFDESDVYQFDFSFDQIKLEIPANQGRKDQTYQAMVTWNLVTGP

SEQ ID NO: 42459 - protein, 395 aa, Enterococcus faecalis
MAKEKFDRSKSHVNIGTIGHVDHGKTTLTAAIATVLSKHGGGEAQSYDSIDNAPEEKERGITINTSHIEYETETRHYAHVDCPGHADYVKNMITGAAQMDGAILVVSAADGPMPQTREHILLSRNVGVPYIVVFLNKMDMVDDEELLELVEMEVRDLLSEYDFPGDDVPVIAGSALKALEGDESYEEKILELMAAVDEYIPTPERDTDKPFMMPVEDVFSITGRGTVATGRVERGEVRVGDEVEIVGIKDETSKTTVTGVEMFRKLLDYAEAGDNIGALLRGVAREDIERGQVLAKPATITPHTKFKAEVYVLSKEEGGRHTPFFTNYRPQFYFRTTDVTGVVELPEGTEMVMPGDNVAMDVELIHPIAIEDGTRFSIREGGRTVGSGVVTEIVK

SEQ ID NO: 42460 - protein, 115 aa, Enterococcus faecalis
MNPLIQELTQEQLRTDIPAFRPGDTVRVHAKVVEGTRERIQLFEGVVIKRRGAGISETYTVRKVSNGVGVERTFPLHTPRVAQIEVVRYGKVRRAKLYYLRALHGKAARIKEIRR

SEQ ID NO: 42461 - protein, 586 aa, Enterococcus faecalis
MAYQALYRVWRSQRFDDVVGQKAITQTLKNAIVQKKTSHAYLFTGPRGTGKTSAAKIFAKAINCKHSQDGEPCNVCETCVAITEGRLNDVIEIDAASNNGVEEIRDIRDKAKYAPTQAEYKVYIIDEVHMLSTGAFNALLKTLEEPPQNVIFILATTEPHKIPLTIISRTQRFDFKRISTQDIVDHMAHIMQEMALDYEEQALYVIGRAAEGGMRDALSILDQTISFSDEKVTLEDAMQVTGSLTYEMMDHYIQCCVAGDVERALEGLESILGEGKEARRFLEDLLLYCRDLLMYQQAPKLLAEKAGTLTEAFKELATQTPAEKIYQLIQILSDTQNEIRFTNNANIYLEVATVKLAKTVQPNKHNTPETANQDGSAEGNPELADLQNQIGQLKKELAELKKHGVAAKEADAPRQQARPQAPKSSFRVPTERVYQVLNEATRTHLMNVKNVWEDLLQTLSVTQRAMLKASEPVAASPKGIVVAFDYEIVCARATDDEEMQLAFNNNLSRLMDYTPEMVCITRESWPKLRQSFINQNQGSLNHSEPENEMARLADEPPVTNEHSQENPVVDEAIAMFGEELVEVLDD

SEQ ID NO: 42462 - protein, 100 aa, Enterococcus faecalis
MSQDTKYEIMYIIRPNIDEEAKTALVERFDTILKDNGAEVIESKDWEKRRLAYEMNGFREGIYHIVNVTSPSTAGAINEFDRLAKINDDIIRHMIVKVEA

SEQ ID NO: 42463 - protein, 106 aa, Enterococcus faecalis
MLYSMYAIIKTGGKQVKVEVGQAIYVEKLNVEAGEKVVFDEVILVGGESTKVGAPTVAGATVEGTVEKHGKQKKVVTFQYKPKKHSHRKQGHRQPYTKVMIEAINA

SEQ ID NO: 42464 - protein, 406 aa, Enterococcus faecalis
MKLTTIPNEFKEAAPVIREINAQGFEAYFVGGSVRDALLNKPIHDVDIATSAYPEEIKQIFKRTVDVGIEHGTVLVLMEDQQYEVTTFRTESTYQDFRRPDEVTFVRSLKEDLKRRDFTINALALDSTGEIIDLFDGIEDLTNQTIRAVGNPHERFHEDALRMMRGLRFASQLDFKIEEKTLAAIAEFHPLLEKISVERITIEFVKMLLGVNRQGGLAPFIETECYQYCPKLREQGAGLFRLMDLPARQIETEAEAWTLLIQSLNLPEAEIRSFLKAWKLSNQLIQNVSQLVRGLRFRLSNDWQPMMLYELGEESAVLVERLLYYYQQESQVQVTKELVKALPIHQRHELAITGKDLLAVLEETPGKWLGELIAEIEQHVVEGSLENKQEVLLSFAKKQRSKGEKA

SEQ ID NO: 42465 - protein, 176 aa, Enterococcus faecalis
MSLLVLSTLLSACSTVSGSPASQSAPAPDEVLATSIGTYENRTLLVPDGRLALTALHKGKDYQGKPMFYVLFELTNTTEKTQNIQLMIQSFMEVSQTVHGKAQNLQYAVLTDSPFQDKLDRLADEINPGETIQGAYPYEFINENKPVHFKFRDRLLSLDEPIASEEITITEKSLVR

SEQ ID NO: 42466 - protein, 224 aa, Enterococcus faecalis
MEREWELFLAPYEQAVSELKVKLRGIRKQFREQDKHIPIEFVTGRVKPVDSILTKTAIRHIPLNRIEEEMQDIAGLRIMCQFVEDIYQVVALLRNRKDLKIVEERDYIENKKESGYRSYHVVVEYPVQLVTGEKIILAEIQIRTLSMNFWATIEHSLNYKYQGVFPEEMKERLQRAAEAAYLLDEEMSSIREEIQEAQHYFSHGRGLLENEYYKQIKNETPENQ

SEQ ID NO: 42467 - protein, 170 aa, Enterococcus faecalis
MGEVMQGKDRILLVRRLDEAATKKAMKPLFQIEHEWEFSRESSGTQTKDGVANAVSGLEVTLSLSGLASRDDENLYMKDAVEDGILMEFWDVDLKGEKNAEGKYPAIYAQGYVNSWSLPANVEELVEIETEASINGKPQDGFATVEADIIAEAQYAFQDTVPDKAPQPGE

SEQ ID NO: 42468 - protein, 225 aa, Enterococcus faecalis
MIAENLTNINNQLQLACKSSQRSVADVTMIGVTKSVGIEEAAELVQLGVQNLAENRVDKLLEKKAGLEKFNDIQWHLIGNLQRRKVKLIINEIDYFHALDSLSLAKEIQKRATKVIRCFVEVNITGEESKHGFRKEDVLPFIQELADLDKIQIVGLMTMAPFGASEEVLHATFRELKELQMTVNEKHLSFAPCTELSMGMSNDFPIAVEEGATFIRIGTALFRDA

SEQ ID NO: 42469 - protein, 410 aa, Enterococcus faecalis
MEFSLDNNINNGAVIKVIGVGGGGGNAVNRMIEENVKGVEFITANTDVQALKHSKAETVIQLGPKYTRGLGAGSQPEVGQKAAEESEQVISESLQGADMIFITAGMGGGTGTGAAPVVAKIAKELGALTVGVVTRPFSFEGPKRGRFAAEGIALLKENVDTLLIISNNRLLEVVDKKTPMLEAFREADNVLRQGVQGISDLITAPGYVNLDFADVKTVMENQGTALMGIGVASGEERVIEATKKAISSPLLETSIDGAEQVLLNITGGLDMTLFEAQDASDIVTNAASGDVNIILGTSINEDLGDEIRVTVIATGIDESKKDRKPHRQTRQAVQPMQQTTQSVEMDQPKSQEEASAFGDWDIRREQNTRPKVDESSLEQVDKKEFDTFHREEPNHNDDELSTPPFFRRKR

SEQ ID NO: 42470 - protein, 88 aa, Enterococcus faecalis
MEKKEFHIVAETGIHARPATLLVQTASKFNSDINLEYKGKSVNLKSIMGVMSLGVGQGSDVTITVDGADEAEGMAAIVETLQKEGLAE

SEQ ID NO: 42471 - protein, 575 aa, Enterococcus faecalis
MSEMLKGIAASDGVAVAKAYLLVQPDLSFNKTSVEDTDAEATRLDDALAKSTEELQAIRDKAAQSLGEAEAQVFDAHLMVLSDPEMVGQIKQNIQDNKVNAEAALKEVTDMYIGMFEAMDDNAYMQERAADIRDVAKRILAHLLGVTLPNPSMINEEVIVVAHDLTPSDTAQLDRTYVKAFVTDIGGRTSHSAIMARSLEIPAIVGTKEITDKVKAGDILAVNGIIGDVIIDPTDAEKSEFEAEAKAYADQKAEWDKLKNAETVTADGKHVELAANIGTPKDLEGVHKNGGEAVGLYRTEFLYMDSSDFPTEEDQYQAYKAVLEGMEGKPVVVRTMDIGGDKELPYLTLPHEMNPFLGYRALRISLSELGDGMFRTQMRALLRASVHGNLRIMFPMVATLKEFRAAKAIFEDEKQKLVNEGVEVSNDIQVGIMIEIPAAAVLADKFAKEVDFFSVGTNDLIQYTMAADRMNERVSYLYQPYNPSILRLIKNVIDAAHAEGKWAGMCGEMAGDQTAVPLLLGMGLDEFSMSATSILKTRSLMKRLDTTKMAELADRALKECDTMEEVFALVEEYTK

SEQ ID NO: 42472 - protein, 91 aa, Enterococcus faecalis
MANKAELIENVASSTGLTKKDATAAVDAVFSTIQETLAKGEKVQLIGFGNFEVRERAARKGRNPQTGQEIQIAASKVPAFKPGKALKDAVK

SEQ ID NO: 42473 - protein, 296 aa, Enterococcus faecalis
MEEQLVDYLHYLQIERGLSNNTRRSYERDLKKYVAFLQEQGLHSWDEVDRYMITEFLQSLHEEQQASASVIRMISSLRGFHQFLRQERLSEHNPMQHIDSPKKVQKLPSTLSVDEVTRLIETPDTSKPLGMRNRAILEVMYATGLRVSELIEIKLGDLHLSIGLLQTIGKGDKERIIPLGDYAIQWIERYMNEARPQLIKNHPNETHLFVNHHGEPLSRQGIWKNLKQIVREAQIEKNITPHTLRHSFATHLLENGADLRIVQELLGHADISTTQIYTHITKQRMADVYKEHFPRA

SEQ ID NO: 42474 - protein, 137 aa, Enterococcus faecalis
MPTINQLVRKPRKSKVEKSDSPALNKGYNSFKKTQTNVNSPQKRGVCTRVGTMTPKKPNSALRKYARVRLSNLIEVTAYIPGIGHNLQEHSVVLLRGGRVKDLPGVRYHIVRGALDTAGVNDRKQSRSKYGTKRPKA

SEQ ID NO: 42475 - protein, 677 aa, Enterococcus faecalis
MTKGGFFCMSQKETFYITTPIYYPSGKLHIGNSYTTIACDAMARYKRLMGFDVFYLTGVDEHGQKIEKKAAELNVTPKEYVDKMAADVQKLWKTLDISYDKFIRTTDDYHMAAVQQIFDRLVEQGDIYLGEYEGWYSVSDEEFFTETQLAEVYRDDEGNVIGGKAPSGHEVELVKEESYFFRMSKYADRLVQYYEEHPEFIQPESRKNEMLNNFIKPGLEDLAVSRTTFSWGIPLKNDPKHVVYVWIDALSNYITALGYGSEDDSLFQKYWPANVQMVGKEIVRFHTIYWPIMLMALDLPLPKKVFGHGWLLMKDGKMSKSKGNVVYPEMLVERYGLDALRYYLLRAIPFGSDGVFTPEDFVSRLNYDLANDLGNLLNRTIAMINKYCDGKVPAYASKVTPFDSELSTTAANVIGKYHEAMEKMEFNTAIAEIWTLVSRANKYIDETAPWVLAKEEEKRNELESVMIHLAESLRIVAILLQPVMTETPGKIFEQLGLDPETMNMENIHFGEFPTDVTVTSKGTPIFPRLEIETEVTYIQKKMSQSESATEEDIKWNPEETTLVSTKEKQIKYDDFDKVELKVAEVIDCKKVKGADKLLQFRLDAGDENHRQILSGIAEFYPDPAALIGKKVVIVANLKPRKMRGQISQGMILSAESPEGKLQIVEAPKEMPNGAGIA

SEQ ID NO: 42476 - protein, 401 aa, Enterococcus faecalis
MYTFKIGIPAEVHDTFVKNHPLCNLLQSSSWAKVKDNWGSEIVGVYEKDTLVASSLVLIKPLPAGFTMLYTPRGPVMDYTNERLVSYFMAELKKFGKKKRALFIKMDPAVHYQDFHLGEEHQPHAEATSIIETLKEAGAKYQGLTMDMGATIQPRFQANIYREDFSEEQLSKSTKKMIKTAEKKGVVVQQGHVDFVDEFEKVIQSTMERQHISLRNSDYFKKLLNIYPEDSFIMLAQVNLKERLDSTRQRYDKNQKDLSNLKENQVKKRHNLEELDASLTRELKELEENIAEAGEIVTVAGALAVTFGPTSEILYAGLDDRYKRYMPTYVTWRDAIQECFNRGCESCNMGGLEGSLNDGLIKFKANFNPTINEFIGEFDLPVNKLLFKASEYAYKLRKQKK

SEQ ID NO: 42477 - protein, 880 aa, Enterococcus faecalis
MSEEKNLPTKYQPTEIEAGRYQKWLDQDLFKPSGDKKAKPYSIVIPPPNVTGKLHLGHAWDTTLQDMIIRQKRMQGFDTLWLPGMDHAGIATQAKVEEKLAQQGISRYDLGREKFVDQVWEWKEEYASHIREQWAKMGLSLDYSRERFTLDEGLSEAVRKVFVSLYEKDLIYRGEYIINWDPKAKTALSDIEVIHKDIEGAFYHMSYPLSDGSGVVEIATTRPETMLGDTAIAVHPEDERYQELIGKTVVLPLVDKEIPIIADDYVDMEFGTGVVKITPAHDPNDFEVGNRHDLPRVNVMNEDGTMNELAGKYEGMDRFAARKAIVSDLKELGRLIKIETMNHSVGHSERTGVVVEPRLSTQWFVKMGPLAEKAMKNQETEDAVEFYPPRFNQTFLRWMENVHDWVISRQLWWGHQIPAWYHKETGEMYVGMEEPADSENWVQDSDVLDTWFSSALWPFSTMGWPNEASEDYQRYFPTSTLVTGYDIIFFWVSRMIFQSLEFTGERPFQNVLIHGLIRDEQGRKMSKSLGNGIDPMDVIEKYGADALRWFLSNGSAPGQDVRFSYEKMDASWNFINKIWNASRFVIMNVEGMTAADIDFSGEKTVADRWILTRLNETVARVTELFDRFEFGEAGRQLYNFIWDDFCDWYIEMSKEILYGDNEAAKQTTRSILVYTLDQILRLLHPIMPFVTEEIWEKIPHQGESLVVAEYPVVHEEFNDEAAARGMEVLKEVIRSVRNIRAEVNTPLSKPITLLIKTNDTEVEEFLTANTSYLERFCNPEELVISREIEAPELAMSAVLTGAELFLPLAGLINIEEEIARLEKELDKWTKEVKRVQGKLSNERFVSNAPDEVVEAERAKEKDYLEKQEAVKERIAQLRSI

SEQ ID NO: 42478 - protein, 119 aa, Enterococcus faecalis
MARVKGGTVTRKRRKKVLKLAKGYYGSKHTLFKSAKEQVMNSYYYAFRDRRQKKRDFRKLWIARINAAARMNGLSYSKLMHGLKLAEIDINRKMLADLAVNDAAAFTALAEQAKDALSK

SEQ ID NO: 42479 - protein, 565 aa, Enterococcus faecalis
MKRVSTIKIVPLGGVRENGKNMYVAEVEDEIFVLDCGLQYPENELLGIDVVIPDFTYLEENSERIAGVFLTHGHADAIGALPYLLSKIQVPVFGTELTIELAKLSVNSHAETKKFKDFHVIDPHTEIDFGQATVSFFKTTHTIPDSIGVSIKTKEGNIVYTGDFKFDQSAIEMYQTDYGRLAEIGKEGVLALLSDSSNAENPAQVASEAQIADEVFDTIRYWEGRIIVACVASNLQRVQQVLNAADRSGRKVVLTGQDFERIIRTAMKLEKLQLPSEDLLVKPKEMKKYAPEQLLILETGRMGEPIKSLQKMANNTHGVVRIEEGDLVYITTTPTTAMETTVAKTEDIVYRAGATVKQISDNLRVSGHANPNDLQLMLNLMKPKYFIPVQGEYRQLAAHADLAHEIGMPYKDIFITGRGDILEYTKGRMSVAGSTTAENIMIDGIGVGDIGNIVLRDRRILSEDGIFVAVVTINRREKRIVSPAKITSRGFVYVKTSKDLMKESSNIVTEIVEKHLESDDFEWSKLKQEIRENLSRYLFEQTKRRPVILPVIMEATQRKRPKNNA

SEQ ID NO: 42480 - protein, 460 aa, Enterococcus faecalis
MEEIVLFHTNDLHSHFENWPKIRRLVKAKRSLYQKEGKTVVTIDLGDFSDRCHPLTEATDGRANVAIMNTLAYDLVTIGNNEGIGNSKKQLEHLYDQATFEVVLANLEEPKTQTLPDFCQAYKIMTTKEGTKLGFIGLTAPFPLTYNPNGWTIKQVEAVLPQLITEVAPQCDVLILLSHLGIDTDFMIAANYPEIQVILGSHTHHLFKDGEKINHVQLAAAGKYGQYIGEVHLFVDADTKQVTSYAKTIETASLEEQATDAKEIAGYLTEGHRLLQAQQIAQIPETLSTDLRQPHAFITVALKALKEAGQTEAAVLNNGLFLADLPEGIINADQLHEALPHPMHLIKVTLKGSDMSRLIREMEKSRQFLRKFPIRGMGFRGKIFGELCYDGIRFEPNSQTVFWQGKPIQPEQKYTLTTVDHFQFVPFFPTIELVGEVEFLFPDVLRTVVANYLHAHYPIK

SEQ ID NO: 42481 - protein, 536 aa, Enterococcus faecalis
MTKYIFVTGGVVSSIGKGIVAASLGRLLKNRGLKVTIQKFDPYINVDPGTMSPYQHGEVFVTDDGAETDLDLGHYERFIDINLNKYSNVTTGKIYSEVLRKERKGEYLGATVQVIPHITNEIKEKIMRAAKMTDADVIITEVGGTVGDIESLPFLEALRQMKADMGSDNVMYIHTTLIPYLKAAGEMKTKPTQHSVKELRSLGIQPNILVVRTELPVSQNTKNKLAQFCDVNPEAVIESRDVETLYSIPLALQAQNMDQIVCDHLKLDAPAADMTEWRALEEKVLNLKKKTKIALVGKYVELPDAYISVVEALKHAGFDFDSDIEIDWVDSQELTAENVAERIGSADGILVPGGFGDRGIEGKIEAIRFARENDVPFLGICLGMQMACVEFGRNVVGLEDAGSAETNPDVTNNIIDLMADQENIENLGGTLRLGLYPCKLKKGTKTAAAYGNEDVVQERHRHRYEFNNKYRQLFEENGLVFSGVSPDNRLVEIVEIPEKQFFVACQFHPELISRPNRPQRLIKGFVGAALANKESK

SEQ ID NO: 42482 - protein, 91 aa, Enterococcus faecalis
MAVKIRLKRMGSKKSPFYRIVVADSRSPRDGRFIETVGTYNPLKDPAEVVLKEDLVLDWLSKGAQPSDTVRNILSKEGVMKKHHEAKNVKK

SEQ ID NO: 42483 - protein, 926 aa, Enterococcus faecalis
MKMKETLQLGKTAFPMRGNLPNREAEWQKDWEEKGLYEQRQKLNEGKPTFVLHDGPPYANGNIHLGHSLNKISKDIIIRSKSMSGFRSPYVPGWDTHGLPIEQVLTNKGVKRKEMTVAEYREKCKEYALSQVDKQRNDFKRLGVSGDWEHPYITLDPEYEAAEIRVFGKMAEKGYIYKGLKPIYWSPSSESSLAEAEIEYKDVKSPSIYVAFNVADGKGLLDNETAFVIWTTTPWTLPANLGISVNPDFTYVEVKADGRKFVIAKDLLTTVKEAIGWEEVEVLREFSGEKLDRMTAQHPFYDRTSLVMLGDHVTLDAGTGLVHTAPGHGEDDYIVSRKYDLPVISPVDSRGVFTDEAPGFEGIFYDKANPMITELLEEKGALLKLDFFTHSYPHDWRTKKPVIYRATPQWFASISKFRQDILDEVEKVDWLIPWGKTRLYNMIRDRGDWVISRQRAWGVPLPIFYAENGEAIITPETIEHVANLFAEHGSNIWFMREAKELLPAGFTHPGSPNGEFTKETDIMDVWFDSGSSHEGVLREREELTFPADMYLEGSDQYRGWFNSSITTSVAINGVAPYKSIISQGMVLDGEGRKMSKSLGNTILPEKVINQMGADILRLWVSSVDAEADVRVSMDILNQVSEVYRKIRNTMRFLLANTSDFNPAEHTVAYADLRSVDKYMTVRLNQVIQEIRENGYEKYNFMHIYRTVMNFLTVDLSSFYLDFAKDVVYIEAENDYQRRCMQTVFYQTLVSLTKLLTPIIPHTAEEIWSFLQEEEEYVQLAEFPGYETFTNEEELMDTWAAFMDFRDNVLKALEEARHSKLIGKSLEAKVTVYPNEQIRQLMTAVDADIAQLLIVSDFEVSKEVAPSEAVQFEDMAILVEKAEGETCDRCRSVRQDVGSDEKLPTLCGRCAHIVEENYPEAVAEGFE

SEQ ID NO: 42484 - protein, 1451 aa, Enterococcus faecalis
MTEKARDLFDKLMTQIQLDDTAKEHPLIQNGRIDKVIVHQQSRLWEFHLSFDELMPVMLYQTFMQQLELAFQQIAQVSVQITTNQTTFTEEQLTDYWQLALLNSQCNTPLVQKVLKTQTPQFEDRKIILPVDNEAVIPYLKQQYLPIIEELYFSYGFPKFHIEPKMDQQQAAEVLKKFEEQKLEQAAAFQQQAAESLVKHEQMKKEKQQQAPAFDGPIRLGRNIPNDEPIMPMGNILEEERRITIEGFIFDKEVRELRSKRKILILKITDYTSSFVVKKFSNGEKDEQVFDAIQPQSWIRVRGSVQEDTFMRDLVMNAQDLMEVAHAPRKDYAPEGEKRVELHMHSNMSTMDATNKVGDLVAQAGKWGHKAIAITDHGGAQAFPDAHAAGKKAGVKILYGVEANIVDDGVPIAYNEEHIELTDATYVVFDVETTGLSAVYDTIIELAAVKMHKGNVIETFEQFIDPGHPLSQTTINLTGITDEMVRGSKSEEEVLRMFKEFSEGTILVAHNASFDMGFLNTSYGKHGIPEAANPVIDTLELSRFLYPHFKSHRLNTLSKKFGVNLEQHHRAIYDSESTGHLCWIFLKEAKENHDMHFHDDLNRHIGEGDSYKRARPFHATILATTQAGLKNLFKLISMSNVDYFFRVPRIPRSQLSKLREGLLIGSACSNGEIFEAMMQKGVEEAKNRAKFYDYIEVMPKPVYAPLIEQELVKNEADLEEIISNLVKIGDELGKLVVATGNVHYLNEEDAIYRKILVGSMGGANPLNRHSLPKVHFRTTDEMLTEFQFLGQDIAKRIVVENPNKVADLCEEVIPVKDDLYTPKIPGSEQEITDLSYNRARELYGDPLPEIVEKRLEKELNSINGNGFSVIYLISQKLVHKSNEDGYLVGSRGSVGSSFVATMTGITEVNPLAPHYYCPECQYSEFYEDGSYGSGFDMPEKACPKCGARLFKDGHDIPFETFLGFHGDKVPDIDLNFSGDYQAEAHNYTKVLFGEEYVYRAGTIGTVADKTAYGFVKGYERDHNLHLRGAEIDRLAKGSTGVKRTTGQHPGGIIVIPDYMDVYDFTPIQYPADDQEAEWKTTHFDFHSIHDNILKLDILGHDDPTVIRMLQDLSGIEPKTIPTDDPEVMRIFEGPDVLGVDAEQIYSKTGTLGIPEFGTRFVRGMLEQTHPSTFAELLQISGLSHGTDVWLGNAEELIRRGEANLAEVIGCRDDIMVYLIHAGLDSGMAFKIMETVRKGQWNKIPDELRDTYLNAMKENNVPDWYIDSCSKIKYMFPKAHAAAYVLMALRVAYFKVYFPILYYCAFFSVRADDFDLVAMSQGKEAVKARMKEITDKGMDASTKEKNLLTVLELCNEMLERGYKFGMIDLYKSDAENFVIEGDTLIAPFRAVPSLGLNVAKAIVAAREEQPFLSKEDLATRGKVSKTLIEYMNENGVLKDLPDENQLSLFDML

SEQ ID NO: 42485 - protein, 321 aa, Enterococcus faecalis
MEWTQIFIPIVVSFAITVSVMPLFIGYFQMKKQGQVTREDGPTWHSVKTGTPTMGGVVFLVASLITSLAMGLFFHQFTPSLLIILFILVLYGLLGYLDDFIKVFKKRNMGLNSRQKLIGQIFGGLVFYFVYRSEGFSDTLDLFGVAEVPLGIFYGVFIIFWLVGFSNAVNLTDGIDGLVAGLGTISFGTYAIIAWKQQQFDVVIICLSVIGGLIGFFPYNRKPAKIFMGDVGSLALGGLLAAISIILHQEWTLLLIGLVYVCETASVILQVASFKLFGRRIFKMSPIHHHFEMCGWSEWKIDFVFWSVGLICSGITLWILF

SEQ ID NO: 42486 - protein, 456 aa, Enterococcus faecalis
MKKITTYQNKKVLVLGLAKSGVSAAKLLHELGALVTVNDAKQFDQNPDAQDLLTLGIRVVTGGHPIELLDEEFELIVKNPGIPYTNPLVAEALTRKIPIITEVELAGQIAECPIVGITGTNGKTTTTTMIGLLLNADRTAGEARLAGNIGFPASTVAQEATAKDNLVMELSSFQLMGIETFHPQIAVITNIFEAHLDYHGSRKEYVAAKWAIQKNMTAEDTLILNWNQVELQTLAKTTAANVLPFSTKEAVEGAYLLDGKLYFNEEYIMPADELGIPGSHNIENALAAICVAKLKNVSNAQIRQTLTNFSGVPHRTQFVGEVQQRRFYNDSKATNILATEMALSGFDNQKLLLLAGGLDRGNSFDELVPALLGLKAIVLFGETKEKLAEAAKKANIETILFAENVQTAVTIAFDYSEKDDTILLSPACASWDQYPNFEVRGEAFMQAVQQLKESEM

SEQ ID NO: 42487 - protein, 394 aa, Enterococcus faecalis
MTERHLFTSESVSEGHPDKVADQVSDAILDAILEKDPMARVACETSVTTGLVLVFGEISTTAYVDIQKIVRQTVKDIGYTRAKYGFDGETVAVLVAIDEQSPDIAQGVDAALEVRDQDEKDDIGAGDQGLMFGFAVDETPELMPLPIALSHRLVRRLAELRKEKVLPYLRPDAKSQVTVEYDDQGQPQRVDTIVISTQHDDETTLEQIEKDIKEQVINEVIPHELLDDETKYFINPTGRFVIGGPQGDAGLTGRKIIVDTYGGYARHGGGAFSGKDATKVDRSASYAARYIAKNIVAAGLAKKVEVQLAYAIGVAQPVSISINTFGTSDLPESKLIEAVRKNFDLRPAGIIEMLDLRRPIYKQTAAYGHFGRTDIDLPWEQTDKVEALKASLAE

SEQ ID NO: 42488 - protein, 491 aa, Enterococcus faecalis
MERGMNMTKVRVRYAPSPTGHLHIGNARTALFNYLFARHNDGEFIIRIEDTDQKRNIEDGEKSQLENLAWLGMEWDESPAHPGEYGPYRQSERKEIYQPLIDQLLSSNRAYKCYCTPEELEAEREAQQARGEMPHYAGTCANLTPSEQAAKEAAGLEPVIRFRVPRNTEYKFDDIVKGEITFESDNIGGDFVIQKRDGMPTYNFAVAVDDHLMKISHVLRGDDHIANTPKQLMIYEAFEWTPPVFGHMTLIINSETGKKLSKRDETILQFIEQYRELGYLPEAMFNFIALLGWSPVGEEEIFSQEDLIKLFDEQRLSKSPAAFDAKKLEWINNQYMKQMDLSELTDMCIPYLVADGRVEENPSPEKIEWLKQLVSLYQPQMSYAAEIVELSNLFFNEHPVLDDAAKEFLQGETVPTVLHAFKEQLEALDVFDVPSIKAAIKAVQKETGVKGKNLFMPIRIAVSGQMHGPELGETIELLGKEKALDHLNKVL

SEQ ID NO: 42489 - protein, 742 aa, Enterococcus faecalis
MSKRHKFKQFMKKKNLNPMNNRKKVGIILFATSIGLFFLFAFRTTYIVATGKVAGVSLKEKTASLYEGSQVVKAKRGSILDRYGNPIAEDATSYSLYVVLSKKYTGQNNEKLYAEKKDFDDIAEILAKYTKLDKKTALKYLNNGIHEDGSTQYQVEFGTGGQNITLETRQKIEADLKKKKISGVYFNEHPARLYPNGQFASHFIGYTKAANPDDDKEGLVGAMGLEQTYNDILSGTDGRVYFEKDIYGNALPGTVAEEKKAVDGQDIYTTLDSRLQNTLEDLMTQVNEKYEPVSMTAMLMEAKTGEIVAMSQRPTFNPETKQGLDDNGTWQNLLVESPYEPGSTIKLFTTAASMEQGQFNPNELFNRVGGIQVGDVTVNDHDYTRLNGKEYLNYRQAISWSSNIGMVKLEQKMGDEKWMEYLKKFGFGTSTHSGLSGESAGKLPGTNFVDRAMSAFGQAITVTNFQMMKGFSAIANDGSMLQPHYISKIVDKNTGKETITEPQIVGTPIKAQTAQQIRTYMIDTVEDPTYGIAYDIYKVPGYHVAAKTGTAQISDGKGYVDGASQVLSSVVEMVPADNPEYVLYITLRQAKSGSPSEAMAAIANPLMKLALDIKETDPETTKVASDKVTVADYKNMTPAEALANAKVNGVDPVIIGDGEKIKKQSTPSGQTLMPNQKLILITNGTNYMPDLTGWSKSDVTKFGDLLGLTVEFKGEGYVTKQSIAAETEITEKKLTVTLEGTE

SEQ ID NO: 42490 - protein, 602 aa, Enterococcus faecalis
MCGIVGMIGKENVTESLIQGLTKLEYRGYDSAGICVNDQSQQPHVVKAVGGIADLAAKLTPEIDGTVGIGHTRWATHGEPTVANAHPHVSSDQRFALVHNGVIENFEELKEQFLSGAHLIGDTDTEIVVQLIAHFAENGFSTKDAFKAALAEIKGSYAFALMDKMDPNIIYVAKNKSPLLIGLGEGFNVICSDAMAMIKETNQFVEIVDGEIVTVTADKVVIETPEGQVINREPFEAQLDLNDIEKGTYPFYMLKEIDEQPAVMRKIVQAYTQGEKVTLDEALLEKINQCNRIYIIACGTSYNAGWVGKSLIETIASIPVEVHLSSEFGYNMPILSEKPFFIFLSQSGETADSRQVLVQVNELGHPSLTLTNVAGSTLSREADDTLLLHAGPEIAVASTKAYTAQIAVLAILAKAIGEERQTLAAVSFDVAHELSVVAAVMETLIDEKQQMKALVEDYLTYTRNAFYIGRGVDYYVSMEAALKLKEISYIQAEGFAAGELKHGTIALIEEGTPVIGIVTDAKVAAHTRGNLKEVESRRARNIVIALESLAKPQDQLIIPDVHPLLSALVSIVPGQLLAYYATLQRGYDVDKPRNLAKSVTVE

SEQ ID NO: 42491 - protein, 162 aa, Enterococcus faecalis
MQLEEVKALLTQFDQSTLTEFDLREGSFELYMNKNTVSGRSAVEPVAQPQETPVAASGVSVPVETVSVVEETPTNTPTANEKTEEITSPIVGIVYLQPAPDKENFVKVGDTVKTGDVVCIVEAMKLMNEITATVDGVITEILVNNEDVVEFGQPLFRVAKGE

SEQ ID NO: 42492 - protein, 880 aa, Enterococcus faecalis
MKELTSSQVRQMYLDFFKSKGHSVEPSASLVPVNDPTLLWINSGVATLKKYFDGSVVPENPRITNAQKSIRTNDIENVGKTARHHTMFEMLGNFSIGDYFKNEAIHWAWEFLTGAEWLAFDPEKLYVTVYPKDTEAKRIWRDEVGLSEDHIIDVEDNFWDIGAGPSGPDTEIFYDRGEEFLDIPEDDPENYPGGENERYLEIWNLVFSEFNHTPEDTYEPLPHKNIDTGMGLERVVSIIQDAPTNFETDLFMPIIHAVEALGTNVKYGDAPQTDVSFKVIADHIRALSFAIGDGALPSNEGRGYVLRRLLRRAVMHGKKLGINEAFLYKLVPVVGEIMVSYYPEVLQQKDFIEKVVRTEEERFHETINEGLSMLNEVIKEVKDAKGDTLDGKIIFKLYDTFGFPVELTEEVAEDEGLKVDHAGFETEMEAQRERARSARSKETSMGVQSALLTDIKVESKFVGYTELTHDSELFVIIQGDALVNEASAGTAELIFAETPFYAEMGGQIADRGYVKNTAGEVVANVVDVKKAPNGQFLHKVEVLAPLAEGQIYQLQVDERMRTRILKNHTATHLLHRALKDVLGEHANQAGSLVAPGHLRFDFTHFGQVTSEELARMEAIVNEKIWEAIPVVTIETDIDTAKNMGAMALFGEKYGKEVRVVNIGDYSIELCGGTHVANTEDIGIFKIVSESGIGAGVRRIEAVTSKEAYQLLQEEERQLKEIATLVKSPQLKEVVTKTEQLQQQLRDLQKENEQLAGKLANQQAGDIFKDVKDINGVRYIAAQVNVKDMNQLRQLADQWKQKELSDVLVLATAQDEKVSLLAAMTKDMNGKGLKAGDLIKAIAPKVGGGGGGRPDMAQAGGKNPAGIADALAEVENWLANA

SEQ ID NO: 42493 - protein, 156 aa, Enterococcus faecalis
MPRKGPVAKRDVLPDPIYNSKLVTRLINRVMVDGKRGIAANIIYNSFDIIKESTGNDPLEVFEQAMKNVMPVLEVKARRVGGSNYQVPVEVRPERRTTLGLRWVVNYARLRGEHTMEERLAKEIMDAANNTGASVKKREDTHKMADANRAFAHYRW

SEQ ID NO: 42494 - protein, 448 aa, Enterococcus faecalis
MTQQYLTVTALTKYLKRKFDADPYLGRVYLTGEISNFRFRANAHQYFSLKDDHAKISAIMFKSAFQKLKFQPKEGMKVMVVGRISLYENSGSYQIYIEHMEPDGVGALYQALAELREKLGKEGLFEGPKQQLPRYPKRIAVVTSPSGAVIRDIITTVKRRYPIAQLVLFPTLVQGEQAADDIVRNIQRADAQSDFDTMIIGRGGGSIEDLWPFNEEKVARAIHAATTPIISSVGHETDVTIADMVADVRAATPTAAAELAVPVLNEELLRISERRSRLEQSFLYLLQQRTERFQRLQNSYVFKQPERLYEGQTIKLDRMTQRLFQAMTTIHHQKQRQAQGIIAQLQQQTPKGQLRESQQQLAFLQRNLQTQMTQLFLNKQKQFTSAVQQLDLLSPLKIMGRGYSYTTKEDRVVKTVTELQPADQLTIHYADGTVQANVETITAKKEEF

SEQ ID NO: 42495 - protein, 233 aa, Enterococcus faecalis
MNQRTIYYGSIGTALFLSSGMLIASVNSYANEATTPGKYTVTYEVDGKIETATITVKENQTELKLKDTFLGVNQAWSPLDNVVFLKDKEGRPLNLENVIIENNVNTQKVGLYFVTFRYESYLSIAKVYVNPTNFAAEGNMLAELPYSQAMIGPERSIIASRQDKEQQTKQEKKKNKIEQERVNKKVLLNDELLKKIDTIAPVEITGGAASGSSQFGTTLSFLSGSLLYGTRRV

SEQ ID NO: 42496 - protein, 478 aa, Enterococcus faecalis
MEFLLLDDRENLKLAIIRKLEQQYSFSERKDRLCKQLAISPYLLERNITEINADLQRFGLINEMEISEKNNEILLSQSLRISSSIIEEYYLKDSLEFNLLKTIFFHQFTSIKKYGEKHGMSRTVVYKIVDHIRKELGQYGIKLSKNLQLSGNEMAIRQYFTMLYYRIYKDSEELYNQTDLRAVNQLLAQLKGSYENITNFHLFKHYVLVALERTQRKANYFLSQEENPFAFDEESSIYQEIQSWINEVMKATHAEKNAEIQGIIGNLSVYQSELISEHLLSSHNEAITATKTLFFSYMPFTISDEEFYQEIVPIIYQHRFITPFIDITLRIMDLEFFQERYPIVFNSCRQFLFALDCSAFEFSKLSLFFDLLLVLSRLYDQRNEKSTINLYVNFTQGEKYTQFIKEQIKIFESFSIHFHSAIRPDTDLVVSDYLPKTLFSVKCLIWLAPPRASDWQNFGNEIVRINKELQQTKQRKSE

SEQ ID NO: 42497 - protein, 498 aa, Enterococcus faecalis
MAEEQQAHLEDLNDQMLVRREKMEALREEGIDPFGKRFDRTHNSAELHEQYDNHTKEELSEMNTEVSVAGRMMTKRGKGKAGFAHLQDREGQIQIYVRKDQVGDEAYELFKHADLGDFFGVTGQVMKTNTGEVTVKAQTITLLTKALRPLPDKYHGLTNVEQRYRQRYLDLISNKESFDRFMKRSQIISEIRRYLDGNGYVEVETPVLHNEAGGAAARPFITHHNALDMDLYLRIALELHLKRLIVGGMEKVYEIGRVFRNEGIDTTHNPEFTMLEAYTAYTDYQDVMDLTEGIIRNAAEKVLGTTDITYDGQAVDLGSPFKRLHMVDAVKEQTGVDFWQEMTIEEARALAKEHNVEITDAMTVGHIINEFFETFVEDTLQQPTFIYGHPVAVSPLAKKNPEDGRFTDRFELFIIGKEFANAFTELNDPIDQRERFEEQEKEREQGNDEAHGVDEDFIEALEYGLPPTGGLGIGIDRLVMLLTDAQSIRDVLLFPTMR

SEQ ID NO: 42498 - protein, 1271 aa, Enterococcus faecalis
MRKEQPKMSKTIPLRPANEQFTDSQWQAVFDGDENILVSASAGSGKTTVLVRRVIEKVKSGVDIDRLLIVTYTEAAAREMKERIQVALQKAMNEEQDPERRRHFSRQIALLPTANISTLHAFCLTVIRRFYYLIDIDPVFRMLTDETETLLLKEDVWDALREQFYAENQEAFYQLTANFSNDRSDDGLTNLIFSFYEFAKANPDPEAWINGLTQAYEVGDQLGESKLFQTYLKPLAVETLQRTLQRYEEMVTLTEGEEKLQKIWYLAQNEKEQTKQFLQFLERNDLESAYNLTELLSFDRYPTVRAEELKPTAEQAKQLREQNKKALNDLKKQLFTLSPDAMKQVLKEATPIVQEMAHVGKQFMEAYGAEKRLKNLVDFNDLEHYTLAILAKNQADGWHASEASVYYREKFDEVLVDEYQDINQLQESILYWLRRPLSTEGNLFMVGDVKQSIYSFRLADPTLFIEKYNQYGQGKEGKRIILAENFRSRKDVLDFTNLVFSQLMDERVGQIAYDESAALVHGFDQFSEAADYSTELLIYEKKATESVEFPELQSPELLIEDKTEGELYVTALKIRELIDQNFLIYDKKLKTDRPITYQDIVLLTPTKKNNLTILDVFKSLEIPVQVNDAQNYFQATEIRTMIALLQLIDNPYQDIPLAAVLRSPIVGLKENELVLIRLANKETSYYEAFLTFNQKMEPTMEEAVVQEKTIRFAESLEKWREQARRNQISNLLWTIYRETAYLDYVGGLPVGKQRQANLYALVDRAAAYEKTTFRGLFQFVRFIEKMQEKDKDLAEPVVLSEENAVRVMTIHASKGLEFPVVFVLDMTKEFNVSDLNERYIFEENLGVGIRYLQPEERVMYDTLPFLAIKQVRLRKLLSEEMRKLYVALTRAEQKLFLVGSYKDQAAMWKEWLKVGDVETLVLPAENRLQSKSSLMNWVGMTLVRHQKADEYQQEVVVSNVPQVKKHPANFHIQWFNEEQLRAAIQQLQLPERQAEDLAEKAQLSADKINRGLARLSFNYPFEVATRTTSYQSVSEIKRVFDDPDNKEIGKIEVREDNTIQAQPLIVNRMIEGDLSKPKFLDTVQAPSAAEIGTATHYLLQLIDLSKQPSYEEVRAVQERLVENKLILPAIAEKMNLEQIVAFFDTALGKQLIQHHQTVRREQPFSMLIEAEELIQNYPETTQDDLLIHGIIDGYIELDNQCILYDYKTDHVKGTSPQAISEIVERYRGQMNLYRRALQEATHKEVSHVYLILLNGGVIIDMQTGNVVDFIK

SEQ ID NO: 42499 - protein, 804 aa, Enterococcus faecalis
MSYNHKEIEKKWQKYWAKNNCFNTLDDPNKEKFYALDMFPYPSGQGLHVGHPEGYTATDILSRMKRAQGYNVLHPMGWDAFGLPAEQYALDTGNDPAEFTKKNIETFRRQINSLGFSYDWNREINTTDPEYYKWTQWIFTKLYEKGLAYEAEVAVNWVPELGTVISNEEVIDGKSERGGYDVVRRPMRQWMLKITAYADRLLEDLELVDWPESIKDMQRNWIGRSEGANVTFKVAGTEESFTVFTTRPDTLFGATYTVLAPELELVKKITTPEQTAAVEAYIEETSKKSDLNRTDLAKEKTGVFTGAYAINPVNGQEIPIWIGDYVLASYGTGAIMAVPAHDERDYEFAKTFGIDILPVIAGGDITTEAYTGDGPHINSDFLNGLNKAEAIAKMNEWLEENHVGKKEVSYRLRDWLFSRQRYWGEPIPVIHWEDGTTTTVPESELPLRLPVTSDIRPSGTGESPLANIDEWVNVVDPETGMKGKRETNTMPQWAGSSWYYLRFIDPHNKNEIADFEKLKRWLPVDIYIGGAEHAVLHLLYARFWHKFLYDIGVVPTKEPFQKLYNQGMILGENNEKMSKSRGNVVNPDDVVAKYGADTLRLYEMFMGPLDASIAWNENGLEGSRKFLDRVWRLIVDEEGKMRDRITTINDGRLTKVYHQTVKKVTEDMANLHFNTAISQLMVFVNEANKVDALPYEYVEGFVQLLAPIAPHIGEELWQILGNEESLTYVPWPTYDETALVEDEVEVVFQVNGKLRGKQNVARGLSKEELEQIAMNHEAVKEFIEGKTVRKVIAVPDKLVNIVAN

SEQ ID NO: 42500 - protein, 124 aa, Enterococcus faecalis
MPTEMFTKEFLVKESQTAKMLGSGDLEVLGTPALAAMIEQTAKEAVKDQLSVGETTVGTVLELRHLFPSAVGATIVVTMTSIEQTAHKIRYEFVAYEGERQIAKGSHQRAVVEIDSFLKRITKD

SEQ ID NO: 42501 - protein, 456 aa, Enterococcus faecalis
MFSKVLIANRGEIAVRIIRACRELGVQTVAVYSEADQEALHTQLADEAICIGPAKATDSYLNVQAVLSAAIVTNAEAIHPGFGFLSENSQFASMCEECNITFIGPKAETIDAMGNKINARQLMQKAKVPVIPGSDGVIDSVEEALTIAEEIGYPVMLKAAAGGGGKGIRKVLSKEELPKHFTSAQQEAKAAFGNDDMYLEKIIYPARHIEVQILGDQYGHVIHLGERDCSLQRNNQKVLEESPSIAISEEKRQMLGETAVRAAQAVHYENAGTIEFLMDPAGDFYFMEMNTRIQVEHPVTEMVTGIDLVKAQLEIASGEPLGYTQEDVIMSGHAIECRINAENPAFNFAPSPGKIQNLLLPSGGMGLRVDSAMYSGYSIPPYYDSMIAKVIVHGENRFDALMKMQRALNEIVTEGIITNAEFQLDLITHDNVLTGDYDTSFLQETFLPNWEPESNH

SEQ ID NO: 42502 - protein, 288 aa, Enterococcus faecalis
MALFKKKNYIRINPNRAHANDASKKPSVPDNMWAKCPSCKRTLYTKEMGAEKICPHCGYSFRIGAWERLAITVDEKSFHNWDSELVTKDPLNFPGYLEKIEKMQEKTGLDEAVLTGEATIEGQAVAIGIMDANFIMGSMGTIVGEKITRLFERATEKHLPVVIFTASGGARMQEGIFSLMQMAKISAALQRHNKAGLLYLTVLTDPTTGGVTASFAMDGDIILAEPQSLIGFAGRRVIEQTIRQELPDDFQKAEFLLEHGFVDQIVPRNLLRQRLSDLLRLHSLEGWR

SEQ ID NO: 42503 - protein, 457 aa, Enterococcus faecalis
MKLTFWEVAQAVEASNDWQQWPDFPLTGIEFDSRKIVKGNLFVPLQGENDGHRFIESAMANGCQAAFWGQDLVDAPQQLPVLHVTDPLVAMQKLATYYLNKMQPNVIAVTGSNGKTTTKDLIAAVLSEKFVTYKTQGNYNNQIGLPYTILHMPDETEKLILEMGMDHAQEISFLSNLAQPEVAAITMIGEAHVENLGSRAGIAQAKMEIVDGLAKDGSLFVPSDEPLLEPLVEKVTQQVITFGFSQESQLQGIVTNEAKEQTSFKISDTQMTFTIPVPGTYNVTNALIAIGIGRYFQLTDSEIQKGLATAELTKNRTEWLKAANGAEILSDVYNANPTAMGLVLDSFSKMSKVGKRIAVLGDMLELGPDSAAMHQAMAQHLAPDAIEEVFLYGSEMAYLADKLQETYAPANIHSFKKEEKNELIEAVKKVLQPEDMVVLKGSNGMGLREVIDALLEK

SEQ ID NO: 42504 - protein, 136 aa, Enterococcus faecalis
MANLVYSPKDILQKEFKTKMMNGYDPIEVDEFLDNVIKDYEAYNKELLSLQEENSRLMAKLDQLSKAQPTPRVAQEVPKSAAVTNFDILKRLSNLEREVFGKKLDETPSTPVTPSAPSMPAEPANHDVDNAQTRQF

SEQ ID NO: 42505 - protein, 293 aa, Enterococcus faecalis
MADVTAKMVKELRDMTGVGMMDAKKALVKVEGDMEKAVDFLRENGMAKAAKKNDRIAAEGLANVATVGNVAAIVEVNSETDFVSKNEMFQDLVKDIATKVAENKPATMEEAMAIKTEKGTIESDLIEATTVIGEKISFRRFEVVEKADNAAFGAYLHMGGRIAVLTVIDGTTDEEVAKDVAMHIAAINPRYVNESQIPQEELEHEKAVLTEQALNEGKPANIVEKMVVGRLQKFKAEIALVDQPFVKDPDMTVEKFVASKGGEVKSFVRFEVGEGIEKREDNFADEVMSQMKN

SEQ ID NO: 42506 - protein, 572 aa, Enterococcus faecalis
MKQSKMLIPTLREVPNDAEVLSHQILLRAGYIRQVAAGIYSYLPLANRVLEKLKTIMREEFEKIDAVEMLMPALLPAELWKESGRYETYGPNLYRLKDRNDRDYILGPTHEETFTELIRDEINSYKRLPLNLYQIQTKYRDEKRSRSGLLRGREFIMKDGYSFHADEASLDQSYRDYEKAYSRIFERCGLEFRAIIGDGGAMGGKDSKEFMAISEIGEDTICYSTESDYAANLEMATSLYTPKKSHETQLDLEKIATPEVGTIAEVANFFEVEPQRIIKSVLFIADEEPVMVLVRGDHDVNDVKLKNFLGADFLDEATEEDARRVLGAGFGSIGPVNVSEDVKIYADLAVQDLANAIVGANEDGYHLTNVNPDRDFQPISYEDLRFVQEGDPSPDGNGVLAFTKGIEIGHIFKLGTRYSDAMGATVLDENGREKSVIMGCYGIGVSRLLSAIVEQNADERGINWPTGIAPFDLHVVQMNVKDEYQTKLSQEVEAMMTEAGYEVLVDDRNERAGVKFADADLIGCPIRITVGKKAVDGVVEVKIKRTGEMLEVRKEELESTLSILMNTTSEVE

SEQ ID NO: 42507 - protein, 135 aa, Enterococcus faecalis
MAELKKVNDFHYEAPEMDQPTVATEQDRKMQEETLPVPTLLPKKKLKNVSLLEKLIGVVLVCATIGIAIATIQVRTTIVQTMNDITETQAVIKEKEDNALKLEQERSELSKSDRIKDVAKKQGLENNGDNVRTVK

SEQ ID NO: 42508 - protein, 356 aa, Enterococcus faecalis
MKTKKIVVGLFCSMIVLMGCQPDQRTEKMKESTEAEAVQVTSGASAATNATSVKREEQTNTNDQPKESAAKVSYERNGHTFEVDAVSGATVEANNGQSGISPEEKAQKMYWSGRPEIGEVQGDYYHHEVVFDGGYTALIDVVVKDQQIQLVEFDERGPKNYYSEEWAGVTKRLSGYANFQANNARTDQSLVTVVNTMTFLENQMVAENRLDGAFQTAKGQSNSANNGYLPAARALAKEIKEPSKEHYTSLTEDFEEGLSGRLTVITLKDSGKITDLRYDEYFADTEEEIKDAKLKAYSRQSKYFSKDYAQKSGENFKKEVDDLRKKAIEENKLVSPTNEEAWSENYQSLVKKITSQ

SEQ ID NO: 42509 - protein, 75 aa, Enterococcus faecalis
MVFEKIQAIIVEELGKDAEEVQLTTNIQEELDADSLDLFQIINEIEDEFDVKIETEDGIQTVQDLVTYVEKQQAN

SEQ ID NO: 42510 - protein, 436 aa, Enterococcus faecalis
MANPTIAIVGRPNVGKSTIFNRIAGVRISIVEDTPGVTRDRIYTTGEWLGREFSIIDTGGIDLGDEPFMDQIKHQAEIAIDEADVIIFVASGREGITDADELVAKILYRSNKPVILAVNKVDNPEMRNDIYEFYALGLGDPFPVSGSHGLGIGDVLDEAVKHFPNTSEEEDEDTIKFSLIGRPNVGKSSLINAILGEDRVIVSDIEGTTRDAIDTYFESEEGQKFLMIDTAGMRKRGKVYESTEKYSVMRAMRAIERSDIVLMVLNAEEGIREQDKRVAGYAHEAGRGIIIVVNKWDTVKKDTNTMRDFEAEIRDEFQYLDYAPIIFVSALTKQRLNKLPELIETVSMNQNLRIPSALLNDVVMDAVAINPTPTDKGKRLKIFYATQVAVKPPTFVIFVNEEELMHFSYARFLENQIRKAFTFEGTPIKIIPRRRK

SEQ ID NO: 42511 - protein, 447 aa, Enterococcus faecalis
MPDVESFWHSLEEAYQAILSAPSFDAWIKTTRPLKLDNNQLWLEVPSAVHRDYWEKNLSAKIVETGFKLTGAEVMPHFVVADEKDAALAQELEEPAEEEVVFSEQSKKAMLNPKYTFDTFVIGKGNQMAHAAALVVAEDPGSIYNPLFFYGGVGLGKTHLMHAIGHQMLVNQPDAKVKYVSSETFTNEFINSIQTKTSEQFRKEYRNVDLLLVDDIQFLAEKEATLEEFFHTFNDLYNENKQIVLTSDRPPNDIPKLPERLVSRFAWGLSVDITPPDLETRIAILRKKADAERLEIPDDTLSYIAGQIDSNIRELEGALVRVQAFATINGEDITTSLAADALKSLKSVGSKNQLSILQIQEEVSKYYHVPLKDLKGKKRVKTIVVPRQISMYLAREMTDNSLPKIGAEFGGKDHTTVIHAHEKIQQLLEKDPAIQKEVSEIKNLLNS

SEQ ID NO: 42512 - protein, 261 aa, Enterococcus faecalis
MAVISMKQLLEAGVHFGHQTRRWNPKMKKYIFTERNGIYIIDLQKTVKLVDAAYDYMKNVAEEGGVALFVGTKKQAQEAIKDEAIRAGQYYVNHRWLGGTLTNWDTIQKRIARLKKINAMEEDGTFEVLPKKEVAGLNKERERLEKFLGGIADMPRIPDVMYIVDPRKERIAVQEAHKLNIPIVAMVDTNCDPDEIDVVIPSNDDAIRAVKLITAKMADAFIEGNQGEDQATEELFVEETPEATSIEEIVDVVEGNNESAE

SEQ ID NO: 42513 - protein, 438 aa, Enterococcus faecalis
MSMFLDQVTIDVKAGKGGDGMVAFRREKYVPDGGPAGGDGGRGGDVVLVVEEGLRTLMDFRFNRHFKATPGENGMSKGMHGRGSEDLLVKVPPGTTVRDAETGALIGDLIENGQTLVVAKGGRGGRGNIRFASPRNPAPEIAENGEPGQERKIELELKVLADVGLVGFPSVGKSTLLSVISSARPKIGAYHFTTLVPNLGMVTTSDGRSFAAADLPGLIEGASQGVGLGTQFLRHIERTRVILHVIDMSGMEGRDPYEDYLAINKELASHNLRLMERPQIIVANKMDMPEAEENLAKFKEQLAKERTDEYADELPIFPISGVTRKGIEPLLNATADLLEVTPEFPLYEDEVVEEETVRYGFQPEGPEFTIDREPDASWVLSGEKLEKLFEMTNFDHDETVMRFARQLRGMGVDEALRARGAKDGDIVRIGNFEFEFVE

SEQ ID NO: 42514 - protein, 461 aa, Enterococcus faecalis
MFHFVIKGTGFSSKNLQEIKVYEETLFCIDEAGVIQEIIEPDAEAYETVLAEQKEAQRFQELPQDSYLLPGFVDLHVHAPQWAQSGTALDIPLYEWLNTYTFPLESKFADLAFAQQVYDELVTQLLANGTTTALYFATIHYEASRRLAEICAEKGQRGLIGKVVMDDLNENPEYYRDQTTQQALEETERFIQEIQTLAQQTKQGVYPVVTPRFIPSCTEEALKGLGELAAKYQVHVQSHCSESDWEHQFVQERFEKNDAQALNDFGLLTEKAVMAHAGFLEEADMNLFHETGTAVAHCPISNAYFGNAVTPIAKLVHQHQVEVGLGSDLSGGFSPSLFDNLKQAVISSRMLEDGVDATKKPEVRGVKTARITVNEAFYLATAGGGQALSLPIGKLEKGYAWDVQIINTSLSQARIPKNPGESLLDIFQKILYLARPENIREVWVQGEKVHDKNLMSATKGV

SEQ ID NO: 42515 - protein, 443 aa, Enterococcus faecalis
MSEKKQNNLHLTVGPEDSVSFGQATMLGIQHVLAMDVYVVPVIIASIIGISTAQTSSLIQATFIAAGLATIIQSHFCMRLPVAQGPSFIPIGAIAGIYFANNQQGNGWGAVLGASLVGAIVVIILGFTGIFNRLITKFVPPIVGGTIIFVVGLSLMPVALSDNIYHAKGELGQNILLAFIAAGTLIFFALLGSALKKGRIFRVSSVILALLFGSIAAQLLGVLDLSAVSKAAWFSLPQLPLVNFSFQFDWSAIATMLVIYLVLMAETTGTWFAVSHVVAEPLTEEKINRGVIGEGLGCLVSSFIGGTPVTSYSTNAGIISITGVASRKVFVAAGAWFVLFGLSGKLSTLISAIPAPVIGGVFVVVCGIISVSGMKVMSDVTIHEKEMYVIAVPIIMTLALTLLPKEFLETLPQFLQYLFSSPVATASIVAILLQAILPNVQEG

SEQ ID NO: 42516 - protein, 489 aa, Enterococcus faecalis
MEKLYDKSLTELHDLLVSKEITAVDLTEETLNRIQDTEEQLGSFITVSEEKAMALAKAIDLKGITESNPLAGIPIGIKDNIVTKDILTTAGSKMLHNFDPIYDATVMDKVYQADMIPVGKLNMDEFAMGGSTETSYFKKTKNAWDQTKVPGGSSGGSASAVAAGQVPVSLGSDTGGSIRQPAAFNGIVGLKPTYGRVSRFGLIAFASSLDQIGPLTRNVKDNALALNAISGYDEKDGTSAGVSVPDFTADLTGDIKGMKIALPKEYLGEGVQPDVREAVLKAAETFKALGATVEEVSLPHSKYGIAAYYIIASSEASSNLQRFDGIRYGYRSENVQNLEDVYVNSRSEGFGTEVKRRIMLGTFSLSAGYYDAHFKKAGQVRTLIKQDFENVFADYDLIIGPSTPTVAFGLGENINDPITMYMYDILTVPVNLAGLPGMSIPAGFSEGLPVGLQIIGKHFDEHTMYKAAYAFEQATDFHTKKPVILGGND

SEQ ID NO: 42517 - protein, 820 aa, Enterococcus faecalis
MEKRQEVQELTLEEVMGDRFGRYSKYIIQERALPDIRDGLKPVQRRILFSMNKDGNTFDKGFRKSAKSVGNIMGNYHPHGDSSIYEAMVRLSQDWKLREVLIEMHGNNGSMDGDPPAAMRYTEARLSQLSGELLKDIDKNTVDFVWNFDDTEKEPTVLPAKYPNLLVNGSTGISAGYATEIPTHNLAEIIDGTVYLIDHPNASLEKLMEYIPGPDFPTGGILQGKAEIKKAYETGRGKVILRAKTKIEPLKGGKQQIVISEIPYEVNKATLVKKMDEIRLNKKVDGIAEVRDESDRTGLQIVVELKKDVNAEGILNYLFKNTELQINYNFNMVAIDNMTPQQVGLKRILESYITHRKSVIINRCQFELDKARKREHIVAGLIKALSILDKVIATIRGSKDKKDAKKNLVSDYAFTEEQAEAIVTLQLYRLTNTDITDLQEEAKTLEQQIAELLNILNNEKELFSVMKKELREVKKQYGNPRLTQIEEEIQEIKIETAVLVAQEDVVVTVTHEGYIKRSSIRSYTASKPEEIGMKEGDFLLYAGEVNTLDHLLLVTNKGNMIYRPVHELPDLRWKEIGEHISQTILNLAIDESIIAVYPYKELSPTKTFVFITKAGMIKQTKMADFEPWRTYKSRPTSCMKLKSDQDEITNVYLTNDQDLLDVFLVSNRGFGLRYPLYEVPVVGSKAAGVKSMNLKEDDYVVNGLLVHSEGDTPIVIVTQRGGVKRMLAQELTQLGRAKRGLMVLRELKKNPHRVVFMSESTDLDLLVTTQKGTQEVIQSKNYPISERTSNGSFVIDEQKDGQVMEVHEMHSAVIEEEQTN

SEQ ID NO: 42518 - protein, 1294 aa, Enterococcus faecalis
MKRINWQRLATIGLCSSLVINAFFGVTAIAETVTSESSPTVANSIKEATPASSARQESTESSQETTETSREKVTQETAKQAETKAPLETPEIKTNTTAQPAENSSENDRQTSISPRWVPNNQVIYPRITLAFTNESGQAFADENLTLSGTYTKFGYEDATSLWRPYAVNYPITSSNAGGGQYRVAVNATVPLPYDFFTDLPANYRMNIYAVEQLKIDNTLKYVDSIVAVPDSTLRMTRYSAQQTTELPQFGNHMTPFVLRTRDSIFSKSSENVFSLNTDGNEFLRILSVAPIGTPVEPVLYGFDGTATYRETLNYVVTRKQVTEKFVDANGVAITPPTGFTQNKKTPMTSNDFTFKQASTLPDTYQADGKTYKFKGWYKGKTKPNTLTTTKAPSYAVTYDGNDDLTVVYEAIQEGKGMSSVQVMNKAIQNPVTLPDRMYRVLFINETGGLTFADRYGFTGELVEVADGKVTPIGPVPTNNNSAVKEITIPGRVFDTERPTPLQYGVRNATFTLPKMYKTVTYQPGPNYTGTAYSIPETYRLSLRSGVKSDIDTTGWRIGLDPTTDPQKFTMSGIYWSSMPINVRLATLLSATITGKGVEPSVYTLDENARMYLYLENRRVTENFVDTNGTKITAPSGFAQGKKTVITSDSYTFKQSGDLPDTYKVGTKTYQFKGWYKGKNKPDTLTTTKAPSYPVTYNDDDDLTVVYEEVVMKTYNLPAKDVYFGYVDEADNLLNTAGFSVEAELGESDETESTVLGKIQGTDEVMSKLKKLSIPGKSYDFPIDKLKTYGARSVNHTIPKQYKTMSITPLATYTGDKTKYPMSKEIRKNIEAPYTVVSQADGAEAFKLTDAGTFFRTRRAFWTWDPNNTLYAMGIYSGTVGKNYNLASPEGTIYYYLENRRVTENFVDPSGAKITPPTGFTQGKQTVIDSDNFTYASTKALPDTYTTGDKFYKFRGWYKGKTKPGTLTTTKTPSYAVTYDDKDDMTAVYEEVQPTAEMTVSRLLEVIPNEASMVWTVRLKNTSEVPLTNVKLAPTAKWAAGISPPTQLAVRIGNTPNKIILVTAEQWQAGVNLDIEIPVNGEALVTVNTAKITGEPRQLLTAEMTASGNFSAVTASNFVRIQGEDQTITPTPVEEGFISTPMFDFGKITINSSTKQYGLKKAADYYGSGTRNPYLRIKTSQPNWQLTAQLSQLTASADSLPTSTRLLLGSADVIAIENYNQVTELTNKVGVTKALTLTSDGTSTPVILNNQFTGNDVYQLDFDFANVKLEVPANQGKINEKYQGTVTWNLVTGP

SEQ ID NO: 42519 - protein, 144 aa, Enterococcus faecalis
MKKVMTATEIMEMIPNRYPICYIDYVDEIIPNEKIIATKNVTINEEFFQGHFPGNPTMPGVLIIEALAQVGSILILKMDQFEGETAYIGGINKAKFRQKVVPGDVLKLHFEIVKLRDFVGIGKATAYVEDKKVCECELTFIVGR

SEQ ID NO: 42520 - protein, 649 aa, Enterococcus faecalis
MTEEEKNMRERAQEYDASQIQVLEGLEAVRKRPGMYIGSTSGEGLHHLVWEIVDNSIDEALAGFAKSIQVIIEPDDSITVIDDGRGIPVGIQAKTGRPAVETVFTVLHAGGKFGGGGYKVSGGLHGVGSSVVNALSTSLDVRVYKDGKVYYQEYRRGAVVDDLKVIEETDRHGTTVHFIPDPEIFTETTVYDFDKLATRVRELAFLNRGLHISIEDRREGQEDKKEYHYEGGIKSYVEHLNANKDVIFPEPIFIEGEQQDITVEVSMQYTDGYHSNILSFANNIHTYEGGTHESGFKTSLTRVINDYARKQKLMKENDEKLTGEDVREGLTAVVSIKHPDPQFEGQTKTKLGNSEVRTVTDRLFSEYFTKFLMENPTVGKQIVEKGMLASKARLAAKRAREVTRRKGALEISNLPGKLADCSSKDPEKCELFIVEGDSAGGSAKQGRSREFQAILPIRGKILNVEKASMDKILANEEIRSLFTAMGTGFGEDFDVSKARYHKLVIMTDADVDGAHIRTLLLTLFYRFMRPIVEAGYVYIAQPPLYGVKQGKNITYVQPGKHAEEELAKVLEELPASPKPSVQRYKGLGEMDDHQLWETTMDPEKRLMARVSVDDAIEADQIFEMLMGDRVEPRRAFIEENAHYVKNLDI

SEQ ID NO: 42521 - protein, 473 aa, Enterococcus faecalis
MTKQQFGVVGMAVMGKNLALNIESRGYTVALYNRTGSKTTEVVEEHPDKNFQATYSIEEFVNAIEKPRRIMLMVKAGPATDATIQELLPHLDKGDILIDGGNTFFKDTMRRNEELANSGINFIGTGVSGGEEGALKGPSIMPGGQKEAYELVAPILEKISAKAEDGEPCVTYIGPNGAGHYVKMVHNGIEYGDMQLIAESYDLMKQILGLSVDEMAEIFKEWNEGELDSYLIEITADILTRKDDEGTDQPIVDVILDAAGNKGTGKWTSQSALDLGVPLPLITESVFARFISAYKEERVKASGILSKPAAFNFAGDKKELIEKIREALYFSKLMSYAQGFAQLRAASEEYGWDLPFGEIAKIWRAGCIIRAQFLQKITDAYEKNPALENLLLDEYFVEITKKYQQAVREVVAIAVQAGVPVPTFSSAIAYYDSYRSDRLPANLIQAQRDYFGAHTYERTDKEGIYHYSWYNEE

SEQ ID NO: 42522 - protein, 340 aa, Enterococcus faecalis
MKQKVAVLGPGSWGTALAQVLAENGHEVCIWGNKPEQIDEINTKHTNKHYLPELILPTSIQATTDLATALVDVDAVLFVVPTKAIRSVAQEVAQHLKTKPIIIHASKGLEQGTHKRISEVIAEEIPAEKRQGIVVLSGPSHAEEVAVHDITTITAASENLADAVYVQELFMNDYFRIYTNDDVIGVETGAALKNIIALGAGAIHGLGFGDNAKAAIMTRGLAEISRLGVAMGANPLTFIGLSGVGDLIVTCTSVHSRNWRAGNLLGKGHKLDEVLENMGMIVEGVSTTKAAYELAQQLEVEMPITETIYNVLYNDEDVQQAAKEIMLRDGKTENEFTLDF

SEQ ID NO: 42523 - protein, 259 aa, Enterococcus faecalis
MIKIIVAGFKGRMGSTATQMVLETADFELVGVYDPHEAQETVSFNDETAIPVFQRLEEVLAVKPDVWIDFTVPEAAYPNTRFALEHGMAPVVGTTGFTEEQINELTNLSREKAIGGLIAPNFAIGAVLMMQFAQKAAQYFPDVEIIELHHDNKLDAPSGTAIKTAEMIQEVRPAKKQGNPQEVESIPGARGADFEGLRIHSVRLPGLVAHQQVQFGSVGEGLTIRHDSYDRRSFMTGVALACRQVVQRTELLYGLEQML

SEQ ID NO: 42524 - protein, 508 aa, Enterococcus faecalis
MTISLFAIRDCLEKEDLLKEFISPEGWHLTLSDTLGQREVTALSYDSRDVTAETLFFCKGLNFKEIYLENAVKDGLEIYVSEVPYEVPAQLGIIVTDIKKAMAVLSMAFYDYPQNKLKLIGFTGTKGKTTAAYFTKYILDVATQQKTALLSTMNSTLDGKTFFKSALTTPESLDLYRMMATAVANGMTHFIMEVSSQAYKTNRVYKLFFDVGIFLNITPDHISPIEHPTFDDYFYCKRQLITHSKVIVLNHEADYFPLLKETAQQQKVPAIVYGSQPAPEVDYSFAVSSEDSLRFIVESPADALGLAGSYHLRLGGDFNKGNALSAAIASVLVGASKEECQQGIAATTVPGRMESLTNTNGATVYVDYAHNYDSLKNLLTFVREEHPDGRLIVLVGSTGDKAISRRKDFGRVLSELADVAVLTTDDPASEDPAKICQEIQAHITKEMPVYTVLDRGEAIAHALSLSTTADDAIVLAGKGADLYQKVNGVDEPYAGDFALAEAFINKKN

SEQ ID NO: 42525 - protein, 246 aa, Enterococcus faecalis
MRIDVLTLFPRMFEGPMGESIIGKAREKQLLELNVSNFRDFSDNKHQTVDDYPYGGGAGMLLKVQPIYDNLKAIEEETNQQPKRVILLDPAGKPFNQKMAEEFSQEEHLVFICGHYEGYDERIRTMVTDEVSLGDYVLTGGELGAMVMIDATVRLLPDVLGNNLSAQTDSHSTGLLEHPQYTRPAIFNDMEVPAVLTNGNHKLIAEWQLKESLRRTFLRRPDMLESVEMTPEMLKLLEEIKQEEQK

SEQ ID NO: 42526 - protein, 713 aa, Enterococcus faecalis
MNEDIKVIFDSIYRDKTTNNLTITGWALDTITKESPTFTINNENQVSAYNIQRVLREDVNQIYQTEPAIEAGFVVTLEGIKQKKVLPFHFQSSAHVITVDFPLNKKYPVIPGTEDKVTRLWIKAKKGFKYMAKNGISHTIQRAKIEKLRNQASYPNWLARNEVLDIEAMTQEIATFHYQPKISIAMPVYNVEEKWLRLCIDSILNQVYTNWELCMADDASTDPNVKKILTEYQQLDERIRVVFREQNGHISEATNSALAIATGEFVALLDNDDELAINAFYEVVKVLNENPELDLIYSDEDKIDMDGNRSDPAFKPDWSPDLLLGTNYISHLGVYRRSILEEIGGFRKGYEGSQDYDLVLRFTEKTTKERIKHIPKVLYYWRMLPTSTAVDQGSKGYAFEAGLRAVQDALVRRGINGHATHGAANGLYDVYYDIESEKLVSIIIPTKNGYKDVQRCVSSIIEKTTYQNYEIIMADNGSTDPKMHELYAEFEQQLPGRFFVESIDIPFNFSTINNRAAKKAHGEYLLFLNNDTEVITENWLTLMVSFAQQERIGCVGAKLLYPNNTVQHAGVILGLGGVAGHGHYGYPHGDLGYFGRLAINVNYSAVTAACLLMKKADFDAVGGFEEAFTVAFNDVDLCLKVQALGRDNVWLHEAELYHFESQTRGYDDKGKKKKRFEQEKVMMEEKWGPLIENDPFYNPNLTRDIPNFSLRID

SEQ ID NO: 42527 - protein, 402 aa, Enterococcus faecalis
MPNKVKKRHLLDYSIFIPYLILSIVGLIMVYSSTSALQVMKGFSPTSFVINQVAFWVVGLVAMFFIYKMKTSVFQNRSFIMFAIAVITVMVLAVRIPGIGKEINGARGWIEIGGFSMQPAEYLKIMVVWYLSYILARRQKTINGGMDQFKQAAGRPLMLVFVLIALVAIQPDFGNAAILTLITIVMVLASGINYMYTYLVGGLGILGSITAIQLLIMSKGKIFPARYQYIYNRFAVFKNPFLDERNLGHQLANSYYAISNGGWFGKGLGNSVQKKGFLPEAHTDFIFAITLEELGIIGGLAILGLLMFMIARIILVGVRSKKPFNSLMCIGIGTMLLIQVFINVGGITGIIPLTGITFPFLSQGGNSLLIISIAVAFVLNISADETRQKLENEYYLSLEQNQ

SEQ ID NO: 42528 - protein, 1142 aa, Enterococcus faecalis
MKKVLVANRGEIAIRIFRACTELDIRTVAIYAAEDEYSVHRFKADEAYLVGKGKKPIEAYLDIENIIQIAKKSGADAIHPGYGFLSENLRFAERCEEEGIIFVGPKTHHLDIFGDKIKAKEAAVAAGIASIPGSDGPVATVEEVVAFGETHGFPIMIKAALGGGGRGMRVAHDAKEAREGYERAKSEAKAAFGSDEVYVEKYISNPKHIEVQILGDHHGNVLHLFERDCSVQRRHQKVVEVAPCVSMNEEQRAAICSAAVQLMAHVGYVNAGTVEFLVEGDQFYFIEVNPRVQVEHTITEMITDIDIVISQLQIAQGLDLHKDMHLPKQNELTLKGAAIQCRITTEDPLNQFMPDTGKIDTYRSPGGFGVRLDVGNAYSGYAVTPYFDSLLVKVCTHGFSFEQAISKMQRCLKEFRIRGVKTNIPFLQNVVSYPAFQSGEAKTTFIDNTPELFEFPRMRDRGNKTMKYIGEVTVNGFPGIERTEKKYFEAPRVPTDIEVPEKVITAKNILDAQGATAVIDWVKNQESVLMTDTTFRDAHQSLLATRVRTQDFKAIAGLTDAALPELFSSEMWGGATFDVAYRFLTEDPWQRLRKIRQLMPNTLLQMLFRGSNAVGYQNYPDNVIEEFIKESARQGVDVFRIFDSLNWIPQMEKSIQVVRDTGKIAEAAICYTGDINDPARAKYNVQYYLDMAKELENLGAQIIAIKDMAGLLKPQAAYRLISELKAATDLPIHLHTHDTSGNGIITYSAATKAGVDIVDVAMSAMSGATSQPSMNSLYYALVNGERTPTINIDNAQKINHYWEDVRMYYQPFENGLNAPQTEVYMHEMPGGQYSNLQQQAKAVGLGHRWDEIKKIYHTVNLMFGDIVKVTPSSKVVGDMALFMVQNNLTEQDVYARGEELSFPESVVTFFQGDLGQPVGGFPKELQRIILKGRPAFTERPGDLAAPVDFAKVQEELAEKIGYQPKLEEVLSYLMYPQVFLEYRQKYETFGDITLLDTPTFFNGIRQGETLEVQIERGKTLIIRLDEIGEPDIDGNRVLFFNLNGQRREVLVKDASIKSAVQVKQKAEPTNKEQIGATMSGSVLQVLVKRGDKVEKGQPLLITEAMKMETTIEARFAGTVDHIYVEEGEAISSGDLLLEVKEK

SEQ ID NO: 42529 - protein, 295 aa, Enterococcus faecalis
MPENLQLVIITGMSGAGKTVAVQSFEDMGYFCIDNLPPSLIPKFWELIKESGKVTKIALVIDLRSRTFFREIQDMLVELENTNFIDTTILFLDATDEELVSRYKETRRAHPMAMDGLVTEGIRKERAMLEEIKADAQLVIDTTDLSPRQLRERLNKELATRETHEFRVEMVSFGFKYGLPIDADIVMDVRFLPNPHYIDELRPLTGMDQPVYDYVMGFPETDEFYTKFIDLLRTVLPGYKKEGKSSVTIAIGCTGGQHRSVALTERVGAELKEEDYHVNITHRDRLKRKETVNRS

SEQ ID NO: 42530 - protein, 807 aa, Enterococcus faecalis
MLVSYKWLNEYVNLSNVTPQELADKMSVTGIEVEGVAVPEEGLKKIVVGEVKECVPHPNSDHLSICQVDIGEEELSQIVCGAPNVKAGIKVIVALPGSRIAGNQKIKKGKMRGEVSNGMICSLEELGYSDNVVPKAYAEGIYYLPQEAVNGTPVFPYLDMDDAIIELSITPNRADALSMRGVAYEVGAIYRQTPQFNDPELKEDASDNVENYVTVTVEDSQDAPAYQIRVIKDVTIAESPQWLQNRLMNEGIRPINNVVDVTNYILLLFGQPLHAFDYQKLDSKEILVRRATATEELITLDGETRQLTEENIVITNGKTPVGLAGVMGGANSEISQETTTVALEAALFNPLSIRKTSKQFNLRSESSSRFEKGINQATVGLACDVAAAMIAELANGTVVSGTAVGSEVAVKEAQVAVTLERINQYLGTALDEATVNEIFEALGFAYEVNQGAYEITIPPRRWDIAIEADIIEEVARIYGYDHLPSTLPSGETVAGSLTKAQHVTRQLKSLLEGHGTSEAISYALTTEEKSRQFMMKESQTTRLQWPMSEERSVLRMNLISGLLDDVAYNVARKNNNIAFYEVGRVFYQTEDPTKNLPTEENHLALALTGNTMVKDWQTKATAVDFYTVKGLVESIVAVLGLTEKISYQATTAIPEMHPGRTAWIYLEGEVVGFVGQVHPTTAKAYDIPETYVAELNLQQLVAIEAGGVTYEAVSKFPAVSRDIALLVDETVTNQELVKTISDNAGKYLKEIHLFDVYQGEKLGAGKKSMAYSLTFVNAEATLVDEEINRSMEKVEKALIEKHQVEVR

SEQ ID NO: 42531 - protein, 275 aa, Enterococcus faecalis
MRMSNQEAIGLIDSGVGGLTVLKEALKQLPNERLIYLGDTARCPYGPRPAEQVVQFTWEMADFLLKKRIKMLVIACNTATAVALEEIKAALPIPVVGVILPGARAAVKVTKNNKIGVIGTLGTIKSASYEIAIKSKAPTIEVTSLDCPKFVPIVESNQYRSSVAKKIVAETLQALQLKGLDTLILGCTHYPLLRPVIQNVMGSHVTLIDSGAETVGEVSMLLDYFDIAHTPEAPTQPHEFYTTGSAKMFEEIASSWLGIENLKAQQIHLGGNEND

SEQ ID NO: 42532 - protein, 295 aa, Enterococcus faecalis
MERLRRTMMFVPGANAAMLRDAPLYGADSIMFDLEDAVSLKEKDSARVLVHSALKTFDYGNIEIVVRINALDAGGAEDIEAMVLAGVDVIRLPKTETAQDIIDVEAVITEVEQQNDIPVGTTKMMAAIESAEGVLNAPAIAKSSTRLIGIALGAEDYVTNMKTRRHPDGQELFFARSMILHAARAAGIAAIDTVYSDVDNTEGFEAEVRLIKQLGFDGKSVINPRQIPLVNTIYAPTEKEIQNAKEVIWGIREAEAKGSGVISVNGKMVDKPIVERAERVIALALAAKLITEEEI

SEQ ID NO: 42533 - protein, 510 aa, Enterococcus faecalis
MVVNKVGKDIPQSYAEQYGIYEGELAHIGAYQEASRAIKPVKPRETKLLGSIREAIEKTGLKDGMTISFHHHFREGDYVMNLVLAEIAAMGLKNISIAPSSIANVHEPLIEHIKNGVVTNITSSGLRDKVGAAISAGIMENPVVIRSHGGRARAVAAGDIHIDVAFLGAPSSDAYGNANGTKGKATCGSLGYAMVDAKYADQVVIITDTLVPYPNTPISIPQTDVDYVVEIDAIGDPDGIAKGATRFTKNPKELLIAEYAAKIITHSPYYKEGFSFQTGTGGSSLAVTRFMREQMLKDGIKASFALGGITNAMVELLEEGLVEKIIDVQDFDHPSAISLGENANHYEIDANMYASPLSKGAVINQLDTAILSALEVDTDFNVNVITGSDGVIRGASGGHSDTSMACKMSLVIAPLVRGRIPTIVEQVNTVVTPGTSVDVVVTEVGIAINPKRTDLIDCFKTLDVPQFTLEELKDKAYNIVGTPEPIKYGDKVVALIEYRDGSLIDVVRNV

SEQ ID NO: 42534 - protein, 216 aa, Enterococcus faecalis
MNLILMGLPGAGKGTQAEKIIDTYGIPHISTGDMFRAAMKNETALGLEAKSYIDKGELVPDEVTNGIVKERLAEPDTDKGFLLDGFPRTLDQAKALDTMLKELNKKIDAVIDIHVEEDVLIERLAGRFICRTCGATYHKLFNPPKVEGTCDRCGGHEFYQREDDKPETVKNRLAVNIESSAPILAFYKEQGLMHTIDGNREIDTVFSDVKKIIDEN

SEQ ID NO: 42535 - protein, 444 aa, Enterococcus faecalis
MTMDVTVVNVALPSIQSDFHTNLSTLQWVTDGYTLMVASLLLLSGSTADRIGRKRVLQLGLACFGLASFLCGISQTPGQLIAFRMLQGIGGSMLNPVAMSIITQVFTEKLERAKAIGLWGSVTGISLGMGPIIGGLIVSYFSWRYVFFVNVPIIAAAIILTQKFVPESKVEKTVKNDFVGQALMILFLFSSIYSIIGLPRKGLFAPDILSTGIIGCLAIVIFFIYEYNIDNPLINPRFFLSIPFTSASFLAIFGFIIYNGYLFLNTLYLQEMRGFSPLEAGLSTIPLAFVSFLVAPRAGEMVGRIGTKRPIMLCGISMLAVSFLQLFVTKTTPMIILFIIYIFLGIGFGMLNSPITITAIEGMPLSQSGTAAAIAVTCKQIGNSLGVALPSLLITKPITSSLTRTPFTNVWLLFGCCAIAIIFLSYLSNSPLAKKSLRRVRFYF

SEQ ID NO: 42536 - protein, 472 aa, Enterococcus faecalis
MAFESLTNRLQQAMSKIRRKGKVSEADVKEMMREIRLALLEADVNLQVVKDFTKRVRERAVGVEVLESLSPAQQIVKIVDEELTKTLGSETVELNKSPKIPTVIMMTGLQGAGKTTFTGKLAKHLMKTENARPLLIAGDVYRPAAIDQLKVLGQQLEVPVFDMGTDANPVEIVRQGLALAKEKKNDYVLIDTAGRLHIDEALMDELKQIKELADPNEILLVVDAMTGQDAVNVADSFNEQLGITGVVITKMDGDTRGGAALSIRAVTGAPIKFVGSGEKLTDLEIFHPDRMSSRILGMGDMLTLIEKAQQDYDEKKAEELAQKMKENSFDFNDFIEQLDQVMGMGPIEDLLKMIPGMSNMPGIENVKVDPKDVARKRAMVLSMTPAERENPDLLNPSRRRRIAAGSGNSVVEVNRMIKQFKESKKMMQQMSKGDMNIPGMDQMLGGGVKGKLGKMAMNRMMKKNKKKKKKKR

SEQ ID NO: 42537 - protein, 589 aa, Enterococcus faecalis
MEKRTTYCGNVSAEFIEKEVVLKGWVQKRRDLGGVIFIDLRDREGIVQVVFNPEKSKEAWEIADKCRSEYVIEVKGQVVYRDKEAINPKMKTGEFEVMATDITILNTAKTTPFTIEDDNNVNDELRMKYRYLDLRRPSMTNNIKLRHQVTKTIRHYLDNHDFLDIETPYLGKSTPEGARDYLVPSRVHAGHFYALPQSPQLFKQLLMGAGFDRYYQIVRCFRDEDLRGDRQPEFTQIDIETTFLTPEEIQTYTENMLAEVMKETKGIEISVPFPRMSYDEAMARYGSDKPDTRFAMELIDVAEVVKDVDFKVFQAALENGGHVKALNAKGAADKYSRKDMDNLGKYVSQFGAKGLAWLKVEEDGLKGPIAKFLTEVSDELIAATNAEVGDILMFGADKPEIVAAALGAVRTRLGKELGLIDESKFNFLWIVDWPLFEYDEEAGRYVSAHHPFTQPKAEDVDRLATDPASVYAEAYDVVLNGYELGGGSLRIHTRELQEKMFETLGFTKEEAQDQFGFLLDALDYGFPPHGGIALGLDRLAMLLAGEENIREVIAFPKNGKAIDPMNNAPSLVSPLQLFELNIDVTAIDE

SEQ ID NO: 42538 - protein, 316 aa, Enterococcus faecalis
MNEAQQLQQMQPLLYKQLQKSFEHGRLAHAYLFEGDTGTGKQEFGLWMAKHVFCTNLVNQQPCNECHNCVRINENEHPDVLRIAPDGQTIKVNQIRELKAEFSKSGVETAKKVFLIQEADKMSTGAANSLLKFLEEPEGQILAILETTSLSRILPTIQSRCQTLHFQPLVKKTLIDRLIKQGIGEKTATLLAELTNSFEKAVEISQDEWFNEAREIILQWFNYLKSNDLQAFIYVQKKMVKVFKEKEQQALSFDLLMVYYRQLLEESVATQQAKKVTEEQAERLALILKARQKWTANVSWQNVCEQLVIQMIHPKS

SEQ ID NO: 42539 - protein, 682 aa, Enterococcus faecalis
MRRSSTMEQQPLTLTAATTRAQELRKQLNQYSHEYYVKDQPSVEDYVYDRLYKELVDIETEFPDLITPDSPTQRVGGKVLSGFEKAPHDIPMYSLNDGFSKEDIFAFDERVRKAIGKPVAYCCELKIDGLAISLRYENGVFVRGATRGDGTVGENITENLRTVRSVPMRLTEPISVEVRGECYMPKQSFVALNEEREENGQDIFANPRNAAAGSLRQLDTKIVAKRNLNTFLYTVADFGPMKAKTQFEALEELSAIGFRTNPERQLCQSIDEVWAYIEEYHEKRSTLPYEIDGIVIKVNEFALQDELGFTVKAPRWAIAYKFPPEEAETVVEDIEWTIGRTGVVTPTAVMAPVRVAGTTVSRASLHNADFIQMKDIRLNDHVIIYKAGDIIPEVAQVLVEKRAADSQPYEMPTHCPICHSELVHLDEEVALRCINPKCPAQIKEGLNHFVSRNAMNIDGLGPRVLAQMYDKGLVKDVADLYFLTEEQLMTLDKIKEKSANNIYTAIQGSKENSVERLIFGLGIRHVGAKAAKILAEHFGDLPTLSRATAEEIVALDSIGETIADSVVTYFENEEVHELMAELEKAQVNLTYKGLRTEQLAEVESPFKDKTVVLTGKLAQYTREEAKEKIENLGGKVTGSVSKKTDIVVAGEDAGSKLTKAESLGVTVWNEQEMVDALDASHF

SEQ ID NO: 42540 - protein, 432 aa, Enterococcus faecalis
MFKLLKNAFKVKDIRSKILFTVLILFVFRLGAHITVPGVNAKGLSDLSSLPFLNMLNMVSGSAMQNFSIFSMGVSPYITASIIIQLLQMDIVPRFVEWSKQGEVGRKKLNQATRYLTIVLGVAQSMGITAGFNSLSQTGIVNNPTLGTFVMIAVILTAGTMFVTWMGEQITEKGIGNGVSMIIFAGIISRLPGAVKEIYEDYFVNIESSRIWQSVIFIAILVIAILVIVTVVTFFQQAERKIPIQYTKRVSGAPTSSYLPLKVNAAGVIPVIFASSLIATPNAILQAFSSKFAGENWYDIMTKIFSYNTVPGAIIYTVLIVAFTFFYAFVQVNPEKLAENLQKQGSYIPSVRPGKGTEEYVSGVLMRLSVVGSIFLGLVALLPIIAQMVWNLPQSIGLGGTSLLIVIGVALETTKQLEGLMMKRQYVGFINK

SEQ ID NO: 42541 - protein, 362 aa, Enterococcus faecalis
MKKARVIYNPTSGKELIKKNLADILSILEECGYEASAFATTPEENSARNEAHRAARAGFDLLVAAGGDGTINEVVNGIAPLKRRPKMAIIPAGTTNDYARALKIPRDNIVKAAEVIKKNQTVKMDIGQAGKNYFINIAAGGHLTELTYEVPSELKSIFGYLAYLAKGAEMLPRVKPIKMRMTYDEGVYEGNASMFFLGLTNSVGGFEQIVPDAKLDDGKFSLIIVKTANIFEILHLVALMLNGGKHVEDHRLIYTKTSYLHAETLEKNNKMMINLDGEYGGDAPMTFKNMHQHIEIFANGDALPSNAIMGSVLTGSDEIVVESEDEEEEAYNEASKEFVKEVERLTDEDIDGDGKIAEKEKH

SEQ ID NO: 42542 - protein, 166 aa, Enterococcus faecalis
MSEAAIAKKETLVQAAAEKFESAASVVIVDYRGLTVEEVTNLRKQLRDAGVEMKVIKNSILSRAAKKVGLDGLDEVFTGPTAVAFSNDDVVAPAKIIDEFAKDAKALEIKGGVIEGKVSSVEQITALAKLPNREGLLSMLLSVLQAPVRNVAYAVKAVAEKNEEVA

SEQ ID NO: 42543 - protein, 265 aa, Enterococcus faecalis
MMNKLIFGRYIPGDSFIHRLDPRAKLLASFYFIGIIFLANNWQSYVLIAAFTAFAISLSKISARFFIRGVRPLLWLILFTVALQTLFTQGGEVYFQWGIISITQFGVTNGLFIFCRFVLIIFMSTLLTLTTAPLELSDAIEYLLRPLHVVKFPVHEVSLMLSIALRFVPTLMDETEKIMNAQRARGVDFGEGNLLQKMKAIVPLLIPLFVSSFNRAEDLATAMEARGYQGGEGRTKYRILHWHLRDTIVMFGFVLLTIGLFVLRT

SEQ ID NO: 42544 - protein, 788 aa, Enterococcus faecalis
  MISC_FEATURE (71)..(71): X=any amino acid
  MISC_FEATURE (75)..(75): X=any amino acid
  MISC_FEATURE (81)..(81): X=any amino acid
  MISC_FEATURE (84)..(84): X=any amino acid
  MISC_FEATURE (88)..(88): X=any amino acid
  MISC_FEATURE (119)..(119): X=any amino acid
  MISC_FEATURE (135)..(135): X=any amino acid
  MISC_FEATURE (148)..(148): X=any amino acid
  MISC_FEATURE (162)..(162): X=any amino acid
KRIYELAKEMNKASKDVVDKAHQLGMDVKNHMGAISSEQETKLRQAFGGGSTVNTQSKATKQPKATNNTKXTSQXETNEQXTWXTKKXPKSSKQSINEWTTKKQQQPKSSRPKQHTKPXQSNKYKQSKPQYPKQXRFYNESKSDQPKXQWREQPKPWRPKPXQQFWWRSNRNNRNNFNNQNRNRFNKKGKKGKHQQESAKPAVPARKFRELPDVLEYTEGMNVADIAKKIHREPAEIIKKLFMMGVMVNQNQALDKDTIELLAVDYGMEPQEKVQVDIADIDKFFEPEAVVEENLTTRPPVVTIMGHVDHGKTTLLDTLRHSRVTSGEAGGITQHIGAYQLDIDGKPITFLDTPGHAAFTSMRARGASITDITILVVAADDGVMPQTIEAINHAKAAKVPIIVAVNKIDKPGANPDHVKQELSEHELIPEEWGGDTIFVNISAKFNQNIDELLENILLIAEVEDLKADPTQKAIGTVIEARLDKGKGPVATLLVQQGTLHVGDPIVVGNTYGRVRVMTNDMGRRDKEAGPATPVEITGLNDVPQAGDRFVVFEDEKTARQAGEERAKRALLEQRSASSRVTLDNLFESLKEGELKEVNIIVKADVQGSAEAVSASLQKIDVEGVRVKIVHAAVGAINESDVTLAAASNAIIIGFNVRPTPQAKQQAEQEEVDIRLHRIIYKALEEIETAMKGLLDPEFEEKITGQMTVRELYKVSKVGTIAGCYVTEGFIRRDSGVRVIRDGIVIYEGKLASLKRFKDDVKEVKLGFECGAMIENFNDLRVDDAIEGF

SEQ ID NO: 42545 - protein, 440 aa, Enterococcus faecalis
MAKTGMYVGLDIGTTSVKVVVAEYIEGQMNIIGVGNAKSDGLNRGIVVDIDQTVQAIQRAVRQAEEKAGIQIKSVNVGLPANLLEVESCQGMIAVSSESKEITDEDVRNVASAALVRSTPPERQIVAILPQDFTVDGFEGIKDPRGMLGVRMEMFGVVYTGPKTIIHNIRKCVEKAGLGINELVITPLALTETILTDGEKDFGTIVIDMGGGQTTTSVIHDKQLKFTHVNQEGGEFITKDISIVLNTSFNNAEALKINYGDAYPERTSANEEFPVDVIGKSEPVRVDERYLSEIIEARVEQILRKSKEVLDEIDAFELPGGVVLTGGAASMPGIVDLAQEIFEANVKLYVPNHMGLRNPVFANVISIVEYSAQLNDIYHIAKYAIPGEKSKPAQSVAVQQEVRYDTYAEQPQEEYEEFNERESGEKVTGKIKDFFSNIFD

SEQ ID NO: 42546 - protein, 442 aa, Enterococcus faecalis
MGFFDKIKKAFSAEKKEEEKQEIVEETVDETPSDESAPAESKETATEEAQITPETTAEEVTETADLTDNAEMEKLVDVEEALEEEPEEILTEETQEVVVEAPEEESSVVTPLAEPTDTQVSEEIEESKEEQVQEKYEKGLEKTRKTFGQRLNELFANFRSVDEDFFEELEETLIGADVGFDTSLKITEALRQEVKLRNVKKPAQVQNTIIEKMVDLYEEAGINENNAINLQPNGLTVILFVGVNGVGKTTSIGKLAHQYKLEGKKVLMAAADTFRAGAIDQLVVWGERAGVEVVRGNAGGDPAAVVFDAVERAKAEQADVLLVDTAGRLQNKVNLMKELEKIKRVIQREIPDAPHEVLLVVDATTGQNAMTQAKQFKETTDVTGLVLTKLDGTAKGGIVIAIRNELHLPVKLVGLGEGINDLEPFNANDFAMGLFKGLLKDV

SEQ ID NO: 42547 - protein, 81 aa, Enterococcus faecalis
MADVKELILTIVRPLVSQPEAVSLEIEESTDFLEYNLTVAKEDIGRIIGKQGRVAKAIRTIVYSVRIDGPKKVRLNILDGK

SEQ ID NO: 42548 - protein, 321 aa, Enterococcus faecalis
MKNYARISCTSRYVPENCVTNHQLSEMMDTSDEWIHSRTGISERRIVTQENTSDLCHQVAKQLLEKSGKQASEIDFILVATVTPDFNMPSVACQVQGAIGATEAFAFDISAACSGFVYALSMAEKLVLSGRYQTGLVIGGETFSKMLDWTDRSTAVLFGDGAAGVLIEAAETPHFLNEKLQADGQRWAALTSGYTINESPFYQGHKQASKTLQMEGRSIFDFAIKDVSQNILSLVTDETVDYLLLHQANVRIIDKIARKTKISREKFLTNMDKYGNTSAASIPILLDEAVENGTLILGSQQRVVLTGFGGGLTWGSLLLTL

SEQ ID NO: 42549 - protein, 265 aa, Enterococcus faecalis
MRILFIGDVVGSLGREALATYVPKLKKKYRPQVTIANGENAASGRGITGKIYKKFLQDGVDVVTMGNHTWDNKDIFEFIDDAKKMVRPANFPEDVPGQGMVFVKVNQLELAVINLQARTFMVPLEDPFKKAAELVAIARKRTPLIFVDFHGETTSEKQAMSWFLDGQVSAVVGTHTHVQTNDARILPKGTAFLSDVGMTGPYDGILGMKREPIIEKFMTALPKRFEVVETGRTILSACILEIDDQTGQAKMIEPIQISEDRPFQE

SEQ ID NO: 42550 - protein, 214 aa, Enterococcus faecalis
MSIFNKDALSSFFGLSGEEDDYYDNYEEYEERKAVNEPPRRAARPKPQRPVQQQESYSQPAYTQQSEPVVEKPSARYRSAEAHQERDTQQAAYTEKKVVSMRSSNQSATTNTRRAQESTANAKTHKITIIEPRVYSEAMSIAKHLFAEEAVLVNFTLVEEDQARRIVDFLTGTVYALDGDIQRVGNEIFLCTPANMEIDSATAQSLANKQFFDF

SEQ ID NO: 42551 - protein, 31 aa, Enterococcus faecalis
MANEVSEVSFDSSTLHNVNQVQLHHQNQEVK

SEQ ID NO: 42552 - protein, 807 aa, Enterococcus faecalis
MAQKRATNKKKSTTKKKTKKQQQQQERLNYMFLGLIFILFGVFGLFRLGFLGTLLANCLRLVVGNTFPFAAILLILYGLLVMIYGKDFPLKRGRPIFGAVLIYISVLLFFHAFMFRNVSGSQPDILGNTWEFLQSDLKANQVTQNVGGGMIGALLYQGTYFLVAQFGSYLIATLLLLAGIFLMSMWDFQQIVDHFQSIQDRLSHVSAKSQARQEEKEAKRAAKKEAKAAERQAKIEAAAQQKLQERERMEQAAAERLTKTPVETHQPMVEEPAAPTPVQIDSFQQQNQAMPVPPIAATKPQREQEEEAADEAGVLEFEISEEAEDRDYQLPPTDLLDTIQATDQSGEYEKIEKNIGVLEQTFKSFGVDAKVVKASLGPSVTKFEVQPAVGVKVSKIVNLTDDIALALAAKDVRMEAPIPGKSLIGIEVPNSAISTVSFRDIVEAQPSHPDKLLEVPLGRDISGMVQTADLSKMPHLLIAGSTGSGKSVAINGIITGILMQAKPHEVKLMMIDPKMVELNVYNGIPHLLTPVVTNPRKAAQALQKVVQEMEFRYEKFAATGVRNITGYNQLIQQKNAEDGENRPILPFIVVIVDELADLMMVASNEVEDAIIRLAQMARAAGIHMILATQRPSVDVITGIIKANVPSRMAFAVSSGTDSRTIIDTNGAEKLLGRGDMLFLPMGENKPIRIQGAFISDQEVERVVAFVTDQQEAEYQESMMPTDEPTTSGGGEAPQDELFEEAKNLVVEMQTASISLLQRRFRIGYNRAARLVDELEAHGVIGPSEGSKPRKVFLQAESEEAATETPEQ

SEQ ID NO: 42553 - protein, 845 aa, Enterococcus faecalis
MANFLKKMIENDKKELRRLEKIADKIDAHASAMEQLSDEQLREKTDEFKARYQKGETLDELLPEAFAVVREAAKRVLGLFPYRVQLMGGIVLHDGNIPEMRTGEGKTLTATMPVYLNALSGEGVHVVTVNEYLATRDSNEMGELYNFLGLSVGLNINSKSSDEKREAYNCDITYSTNNELGFDYLRDNMVVYRSQMVQRPLNYAIVDEVDSILIDEARTPLIISGQAEKSTALYTRADNFVKRLKEDEDYKIDIQSKTIGLTEAGIEKAEQTFGLDNLYDIENTALTHHLDQALRANYIMLLDIDYVVQDNKVLIVDQFTGRIMDGRRYSDGLHQAIEAKEGVEIEDETKTMATITFQNYFRMYKKLAGMTGTAKTEEEEFREIYNIQVIQIPTNRPIIRDDRPDLLYPTLESKFNAVVEDIKERYHKGQPVLVGTVAVETSELLSDKLNAAKIPHEVLNAKNHFKEAEIIMNAGQKGAVTIATNMAGRGTDIKLGLGVLELGGLAVIGTERHESRRIDNQLRGRAGRQGDPGVSQFYLSLEDDLMKRFGSERIKTFLERMNVQEEDAVIQSKMFTRQVESAQKRVEGNNYDTRKNVLQYDDVMREQREVIYAQRQEVIMEENDLSDVLMGMVKRTIGRVVDSHTQLEKEEWNLDGIVDFAASTLVHEDTISKKDLENKSAEEIKDYLVARAQEVFEEKSQQLNGQEQLLEFEKVVILRVVDTKWTDHIDAMDQLRQSVGLRAYGQNNPLVEYQTEGYSMYNNMVGSIEYEVTRLFMKSEIRQNVQREQVAQGQAEHPETEQDAAAQSNTSAKRQPVRVDKKVGRNDLCPCGSGKKFKNCHGRNA

SEQ ID NO: 42554 - protein, 432 aa, Enterococcus faecalis [sequence omitted]

SEQ ID NO: 42555 - protein, 308 aa, Enterococcus faecalis
MTIYTCTLNLAIDLFIETEELVPFVVNRTKEDDIQANGKGVNVSLILKMLGIDNTALGVKAGFTGNYVEDYLKEKEITTDFIEVAGTTRINVFTKVTQDQKEYKLVNKGPKLSEEHVQRFLKKISELRKGDYLCVSGSLPQGVSPSILIEISRICFEKQVFLILDSSYEEILDCLPYQPFLLKPNEEELQEWFHTEVQTKDDYIFYGQELLKRGAKNILLSLGSEGALFMNNEKVLSGNSPTGMVVNTACSGDAMLGTFLAGWHQGLSLEKNLKRSIAAGSSTAFRKGLTDFSDVQELEQQIKIQEEE

SEQ ID NO: 42556 - protein, 472 aa, Enterococcus faecalis
MATYQLIAATGCPTGIAHTYMAQEALEQAAKRKGITIKVETHGQIGIENELTPAEIQGAEAVIIAADKDVQAERFAGKRIIDVPVSVGIKEADRLIEEALAGKGSIAAENQAVDELEQETQISSGNVGHSIYKNLMNGVSHMLPFVVAGGVLIALSFAIWGIYSFDPESSQYNATAAMLKSIGDASMGMMVPILSAYIAEGIAKRPGLVVGFVGGLIANTGGTGFLGGILSGFLAGYFILLLQRVFKGLPKSLDGLKAIFLYPVIGVAVIGITMSLLADPMKAVNEGMMSFLASFQNSSPLVLGIIVGCMCAFDMGGPVNKAAYVTGTALLAQGNTSFMAGVSAACIAPPLITGFATLFFGKYFDTNERNAGLVNFILGSTHITEGAIPFAAKDPLKVLPIMMLGSSIAAVLTYMFGVQVPAPHGGFLVLPVVTHAVQWVLAILAGSLVGGLLLGFVQKSRIAKQEQSLSKK

SEQ ID NO: 42557 - protein, 66 aa, Enterococcus faecalis
MPKQKTHRGLAKRVKRTGGGGLKRGRAFTSHRFHGKTKKQRRQLRKASMVAKGDYKRIRQQLARMK

SEQ ID NO: 42558 - protein, 563 aa, Enterococcus faecalis
MNNKEIVAKALHDVLNEELTMDQIEQLLENPKSVDHGDVAFPAFSLAKIYRKAPQQIAAELAEKIDGTNFEKIEVVGPYLNFFMNKEAVSQAVIGEVVKEKNNYGNSTFGNNGNVPIDMSSPNIAKPISMGHLRSTVIGNSIAFILEKIGYQPIRINHLGDWGTQFGKLIVAYKKWGSEEAVRQQPINELLRLYVQFHEEAEEKPELEDEARAWFKKLEEGDQEANELWKWFRSESLKEFDKIYSMLEVEFDSYNGEAFYNDKMDEIVTLLEEKHLLTENQGAEIVDLTEYNLNPALIRKSDGATLYITRDLAAALYRKRTYDFAKSLYVVGNEQSNHFKQLKAVLKELGFDWSDDMEHIPFGLITQGGKKLSTRKGKIVLLEEVLNEAVTLAGNQINEKNPDLANREEVAKQVGVGAVIFHDLKNDRLNNFDFVLDEVVRFEGETGPYVQYTHARAMSILRKANFTPDATQRYALNDKDSWEVVKLLQKFPETVMQAAEKYEPSVIAKHSIHLAQAFNKYYAHVRILDEDAQKEARLALVYAVATVLKEDLRLLGLHAPEEM

SEQ ID NO: 42559 - protein, 101 aa, Enterococcus faecalis
MDEGISKKFAIQLLEDDAERIKMLIRNQKNSLCISQCKAFEEVVDTQMYGFSRQVTYATRLGILTNDEGHRLLSDLERELNQLYTDVYEETQEKNEIGKEG

SEQ ID NO: 42560 - protein, 234 aa, Enterococcus faecalis
MKKILVVDDEKPISEIVKYNLVKEGYEVFTAYDGEEALEKVEEVEPDLIILDLMLPKMDGLEVAREVRKTHDMPIIMVTAKDSEIDKVLGLELGADDYVTKPFSNRELVARVKANLRRGATNAKEAEVTTQSELTIGDLTIHPDAYMVSKRGEKIELTHREFELLYYLAKHIGQVMTREHLLQTVWGYDYFGDVRTVDVTVRRLREKIEDSPSHPTYLVTRRGVGYYLRNPEQE

SEQ ID NO: 42561 - protein, 464 aa, Enterococcus faecalis
MKYQFPENFWWGSAASGPQTEGVFEGDGKGQNIWDFWYQEAPEKFFQQVGPDKTSQFYKKYQEDIQLMKETGHNSFRTSIQWSRLIPDPTTGKVNQTAVDFYNQVIDDLLEHGIEPFMNLYHFDMPMVLQEKGGWESREVVDLYVDFAKTCFELFGDRVKKWFTHNEPIVPVEGGYLYGWHYPDKVNLKEGIQVLYHEALASAKAIAVYHSMNLSGEIGIILNLTPTYPRDEHNEADVNAAKFVDGFFNRSFLDPAVKGHFPEDMVAWAKANDLLPETTPEDLAIIAENTVDLLGVNYYQPRRAKAKETPVETRPEGLLPEDFYDVYDMPGKKMNPYRGWEIYEKGIYDTLMNLKENYGNIRCYISENGMGVEGEERFVNEQGVIEDDYRIEFVQDHLKWVHQAIQEGSNVQGYHMWTCMDNWSWLNAYKNRYGFIAVDLDDDAKRTIKKSGRWFKEMTANNGF

SEQ ID NO: 42562 - protein, 561 aa, Enterococcus faecalis
MKVNIKNNETGVFAIGGLGEIGKNTYGVQFQDEIIIIDAGIKFPEDDLLGIDYVIPDYSYIVQNLHKVKALVITHGHEDHIGGVPYLLRQANIPIYAGPLALALITNKLDEHGLLREAELHEINEDTVIRFRKTAISFFRTTHSIPDALGVVVKTPSGNIVATGDFKFDFTPVGEPANLHRMAKLGEEGVLCLLSDSTNAEIPTFTKSEKTIGTSILKIFEKIDGRIIFASFASNIFRLQQAADAAVKTGRKIAVFGRSMENAIVNGERLGYIKVPKGTFVDAAELNQLPANETMILCTGSQGEPMAALSRIANGTHRQISIQPGDTVVFSSSPIPGNTTSVNRLINLLSEAGAEVIHGKINNIHTSGHGGQEEQKLMLRLMKPKYFMPVHGEFRMLKIHASLAQDTGVPEENCFIMGNGDVLALTADSARPAGHFNANDVYVDGNGVGDIGNVVLRDRRILSEEGLVLAVATVDIKNKEIMAGPDILSRGFVYMRESGDMIHEGQRLLFNALREAMKDKNCTEAKLGEAMTTALQPFLFEQTERHPMILPMIMTATVSDQ

SEQ ID NO: 42563 - protein, 496 aa, Enterococcus faecalis
MSKKEINQVVASSYQLYINGEWTTGSGNKMIASYNPSNGEKLAEFVDATNADVDRAVEAAQEAFQTWKDVDVVTRSNLLLKIADLIEENQEHLAMVETLDNGKPLRETQSIDVPASADHFRYFASVIRGEEGSVKEFDKDTLSIVVKEPIGVVGQIIPWNFPLLMGAWKLAPALAAGNTVVIHPSSSTSLSLLELFKIFDQVLPKGVVNLITGRGSDSGNYMLAHPGFDKLAFTGSTEVGYTVAKAAADRLIPATLELGGKSANIIFEDANWERALEGVQLGILFNQGQVCCAGSRVFVQSGIYDQFVEALKEKFEQVNVGFPWEKDVEMGAQINEHQLEEILKYVEIGVKEGATLITGGQRLTENGLDKGAFLAPTLLANGTNAMCVAQEEIFGPVATVIKFETEEEVIRLANDSEYGLGGAVFSQDINVALRVARGVRTGRMWVNTYNQLPAGAPFGGYKKSGIGRETHKSMLDAYTQMKNIYIVTKEEADGLY

SEQ ID NO: 42564 - protein, 363 aa, Enterococcus faecalis
MKILVTGGGTGGHIYPALSFVEHVKKEAPATEFLYVGTENGLESQIVPKAKIPFKTIKIQGFKRSLSPQNFKTIYLFLTSINKAKKIIREFQPDVVIGTGGYVSGAVVYAAHQLKIPTIIHEQNSIPGMTNKFLSRYVDKIAICFPDVASFFPKEKTILTGNPRGQEVVTVEKSAILSEFGLDPAKKTVVLFGGSRGALKINQAFEQAFPLFEEREYQVLYASGERYYQELQESLKFSEKKLTNISVQPYIDKMVEVMANTDLMVGRAGATSIAEFTALGLPAILIPSPYVTNDHQTKNAQSLVKVGAVEMIPDAELTGARLVAAIDDILLNNEKRQQMATASKGEGIPDASDRLYQVVKTLV

SEQ ID NO: 42565 - protein, 397 aa, Enterococcus faecalis
MAKKTIKDVDLKDKKVLVRVDFNVPLKDGVITNDNRIVAALPTIKYVIENGGKAILFSHLGRVKTEEDKAGKSLKPVAERLSELLGQPVTFVPETRGKELEDAVNNMKDGDVLVFENTRFEDVDGKKESGNDAELGKYWASLGDVFVNDAFGTAHRAHASNVGIASTGIPTVAGFLMEKEIKFIGEAVENPKRPFVAILGGAKVSDKIAVIENLIEKADKILIGGGMAYTFMKAQGYSVGLSLLEEDKVDLAKSLMEKAGDKLVLPVDTVVSKEFSNDAPFHTVPSTEIPDDEEGLDIGEKTIELFANELQGAKTVVWNGPMGVFEMSNFAKGTIGVCEAIANLEDATTIIGGGDSAAAAIQLGYENKFSHISTGGGASLELLEGKTLPGLASINDK

SEQ ID NO: 42566 - protein, 233 aa, Enterococcus faecalis
MDAYEIIQYIGDAKKQTLVKVTLKGQLKEVTFPETIKVFNNCKTGTLFGDWADVKPFLEANKEKIEDYVVENDARNSAIPFLDLKDINARIEPGALIREKVEIGDQAVIMMGAILNIGAVVGAGTMIDMGAVLGGRATVGKHCHIGAGTVLAGVIEPPSAAPVVIENEVVIGANAVVLEGVRVGEGAVVAAGAVVVEDVPAHTVVAGVPAKVIKQIDDKTKSKTEILEELRKL

SEQ ID NO: 42567 - protein, 1109 aa, Enterococcus faecalis
MSFPQLHTVTSYSLLSSTVRIRSYVKQAKALGYQTLAITDINVLHGAVEFYEACQEAGIQPIIGLRLEYTPAEKEGHSELLLFAKNLKGYQQLMQLSSSKMTTEGPFYLAEHQSLLSDLFAVTLSAKGEVAQTFFEDEQQAVHAFQQLASYFDPQSLFVEHSFSMNQQRNPALFSFYQREQLPGVALQEVRHLTREEGFAVTVLESIKENNQLNITSQTPEIEGLNYLREAETTMEQMLQIAGAEVVQNTIQLAENCRVDIPLHQKLLPHFPVPDNQTAGSYLRTLCLEKLPERVPHLNEVYQKRLEKELTIIHNMGFDDYFLIVWDVMDFCHNNQIVTGAGRGSAAGSLVSYVLSITDVDPIKYDLLFERFLNPERYTMPDIDLDIPDNRREEVLAYVSQKYGHYHMAQIATFGTMAAKMVLRDVARVFGLSQSEANRWSAAVPNKLKITLEEAYQESKRMQELVNFSPNNQLLYKTAVQLEGLPRHVSTHAAGVVISDENLLNLVPLQPGSNEILLTQFTMNDVEKIGLLKMDFLGLRNLSIIDDTLTAVKRVYNRTIRLNQIPLDDETTLALFRKGETSGVFQFESAGIRNVLRKLGPTSIEDIAAVNALYRPGPMQNIDVFIRRKKGLEQISYPEPSLAPILENTYGIIVYQEQIMQVAAKMAGFSLGQADILRRAISKKKKDVLDEERNHFVNGALQQGYPQETANQVYDYIERFANYGFNRSHAFAYSFIGFQMAYLKVHYPSAFYVALLHSVRHNPTKIKEYIGEARKNKQTILQPSINQSHYSFYLNQQQQILFGFSSLKGIRRDFIQNILNERRENGPYKTFDEFLLRIDRKWLKVENIEPLIAIGAFDEIAPNRRQLAVGLESNIQSILLSGGSMDLLETLKPKEEEIADYPLEERLEQEEQYLGVYLSGHPTEEFKKTRLAKQTQLVHELVENQPTKLLIYVKNIRTIRTKKGEQMAFVDGDDTTGSISLTLFPTVFRQLRQSVEKGQVYYVEGKVERSTYNQELQILVQRIEKAQQVETSISDETCFIRITKDVEQTDVFQKMKEVLSRHAGHIPVIVYFEKTGKKIVLNEENWVAHTSASQQQLAYVLGEQNVIFK

SEQ ID NO: 42568 - protein, 518 aa, Enterococcus faecalis
MVLNILLAIVGLIVGLGLGFVIAKSRHDKAINGAKISASSILENARKESETLKKEALLEAKEENQKYRSEIESELKESRLELKSQENRLIQREQTLDRKDDSLEKREGSLEEKEEKLGARQQLIDEREKEVENLINQQHQELERIASLSKEEAKSIIMKSTEEELNHELTLMVKESEQRAKEESDRKAKNLLSLAIQRCAADSVSETTVSVVTLPNDEMKGRIIGREGRNIRTLETLTGIDLIIDDTPEAVVLSGFDPIRREIARMTLEKLIQDGRIHPARIEEMVEKSRKEMDERIREYGEQAAFEVGAHTLHPDLIKILGRLRFRTSYGQNVLNHSIEVAKLAGVLAAELGEDVQLAKRAGLLHDIGKALDHEIEGSHVEIGAELAAKYKENSVVINAIASHHGDVEATSVISVLVAAADALSAARPGARSESLENYIRRLENLENISNSFEGVDSSFAVQAGREVRVMVKPEEISDLESVRLVRDIRKKIEDDLDYPGHIKVTVIRETRAVDYAK

SEQ ID NO: 42569 - protein, 300 aa, Enterococcus faecalis
MNTKAMLETLNEITLLVDEPLKNVTFTKTGGPADVLALPKTKKEVEEIVAYCREQGLSWLVLGNASNLIVRDGGIRDVVIMLTEMKEIKVAGTTMIVDAGAKLIDTTYEALAADLTGFEFACGIPGSVGGAVYMNAGAYGGEIKDVFQSAEVLLADGTIQTMTKEDLNFRYRHSEIQELHCIVLQATFALEKGNHAEIKAQMDELTELRELKQPLEYPSCGSVFKRPVGHFTGKLIQDAGLQGLKWGGAQISEKHAGFIVNIDHATATDYVELIAHIQEVIKEKFDVELQTEVRIIGEEV

SEQ ID NO: 42570 - protein, 989 aa, Enterococcus faecalis
  MISC_FEATURE (298)..(298): X=any amino acid
TVQEMILTLQKFWSSNGCMLMQAYDTEKGAGTMSPYTFLRAIGPEPWNAAYVEPSRRPADGRYGENPNRLYQHHQFQVVMKPSPENIQELYLESLKLLGIDPLEHDIRFVEDNWENPSMGCAGLGWEVWLDGMEITQFTYFQQVGGLQCHPVTSEITYGLERLASYIQEVESVYDLEWTQGVKYGEIFVQPEYEHSKYSFEISNQEMLLENFDKFEKEAKRCIEESLVHPAYDYILKCSHTFNLLDARGAVSVTERAGYLARIRNMARSVAKIFVAEREKLGFPLLNKDQHVSKEAEXHGKRFIIEIGLEEMPAHVVTPSRIQLEEKVIKFLDEHHLDYETVQSFATPRRLAVKVTAIPEKQADVEEEVKGPAKKIALDAEGNWSKAAQGFVRGQGVTTEDIVFKELNGVEYVYVTKFTKGQSAKEVLTKLNDVITSLTFPVTMHWANYDFEYIRPIHWIVALLDDEVIPFKVLDVTTGQTSRGHRFLGDDVTFQHANEYEAKLKEQFVVVQPNERKQMIVDQANALAAEKNWQLALDEELLEEVTNLVEYPTAFVGSFDEKYLSVPDEVLVTSMKEHQRYFDVRNDQGLLMPHFIAVRNGDNVHLENVIKGNEKVLIARLEDAEFFYNEDKKLTIEACVEKLKNVTFHEKIGSIYEKMQRVALIAQIIGRKVGLSEDELEDLKRASEIYKFDLVTNMVGEFPELQGIMGEKYALLQGEKPAVATAIREHYLPTSSEGELPETAIGAVLALADKLDSVFSFFSVGMIPTGSNDPYALRRQTYGVIRIIEDKGWTFPLVQLQTEVDEAVNQDVEKYGVLLNEGQAEVVEFVKARLRQLLMTKNVRHDIIDAVVSAEQADLSKLFASANILKSRFEDQDFKPSMEALTRVINLAKKGQELLGDTEEGIDPSLFENKAEKELYQAVNDLSEAFATRTIAENYEALVNLRPLIDAYFNETMVMVEDEKVKQNRLKQLMQIAKMALSIASLDLL

SEQ ID NO: 42571 - protein, 39 aa, Enterococcus faecalis
MAELADALDLGSSAARRGGSSPFTRIFSRLSSVGRASDL

SEQ ID NO: 42572 - protein, 40 aa, Enterococcus faecalis
MGVQVPSPAYLAGLAQLVEHLICNQRVEGSSPLAGTILRK

SEQ ID NO: 42573 - protein, 262 aa, Enterococcus faecalis
MEKKTANDVVTLARAQDRLTTLEYIEAIFEDFLEFHGDRYFADDLAVVGGVATLQGKPVTVVGIQKGRNLPENIERNFGSPNPEGYRKALRLMKQAEKFNRPVITFVNTAGAYCGIGAEERGEGEAIAQNLLEMSDLKVPIISVIIGEGGSGGALALAVADEVWMLEHTIYAVLSPEGFASILWKDGSRAKEAAELMKITATELKELAIVDKVIPEVMNGQPLEQAKINRMLQKAFISKLTELAKLDTETLLEKRYQRFRKY

SEQ ID NO: 42574 - protein, 403 aa, Enterococcus faecalis
MNKKHVVILGAGYAGLKTLRELQKGAKDVEITLVDRNNYHYEATDLHEVAAGTQPAEKITYNIMDVVDEKMTTFIQGTVKTIDAATQTVALEDGQTINYDYLVVSLGFESESFGIPGVQEHALQMVDVKTALNVYEHIQEQMRQYKATQNEEFLKIVVCGAGFTGIELLGSLVENKPKFAEIAGVSADQIQIYCVEAVTRLLPMFNEKLANYGVQLLKDSAIHLLLGKPIKEIKPGAVVYQDNEAGDLAELSAKTIIWTTGVSGSHVVGDSGFEARRGRVMVQPDLTDANHSNVYIIGDCSAVMDTETNRPYPTTAQIALKMGAHAAKNIQAQLKGEATKPFSFKSQGSVCSVGNTRALGIVGKTDIKGYPASFMKKIIMNKALFETGGTKEMMAKGRFDLYH

SEQ ID NO: 42575 - protein, 58 aa, Enterococcus faecalis
MSKTVVRKNESLDDALRRFKRSVSKAGTLQESRKREFYEKPSVKRKKKSEAARKRKKF

SEQ ID NO: 42576 - protein, 149 aa, Enterococcus faecalis
MSLLTTLNDDIKTAMKAKDKETLAVLRMLKTAIQNDQIKAGRELNGEEELTVLSREMKQRKDSLSEFEKAGRDDLVEKVKVEIAIVEKYMPQQLTEEEIRQLVQEVMTQTGATSPKDFGKVMGAMMPKVKGKADGNQVNAIVKELLQEN

SEQ ID NO: 42577 - protein, 538 aa, Enterococcus faecalis
MQTSNKKFPLYALTTLGFTFLTLLVAASPNWFQQMDEAIYHIKWQLNAPLLTAVNLLAKTATIGPMLLFFLSLMVYLLRKKEKILAFWAVSNLLAVGFLGSVFKHVVGRARPNLGALADRSSASFPSGHSLLAMALVCTILIILTYLHVEKTKGIKIFLLTYLVLIVLGRLILRVHYPSDVIAGMLLSYSWINFSFQIVQRYLPAPEPEEAEVSTQRRRRHSRKRKSLFVVFSLTLLFLGTLSVSAYGVSMYRNLQKTANTMYKPRKSSTKSPDLAKGEPVSFLIMGIANDSKRKTDYRSNALMVVTVNNQLQKTTITSIPRDYYVEMAGTNGEYNKINAAHVFGGADMQIKTVENVLHIPINHYFSIDMDAMKDLGDAVGGVTVDNAFAFDAEGIHYPKGKQHLGGWEALQYARMRYEDPEGDYGRQRRQREVLIELTNKLLSFNSLLKYQEILDVIGEHGETDLSFDQMMAMLKKYTPALKTIETDQLKGYDYTGDGVTGIEGISYQLVEESERQRVENAIKEQMNLSTKDTEQSQ

SEQ ID NO: 42578 - protein, 433 aa, Enterococcus faecalis
MSYQKPKGTNDILPGTSEKWQFVEETARLIFKDYQYQEIRTPIFEHYEVISRSVGDTTDIVSKEMYDFYDKGDRHVTLRPEGTAPIVRAFVENKLYGPEYTKPYKTYYMGPMFRYERPQAGRLRQFHQIGVEAFGSENPALDVEIMAMALDFFKQLGIQQIKLVINSLGDKETRATYRQALIDYLEPHMAELSEDSQRRLHENPLRVLDSKDKKDKVIVAEAPSILDYLNEPSKAHFEAVTDMLDLLEIPYEIDSNMVRGLDYYTHTIFEIMSEAPKMGAQSTICAGGRYNGLVEELGGPDTPGFGFGMGIERVLLTMEAEEVVIPALSELDAYVVGIGSDTNVAALQLVQSIRNFGFSADRDYMNRKPKAQFKTADKLQAKLVLTIGENELNEGIVNVKSMATREEKAFPLSAIHDSFDEVYDEMMTKMIEE

SEQ ID NO: 42579 - protein, 285 aa, Enterococcus faecalis
MKVGISMFNILQSTQLSSNTFDFWLEAPRIATHAQAGQFVILRIDEKGERIPLTIAETNPQAGSIRIIFQVIGKTTAALSQLKTSDSLLDITGPLGMPTEVKQYGTVMVVGGGVGIAAIYPIIKALKEAGNRVITILGARTAELVLLQEECRRYSDELIITTDDGSLGKKGLVTEAMEEVIARESVACSWAIGPSIMMKFCTLTAEKHQLPIYVSLNPIMIDGTGMCGGCRVTVDGTMKFACVDGPEFKGNEVNWDEFINRMKQYQEEEAVCFTDRLKEQVEKNG

SEQ ID NO: 42580 - protein, 472 aa, Enterococcus faecalis
MARKSRIKTPIAEQAPTIRKNNFEEVCLGYTLAEGQEEAIRCLQCKNAPCIAKCPVMIDIPGFILAIREGNMEQAADILSKYTNLPAICGRVCPQEKQCEQVCKLGKAKNFEPVAIGKLERLVADWALENHKFPKKTAEPTKGKIAVVGSGPSGLTVAGDLSKLGYEVIIFEALHEAGGVLTYGIPEFRLPKKIVKQEIASIEALGVTIETNVVVGKTITMEEIMSEFDACYLSVGAGAPNFMGIPGTSLNGVYSSSEFLTRINLMHSYEFPEYDTPIKRAKNVVVIGGGNVAMDAARSAKRLGAENVNIVYRRSLEELPARIEEYHHSLEEGINYYWLTNPIAYLDDQQGNLAGVECVKMVLGEPDASGRRRPEPIPNSTFTIPADAVIEAIGQGANRVLLSTYPEIELNQWGYIQADPKTGATSIPGVFAGGDIVTGAATVILAMGAGKIAANAIDQYVKTQKTTVTSNV

SEQ ID NO: 42581 - protein, 352 aa, Enterococcus faecalis
MTMEKVLEVKDLRISFDTFAGKVNAIRGVSFDLYKGETLAIVGESGSGKSVTTRSIMRLLSSNANIDNGEILFKGQDIVHKTEKQMQAIRGKEIAMIFQDPMTSLDPTMPIGKQVAESLIKHNKVSKKEGLAQALELLKLVGIPNAEKRLKNYPHQFSGGQRQRIVIAIALICYPEVLIADEPTTALDVTIQAQILELLKDLQEKISTSIIFITHDLGVVANVADRVAVMYGGRLVEVGTAEEIFYNPQHPYTWGLLGSMPTMEGTEDKLYAIPGSPPDLLDPPTGDAFYPRNEFALKIDTEKEPPYFEVSPTHKAATWLLAPQAPKVTPPAEIVRRWAIYAERQKNPGGSN

SEQ ID NO: 42582 - protein, 612 aa, Enterococcus faecalis
MKKKVHFFQSVNFKIALSFILLLLIAIQIIGGYFIRELEATTISDFKKNMDSQVVQLSNTLSTQMSNKDLERSDVDANLKKALSDFSNADISEARIVDDKGIIRATNDLNQQNIIGKKNDYRDLNDFTSKKYQALDNDKRVYVNVQPIQSPTGETVIGVLYVKSNLENKYQEITNTASIFFTASIIAAAISIIVTLLIARSITKPIGEMREQAIRIARGDYAGKVEVHGKDELGQLAETFNQLSERIEEAQETMEAERNRLDSVLTHMTDGVIATDRRGKVITINEMALSLLNVKNENVIGTSLLELLDIEEDYTLRKLLEEPDELLIDRSTSDREEDQMIIRVDFTMIRRESGFITGLVCVLHDVTEQEKNERERREFVSNVSHELRTPLTSMRSYIEALSEGAWENPEIAPNFLKVTLEETDRMIRMINDLLNLSRMDSGNTHLQLEYVNFNELINFVLDRFDMMIENEQKNYKICREFTKRDLWVELDTDKVIQVLDNILNNAIKYSPDGGVITCRLVETHNNVVFSISDQGLGIPKKDLGKVFERFYRVDKARARAQGGTGLGLAISKEVIRAHNGSIWVESTEGEGSTFYISLPYEPYEEDGGNDEI

SEQ ID NO: 42583 - protein, 56 aa, Enterococcus faecalis
MLETTFEQILTQLSKPAVRALTNEKIDSVDELTHEAEKRYFRCMALVQSLFELLKR

SEQ ID NO: 42584 - protein, 249 aa, Enterococcus faecalis
MPRYKAIIAYDGTHFHGFQKQPNERTVQEEIEKTLARMNNGRSVTVFGSGRTDAGVHAMGQVIHFDYPQERPLEKMRFALDTQTPEDIAVRSVERVSEDFHARYHVIEKTYQFKVDIGKPRSPFRRFYASYFPYPIDLEKIQQALPDLLGTHDFTSFCASGSSVEDKVRTIHEASVHVNETGDELTFTFRGDGFLYKMIRILVGTLLKIGNGRLEPTAIPAIIAAKDRNLAGPTAHPEGLYLAEVKYEN

SEQ ID NO: 42585 - protein, 289 aa, Enterococcus faecalis
MPVVSGAEFLKAARKGGYAVGGYNTNNLEWTQAILEAAEAKKAPVLIQTSMGAAKYMGGYKVAKDMITNLVDSMNITVPVAIHLDHGDYEAALECIEVGYTSIMFDGSHLPFEENLKLAKDVVEKAHAKGISVECEVGSIGGEEDGIIGTGELADIEECKQMVATGIDYLACGIGNIHGQYPENWKGLAFDHLQAIAEAVGSDVPLVLHGGSGIPQEQIEKAISMGISKVNVNTEFQLSFAKATREYIEAGKDLEGKGFDPRKLLAPGKAAIIKDAEEHIDWFGSANKA

SEQ ID NO: 42586 - protein, 527 aa, Enterococcus faecalis
MNKKVFSFSLLLVTLFSLLGMTTNASAEENGEFRVGMEAGYAPFNWSQKNDAHGAVPIQGNSYAGGYDVQISKKIADGLGRKLVIVQTKWDGLAPALQSGKIDAIIAGMSPTAERKKEIAFTNPYYESQFVVIVKKDGKYANAKSLKDLADAKITAQLNTFHYGLIDQIPNVNKQQAMDNFSAMRTALASGMIDGYVSERPEGITATSVNKELKMLEFPKEKGFDASAEDSQVAVGMRKGDPDIEKVNKILAGISQDERTKIMDQAIKDQPAATDSDEQKTGLINDFKNIWNQYGDMFLRGAGLTLFIALIGTVVGTTLGLLIGVFRTIPDSENPVARFFQKLGNLILSIYIEVFRGTPMMVQAMVIFYGLALAFGISLDRTVAALFIVSVNTGAYMSEIVRGGIFAVDKGQFEAAQAIGMTHGQTMRKVVIPQVLRNILPATGNEFVINIKDTAVLSVIGVADLFFQGNAASGANFQFFQTFTIVGIMYLVMTFVITRILRVVERKMDGPSAYVKVEELTEEGKES

SEQ ID NO: 42587 - protein, 645 aa, Enterococcus faecalis
MSIHITFPDGAVKPFDSGITTFDVAKSISNSLAKKALAGKFNGVLIDLDRPIVEDGSLEIVTPDHEDALGILRHSSAHLMANALRRLFPNIKFGVGPAIDSGFYYDTDNGESPVTAEDLPAIEAEMMKIVKENNPIVRKEISRAEALELFADDPYKVELITDLPEDEIITVYDQGDFVDLCRGVHVPSTGRIQVFKLLSVAGAYWRGNSDNHMMQRIYGTAFFDKKDLKEFIKMREEAKERDHRKLGKELDLFMVSQEVGSGLPFWLPKGATIRRTIERYIVDKEISLGYQHVYTPIMADVELYKTSGHWDHYHEDMFPPMDMGDGEMLVLRPMNCPHHMMVYKNDIHSYRELPIRIAELGMMHRYEKSGALSGLQRVREMTLNDGHTFVRPDQIKDEFKRTLELMVAVYADFNITDYRFRLSYRDPNNTDKYFDDDAMWEKAQAMLKAAMDELELDYFEAEGEAAFYGPKLDVQVKTALGMEETLSTIQLDFLLPERFDLTYVGEDGENTHRPVVIHRGIVSTMERFVAYLTEVYKGAFPTWLAPIQATIIPVSVEAHSEYAYEIKERLQAQGLRVEVDDRNEKMGYKIRASQTQKVPYQLVVGDKEMEDATVNVRRYGSKETSVEDLSIFIDSMAAEVHNYSR

SEQ ID NO: 42588 - protein, 157 aa, Enterococcus faecalis
MIRIGQGFDVHQLVPQRPLIIGGVTLPYEKGLLGHSDADVLTHAIIDAILGAAGLGDIGQLFPETDPQFKNANSVNLLKKVNEKVGRSGFTIGNIDCTILAEEPKMSPYLAEMKKNLAASCHLAVTQVNIKATTMETMGFVGKKEGIGAIAVALLEK

SEQ ID NO: 42589 - protein, 453 aa, Enterococcus faecalis
MNEGQEMEEQFALLLETLKNQQMNEFRELFLALHIYEQGQFYQSLDEKDRQHLYNYLSPKELADMFDVIEEDNENMKDYLAEMRPSYAADMLAEMYTDNAVDLLNMLDKSQKAKYLSLLSSEEAGEIKELLHYEDETAGAIMTTEFVSIVANQTVRSAMYVLKNQADMAETIYYVYVVDQENHLVGVISLRDLIVNDDDTLIADILNERVISVHVGDDQEDVAQTIRDYDFLAVPVTDYDDHLLGIVTVDDIIDVIDDEAASDYSGLAGVDVEEVSENPLKAASKRLPWLITLLFLGMSTASLISNYESLVSEASILAVFISLITGTAGNAGTQSLAVAVRRLAMKDEKDSNFGRLILSEVLTGLVTGAVTGLTIMIVVGVWQHNLPLGFVIGMAMLCAITVANLAGSLIPMLMDKLGFDPAVASGPFITTLSDLTSVLIYFNIASMFMRYFV

SEQ ID NO: 42590 - protein, 87 aa, Escherichia coli
MANIKSAKKRAIQSEKARKHNASRRSMMRTFIKKVYAAIEAGDKAAAQKAFNEMQPIVDRQAAKGLIHKNKAARHKANLTAQINKLA

SEQ ID NO: 42591 - protein, 188 aa, Escherichia coli
MFKGQKTLAALAVSLLFTAPVYAADEGSGEIHFKGEVIEAPCEIHPEDIDKNIDLGQVTTTHINREHHSNKVAVDIRLINCDLPASDNGSGMPVSKVGVTFDSTAKTTGATPLLSNTSAGEATGVGVRLMDKNDGNIVLGSAAPDLDLDASSSEQTLNFFAWMEQIDNAVDVTAGEVTANATYVLDYK

SEQ ID NO: 42592 - protein, 661 aa, Escherichia coli
MKTVRESTTLYNFLGSHNPYWRLTESSDVLRFSTTETTEPDRTLQLSAEQAARIREMTVITSSLMMSLTVDESDLSVHLVGRKINKREWAGNASAWHDTPAVARDLSHGLSFAEQVVSEAHSAIVILDSRGNIQRFNRLCEDYTGLKEHDVIGQSVFKLFMSRREAAASRRNNRVFFRSGNAYEVELWIPTCKGQRLFLFRNKFVHSGSGKNEIFLICSGTDITEERRAQERLRILANTDSITGLPNRNAMQDLIDHAINHADNNKVGVVYLDLDNFKKVNDAYGHLFGDQLLRDVSLAILSCLEHDQVLARPGGDEFLVLASNTSQSALEAMASRILTRLRLPFRIGLIEVYTSCSVGIALSPEHGSDSTAIIRHADTAMYTAKEGGRGQFCVFTPEMNQRVFEYLWLDTNLRKALENDQLVIHYQPKITWRGEVRSLEALVRWQSPERGLIPPLDFISYAEESGLIVPLGRWVILDVVRQVAKWRDKGINLRVAVNISARQLADQTIFTALKQVLQELNFEYCPIDVELTESCLIENDELALSVIQQFSQLGAQVHLDDFGTGYSSLSQLARFPIDAIKLDQVFVRDIHKQPVSQSLVRAIVAVAQALNLQVIAEGVESAKEDAFLTKNGINERQGFLFAKPMPAVAFERWYKRYLKRA

SEQ ID NO: 42593 - protein, 60 aa, Escherichia coli
MSLMSEFDAQRVAERIDIVLDILVADDYHSAIHNLEILKAELLRQVAESTPDIPKAPWEI

SEQ ID NO: 42594 - protein, 203 aa, Escherichia coli
MRLRVVPGFISPPPGFGGLGYTPTARACVNISIPLQLRVIDMLDVFTPLLKLFANEPLERLMYTIIIFGLTLWLIPKEFTVAFNAYTEIPWLFQIIVFAFSFVVAISFSRLRAHIQKHYSLLPEQRVLLRLSEKEIAVFKDFLKTGNLIITSPCRNPVMKKLERKGIIQHQSDSANCSYYLVTEKYSHFMKLFWNSRSRRFNR

SEQ ID NO: 42595 - protein, 111 aa, Escherichia coli
MADKAILWALISASTKEGRKACSLSYFACKAAEAELGLAYMAANDNKEFLTSLSNIMRYKIDAGLSESYTCYLLSKGKIIRPYLKNLNPLQLAADCIETVNKIKDKNKKNH

SEQ ID NO: 42596 - protein, 443 aa, Escherichia coli
MNKAIKVSLYISFVLIICALSKNIMMLNTSDFGRAIKPLIEDIPAFTYDLPLLYKLKGHIDSIDSYEYISSYSYILYTYVLFISIFTEYLDARVLSLFLKVIYIYSLYAIFTSYIKTERYVTLFTFFILAFLMCSSSTLSMFASFYQEQIVIIFLPFLVYSLTCKNNKSMLLLFFSLLIISTAKNQFILTPLIVYSYYIFFDRHKLIIKSVICVVCLLASIFAISYSKGVVELNKYHATYFGSYLYMKNNGYKMPSYVDDKCVGLDAWGNKFDISFGATPTEVGTECFESHKDETFSNALFLLVSKPSTIFKLPFDDGVMSQYKENYFHVYKKLHVIYGESNILTTITNIKDNIFKNIRFISLLLFFIASIFIRNNKIKASLFVVSLFGISQFYVSFFGEGYRDLSKHLFGMYFSFDLCLYITVVFLIYKIIQRNQDNSDVKH

SEQ ID NO: 42597 - protein, 61 aa, Escherichia coli
MLILTRRVGETLMIGDEVTVTVLGVKGNQVRIGVNAPKEVSVHREEIYQRIQAEKSQQSSY

SEQ ID NO: 42598 - protein, 453 aa, Escherichia coli
MFDNLTDRLSRTLRNISGRGRLTEDNVKDTLREVRMALLEADVALPVVREFINRVKEKAVGHEVNKSLTPGQEFVKIVRNELVAAMGEENQTLNLAAQPPAVVLMAGLQGAGKTTSVGKLGKFLREKHKKKVLVVSADVYRPAAIKQLETLAEQVGVDFFPSDVGQKPVDIVNAALKEAKLKFYDVLLVDTAGRLHVDEAMMDEIKQVHASINPVETLFVVDAMTGQDAANTAKAFNEALPLTGVVLTKVDGDARGGAALSIRHITGKPIKFLGVGEKTEALEPFHPDRIASRILGMGDVLSLIEDIESKVDRAQAEKLASKLKKGDGFDLNDFLEQLRQMKNMGGMASLMGKLPGMGQIPDNVKSQMDDKVLVRMEAIINSMTMKERAKPEIIKGSRKRRIAAGCGMQVQDVNRLLKQFDDMQRMMKKMKKGGMAKMMRSMKGMMPPGFPGR

SEQ ID NO: 42599 - protein, 121 aa, Escherichia coli
MSITKDQIIEAVAAMSVMDVVELISAMEEKFGVSAAAAVAVAAGPVEAAEEKTEFDVILKAAGANKVAVIKAVRGATGLGLKEAKDLVESAPAALKEGVSKDDAEALKKALEEAGAEVEVK

SEQ ID NO: 42600 - protein, 824 aa, Escherichia coli
MLQCGAKNVNPLERFVSSLPVAAVLPELLTALDCAPQVLLSAPTGAGKSTWLPLQLLAHPGINGKIILLEPRRLAARNVAQRLAELLNEKPGDTVGYRMRAQNCVGPNTRLEVVTEGVLTRMIQRDPELSGVGLVILDEFHERSLQADLALALLLDVQQGLRDDLKLLIMSATLDNDRLQQMLPEAPVVISEGRSFPVERRYLPLPAHQRFDDAVAVATAEMLRQESGSLLLFLPGVGEIQRVQEQLASRIGSDVLLCPLYGALSLNDQRKAILPAPQGMRKVVLATNIAETSLTIEGIRLVVDCAQERVARFDPRTGLTRLITQRVSQASMTQRAGRAGRLEPGISLHLIAKEQAERAAAQSEPEILQSDLSGLLMELLQWGCSDPAQMSWLDQPPVVNLLAAKRLLQMLGALEGERLSAQGQKMAALGNDPRLAAMLVSAKNDDEAATAAKIAAILEEPPRMGNSDLGVAFSRNQPAWQQRSQQLLKRLNVRGGEADSSLIAPLLAGAFADRIARRRGQDGRYQLANGMGAMLDANDALSRHEWLIAPLLLQGSASPDARILLALLVDIDELVQRCPQLVQQSDTVEWDDAQGTLKAWRRLQIGQLTVKVQPLAKPSEDELHQAMLNGIRDKGLSVLNWTAEAEQLRLRLLCAAKWLPEYDWPAVDDESLLAALETWLLPHMTGVHSLRGLKSLDIYQALRGLLDWGMQQRLDSELPAHYTVPTGSRIAIRYHEDNPPALAVRMQEMFGEATNPTIAQGRVPLVLELLSPAQRPLQITRDLSDFWKGAYREVQKEMKGRYPKHVWPDDPANTAPTRRTKKYS

SEQ ID NO: 42601 - protein, 273 aa, Escherichia coli [sequence omitted]

SEQ ID NO: 42602 - protein, 100 aa, Escherichia coli [sequence omitted]

SEQ ID NO: 42603 - protein, 221 aa, Escherichia coli
MNVFSQTQRYKALFWLSLFHLLVITSSNYLVQLPVSILGFHTTWGAFSFPFIFLATDLTVRIFGAPLARRIIFAVMIPALLISYVISSLFYMGSWQGFGALAHFNLFVARIATASFMAYALGQILDVHVFNRLRQSRRWWLAPTASTLFGNVSDTLAFFFIAFWRSPDAFMAEHWMEIALVDYCFKVLISIVFFLPMYGVLLNMLLKRLADKSEINALQAS

SEQ ID NO: 42604 - protein, 342 aa, Escherichia coli
MLKFIQNNREITALLAVVLLFVLPGFLDRQYLSVQTLTMVYSSAQILILLAMGATLVMLTRNIDVSVGSITGMCAVLLGMLLNAGYSLPVACVATLLLGLLAGFFNGVLVAWLKIPAIVATLGTLGLYRGIMLLWTGGKWIEGLPAELKQLSAPLLLGVSAIGWLTIILVAFMAWLLAKTAFGRSFYATGDNLQGARQLGVRTEAIRIVAFSLNGCMAALAGIVFASQIGFIPNQTGTGLEMKAIAACVLGGISLLGGSGAIIGAVLGAWFLTQIDSVLVLLRIPAWWNDFIAGLVLLAVLVFDGRLRCALERNLRRQKYARFMTPPPSVKPASSGKKREAA

SEQ ID NO: 42605 - protein, 714 aa, Escherichia coli
MSRIIMLIPTGTSVGLTSVSLGVIRAMERKGVRLSVFKPIAQPRTGGDAPDQTTTIVRANSSTTTAAEPLKMSYVEGLLSSNQKDVLMEEIVANYHANTKDAEVVLVEGLVPTRKHQFAQSLNYEIAKTLNAEIVFVMSQGTDTPEQLKERIELTRNSFGGAKNTNITGVIVNKLNAPVDEQGRTRPDLSEIFDDSSKAKVNNVDPAKLQESSPLPVLGAVPWSFDLIATRAIDMARHLNATIINEGDINTRRVKSVTFCARSIPHMLEHFRAGSLLVTSADRPDVLVAACLAAMNGVEIGALLLTGGYEMDARISKLCERAFATGLPVFMVNTNTWQTSLSLQSFNLEVPVDDHERIEKVQEYVANYINADWIESLTATSERSRRLSPPAFRYQLTELARKAGKRIVLPEGDEPRTVKAAAICAERGIATCVLLGNPAEINRVAASQGVELGAGIEIVDPEVVRESYVGRLVELRKNKGMTETVAREQLEDNVVLGTLMLEQDEVDGLVSGAVHTTANTIRPPLQLIKTAPGSSLVSSVFFMLLPEQVYVYGDCAINPDPTAEQLAEIAIQSADSAAAFGIEPRVAMLSYSTGTSGAGSDVEKVREATRLAQEKRPDLMIDGPLQYDAAVMADVAKSKAPNSPVAGRATVFIFPDLNTGNTTYKAVQRSADLISIGPMLQGMRKPVNDLSRGALVDDIVYTIALTAIQSAQQQ

SEQ ID NO: 42606 - protein, 94 aa, Escherichia coli [sequence omitted]

SEQ ID NO: 42607 - protein, 728 aa, Escherichia coli
MITRIPRSSFSANINNTAQTNEHQTLSELFYKELEDKFSGKELATPLLKSFSENCRQNGRHIFSNKDFVIKFSTSVLQADKKEITIINKNENTTLTQTIAPIFEKYLMEILPQRSDTLDKQELNLKSDRKEKEFPRIKLNGQCYFPGRPQNRIVCRHIAAQYINDIYQNVDYKPHQDDYSSAEKFLTHFNKKCKNQTLALVSSRPEGRCVAACGDFGLVMKAYFDKMESNGISVMAAILLVDNHALTVRLRIKNTTEGCTHYVVSVYDPNVTNDKIRIMSESKENIKHYSLMDFMNVDYSLLKWSNDHVINQSVAIIPALPKEQLLMLKGSVDEITPPLSPATMNLLMAIGQNHQLTQLMIQLQKMPELHRTEMLTAYNSINLPGLYLAINYGNADIVETIFNSLSETGYEGLLSKKNLMHILEAKDKNGFSGLFLAISRKDKNVVTSILNALPKLAATHHLDNEQVYKFLSAKNRTSSHVLYHVMANGDADMLKIVLNALPLLIRTCHLTKEQVLDLLKAKDFYGCPGLYLAMQNGHSDIVKVILEALPSLAQEINISASDIVDLLTAKSLARDTGLFMAMQRGHMNVINTIFNALPTLFNTFKFDKKNMKPLLLANNSNEYPGLFSAIQHKQQNVVETVYLALSDHARLFGFTAEDIMDFWQHKAPQKYSAFELAFEFGHRVIAELILNTLNKMAESFGFTDNPRYIAEKNYMEALLKKASPHTVR

SEQ ID NO: 42608 - protein, 179 aa, Escherichia coli
MPRRRVIGQRKILPDPKFGSELLAKFVNILMVDGKKSTAESIVYSALETLAQRSGKSELEAFEVALENVRPTVEVKSRRVGGSTYQVPVEVRPVRRNALAMRWIVEAARKRGDKSMALRLANELSDAAENKGTAVKKREDVHRMAEANKAFAHYRWLSLRSFSHQAGASSKQPALGYLN

SEQ ID NO: 42609 - protein, 124 aa, Escherichia coli
MATVNQLVRKPRARKVAKSNVPALEACPQKRGVCTRVYTTTPKKPNSALRKVCRVRLTNGFEVTSYIGGEGHNLQEHSVILIRGGRVKDLPGVRYHTVRGALDCSGVKDRKQARSKYGVKRPKA

SEQ ID NO: 42610 - protein, 367 aa, Escherichia coli [sequence omitted]

SEQ ID NO: 42611 - protein, 456 aa, Escherichia coli
MELSSLTAVSPVDGRYGDKVSALRGIFSEYGLLKFRVQVEVRWLQKLAAHAAIKEVPAFAADAIGYLDAIVASFSEEDAARIKTIERTTNHDVKAVEYFLKEKVAEIPELHAVSEFIHFACTSEDINNLSHALMLKTARDEVILPYWRQLIDGIKDLAVQYRDIPLLSRTHGQPATPSTIGKEMANVAYRMERQYRQLNQVEILGKINGAVGNYNAHIAAYPEVDWHQFSEEFVTSLGIQWNPYTTQIEPHDYIAELFDCVARFNTILIDFDRDVWGYIALNHFKQKTIAGEIGSSTMPHKVNPIDFENSEGNLGLSNAVLQHLASKLPVSRWQRDLTDSTVLRNLGVGIGYALIAYQSTLKGVSKLEVNRDHLLDELDHNWEVLAEPIQTVMRRYGIEKPYEKLKELTRGKRVDAEGMKQFIDGLALPEEEKARLKAMTPANYIGRAITMVDELK

SEQ ID NO: 42612 - protein, 704 aa, Escherichia coli
MARTTPIARYRNIGISAHIDAGKTTTTERILFYTGVNHKIGEVHDGAATMDWMEQEQERGITITSAATTAFWSGMAKQYEPHRINIIDTPGHVDFTIEVERSMRVLDGAVMVYCAVGGVQPQSETVWRQANKYKVPRIAFVNKMDRMGANFLKVVNQIKTRLGANPVPLQLAIGAEEHFTGVVDLVKMKAINWNDADQGVTFEYEDIPADMVELANEWHQNLIESAAEASEELMEKYLGGEELTEAEIKGALRQRVLNNEIILVTCGSAFKNKGVQAMLDAVIDYLPSPVDVPAINGILDDGKDTPAERHASDDEPFSALAFKIATDPFVGNLTFFRVYSGVVNSGDTVLNSVKAARERFGRIVQMHANKREEIKEVRAGDIAAAIGLKDVTTGDTLCDPDAPIILERMEFPEPVISIAVEPKTKADQEKMGLALGRLAKEDPSFRVWTDEESNQTIIAGMGELHLDIIVDRMKREFNVEANVGKPQVAYRETIRQKVTDVEGKHAKQSGGRGQYGHVVIDMYPLEPGSNPKGYEFINDIKGGVIPGEYIPAVDKGIQEQLKAGPLAGYPVVDMGIRLHFGSYHDVDSSELAFKLAASIAFKEGFKKAKPVLLEPIMKVEVETPEENTGDVIGDLSRRRGMLKGQESEVTGVKIHAEVPLSEMFGYATQLRSLTKGRASYTMEFLKYDEAPSNVAQAVIEARGK

SEQ ID NO: 42613 - protein, 464 aa, Escherichia coli
MLLLDACSQMCPSFRRFQTVFHNSSIFLPYWLATLVSFRETFQEEKLLTMKGSYKSRWVIVIVVVIAAIAAFWFWQGRNDSRSAAPGATKQAQQSPAGGRRGMRSGPLAPVQAATAVEQAVPRYLTGLGTITAANTVTVRSRVDGQLIALHFQEGQQVKAGDLLAEIDPSQFKVALAQAQGQLAKDKATLANARRDLARYQQLAKTNLVSRQELDAQQALVSETEGTIKADEASVASAQLQLDWSRITAPVDGRVGLKQVDVGNQISSGDTTGIVVITQTHPIDLVFTLPESDIATVVQAQKAGKPLVVEAWDRTNSKKLSEGTLLSLDNQIDATTGTIKVKARFNNQDDALFPNQFVNARMLVDTEQNAVVIPTAALQMGNEGHFVWVLNSENKVSKHLVTPGIQDSQKVVIRAGISAGDRVVTDGIDRLTEGAKVEVVEAQSATTPEEKATSREYAKKGARS

SEQ ID NO: 42614 - protein, 477 aa, Escherichia coli
MKVTLPEFERAGVMVVGDVMLDRYWYGPTSRISPEAPVPVVKVNTIEERPGGAANVAMNIASLGANARLVGLTGIDDAARALSKSLADVNVKCDFVSVPTHPTITKLRVLSRNQQLIRLDFEEGFEGVDPQPLHERINQALSSIGALVLSDYAKGALASVQQMIQLARKAGVPVLIDPKGTDFERYRGATLLTPNLSEFEAVVGKCKTEEEIVERGMKLIADYELSALLVTRSEQGMSLLQPGKAPLHMPTQAQEVYDVTGAGDTVIGVLAATLAAGNSLEEACFFANAAAGVVVGKLGTSTVSPIELENAVRGRADTGFGVMTEEELKLAVAAARKRGEKVVMTNGVFDILHAGHVSYLANARKLGDRLIVAVNSDASTKRLKGDSRPVNPLEQRMIVLGALEAVDWVVSFEEDTPQRLIAGILPDLLVKGGDYKPEEIAGSKEVWANGGEVLVLNFEDGCSTTNIIKKIQQDKKG

SEQ ID NO: 42615 - protein, 292 aa, Escherichia coli
MNNHFKCIGIVGHPRHPTALTTHEMLYRWLCTKGYEVIVEQQIAHELQLKNVKTGTLAEIGQLADLAVVVGGDGNMLGAARTLARYDIKVIGINRGNLGFLTDLDPDNAQQQLADVLEGHYISEKRFLLEAQVCQQDCQKRISTAINEVVLHPGKVAHMIEFEVYIDEIFAFSQRSDGLIISTPTGSTAYSLSAGGPILTPSLDAITLVPMFPHTLSARPLVINSSSTIRLRFSHRRNDLEISCDSQIALPIQEGEDVLIRRCDYHLNLIHPKDYSYFNTLSTKLGWSKKLF

SEQ ID NO: 42616 - protein, 296 aa, Escherichia coli
MIKKTTEIDAILLNLNKAIDAHYQWLVSMFHSVVARDASKPEITDNHSYGLCQFGRWIDHLGPLDNDELPYVRLMDSAHQHMHNCGRELMLAIVENHWQDAHFDAFQEGLLSFTAALTDYKIYLLTIRSNMDVLTGLPGRRVLDESFDHQLRNAEPLNLYLMLLDIDRFKLVNDTYGHLIGDVVLRTLATYLASWTRDYETVYRYGGEEFIIIVKAANDEEACRAGVRICQLVDNHAITHSEGHINITVTAGVSRAFPEEPLDVVIGRADRAMYEGKQTGRNRCMFIDEQNVINRV

SEQ ID NO: 42617 - protein, 1426 aa, Escherichia coli
MSGKPAARQGDMTQYGGPIVQGSAGVRIGAPTGVACSVCPGGMTSGNPVNPLLGAKVLPGETDLALPGPLPFILSRTYSSYRTKTPAPVGVFGPGWKAPSDIRLQLRDDGLILNDNGGRSIHFEPLLPGEAVYSRSESMWLVRGGKAAQPDGHTLARLWGALPPDIRLSPHLYLATNSAQGPWWILGWSERVPGAEDVLPAPLPPYRVLTGMADRFGRTLTYRREAAGDLAGEITGVTDGAGREFRLVLTTQAQRAEEARTSSLSSSDSSRPLSASAFPDTLPGTEYGPDRGIRLSAVWLMHDPAYPESLPAAPLVRYTYTEAGELLAVYDRSNTQVRAFTYDAQHPGRMVAHRYAGRPEMRYRYDDTGRVVEQLNPAGLSYRYLYEQDRITVTDSLNRREVLHTEGGAGLKRVVKKELADGSVTRSGYDAAGRLTAQTDAAGRRTEYGLNVVSGDITDITTPDGRETKFYYNDGNQLTAVVSPDGLESRREYDEPGRLVSETSRSGETVRYRYDDAHSELPATTTDATGSTRQMTWSRYGQLLAFTDCSGYQTRYEYDRFGQMTAVHREEGISLYRRYDNRGRLTSVKDAQGRETRYEYNAAGDLTAVITPDGNRSETQYDAWGKAVSTTQGGLTRSMEYDAAGRVISLTNENGSHSVFSYDALDRLVQQGGFDGRTQRYHYDLTGKLTQSEDEGLVILWYYDESDRITHRTVNGEPAEQWQYDGHGWLTDISHLSEGHRVAVHYGYDDKGRLTGECQTVENPETGELLWQHETKHAYNEQGLANRVTPDSLPPVEWLTYGSGYLAGMKLGGTPLVEYTRDRLHRETVRSFGSMAGSNAAYELTSTYTPAGQLQSQHLNSLVYDRDYGWSDNGDLVRISGPRQTREYGYSATGRLESVRTLAPDLDIRIPYATDPAGNRLPDPELHPDSTLTVWPDNRIAEDAHYVYRHDEYGRLTEKTDRIPAGVIRTDDERTHHYHYDSQHRLVFYTRIQHGEPLVESRYLYDPLGRRMAKRVWRRERDLTGWMSLSRKPEVTWYGWDGDRLTTVQTDTTRIQTVYEPGSFTPLIRVETENGEREKAQRRSLAETLQQEGSENGHGVVFPAELVRLLDRLEEEIRADRVSSESRAWLAQCGLTVEQLARQVEPEYTPARKAHLYHCDHRGLPLALISEDGNTAWSAEYDEWGNQLNEENPHHVYQPYRLPGQQHDEESGLYYNRHRYYDPLQGRYITQDPMGLKGGWNLYQYPLNPLQQIDPMGLLQTWDDARSGACTGGVCGVLSRIIGPSKFDSTADAALDALKETQNRSLCNDMEYSGIVCKDTNGKYFASKAETDNLRKESYPLKRKCPTGTDRVAAYHTHGADSHGDYVDEFFSSSDKNLVRSKDNNLEAFYLATPDGRFEALNNKGEYIFIRNSVPGLSSVCIPYHD

SEQ ID NO: 42618 - protein, 236 aa, Escherichia coli
MLALMDADGNIAWSGEYDEWGNQLNEENPHHLHQPYRLPGQQYDKESGLYYNRNRYYDPLQGRYITQDPIGLEGGWSLYAYPLNPVNGIDPLGLSPADVALIRRKDQLNHQRAWDILSDTYEDMKRLNLGGTDQFFHCMAFCRVSKLNDAGVSRSAKGLGYEKEIRDYGLNLFGMYGRKVKLSHSEMIEDNKKDLAVNDHGLTCPSTTDCSDRCSDYINPEHKKTIKALQDAGYLK

SEQ ID NO: 42619 - protein, 86 aa, Escherichia coli
MLAISSNLSKMIIFIFAIIIIVVLCVITYLYLYKDESLVSKHYINYMAIPENDGVFTWLPDFFPHVAVDISIYTNVEDDYFFLIFP

SEQ ID NO: 42620 - protein, 86 aa, Escherichia coli
MALLITKKCINCDMCEPECPNEAISMGDHIYEINSDKCTECVGHYETPTCQKVCPIPNTIVKDPAHVETEEQLWDKFVLMHHADKI

SEQ ID NO: 42621 - protein, 467 aa, Escherichia coli
MDVNVDQFDTEAFRTDKLELTSGNIADHNGNVVSGVFDIHSSDYVLNADLVNDRTWDTSKSNYGYGIVAMNSDGHLTINGNGDVDNGTELDNSSVDNVVAATGNYKVRIDNATGAGAIADYKDKEIIYVNDVNSNATFSAANKADLGAYTYQAEQRGNTVVLQQMELTDYANMALSIPSANTNIWNLEQDTVGTRLTNSRHGLADNGGAWVSYFGGNFNGDNGTINYDQDVNGIMVGVDTKIDGNNAKWIVGAAAGFAKGDMNDRSGQVDQDSQTAYIYSSAHFANNVFVDGSLSYSHFNNDLSATMSNGTYVDGSTNSDAWGFGLKAGYDFKLGDAGYVTPYGSVSGLFQSGDDYQLSNDMKVDGQSYDSMRYELGVDAGYTFTYSEDQALTPYFKLAYVYDDSNNDNDVNGDSIDNGTEGSAVRVGLGTQFSFTKNFSAYTDANYLGGGDVDQDWSANVGVKYTW

SEQ ID NO: 42622 - protein, 222 aa, Escherichia coli
MPVKDLTGITAKDAQMLSVVKPLQEFGKLDKCLSRYGTRFEFNNEKQVIFSSDVNNEDTFVILEGVISLRREENVLIGITQAPYIMGLADGLMKNDIPYKLISEGNCTGYHLPAKQTITLIEQNQLWRDAFYWLAWQNRILELRDVQLIGHNSYEQIRATLLSMIDWNEELRSRIGVMNYIHQRTRISRSVVAEVLAALRKGGYIEMNKGKLVAINRLPSEY

SEQ ID NO: 42623 - protein, 234 aa, Escherichia coli
MNNMFEPPKNYNEMLPKLHKATFLNTLIYCILLVIYEYIPLITLPTKYVPPIKDHESFINWALSFGILPCAFAIFAYLISGALDLHNNAAKLLRVRYLWDKHLIIKPLSRRAGVNRKLNKDEAHNVMSNLYYPEVRKIEDKHYIELFWNKVYYFWIFFEFSIIALISFLIIFFCKQMDIFHVEGSLLSLFFFVILSFSVSGIIFALTVKPRTESQVGKIPDDKIKEFFTKNNIN

SEQ ID NO: 42624 - protein, 176 aa, Escherichia coli
MKYNNIIFLGLCLGLTTYSALSADSVIKISGRVLDYGCTVSSDSLNFTVDLQKNSARQFPTTGSTSPAVPFQITLSECSKGTTGVRVAFNGIEDAENNTLLKLDEGSNTASGLGIEILDANMRPVKLNDLHAGMQWIPLVPEQNNILPYSARLKSTQKSVNPGLVRASATFTLEFQ

SEQ ID NO: 42625 - protein, 382 aa, Escherichia coli [sequence omitted]

SEQ ID NO: 42626 - protein, 883 aa, Escherichia coli
MTAFRAAFKAYRMHQVLLLPRFARLTIALSLATAVFPVDAEYYFNPRFLSNDLAESVDLSAFTKGREAPPGTYRVDIYLNDEFMTSRDITFITDDNNADLIPCLSTDLLVSLGIKKSALLDNKEHSAEKHVPDNSACTPLQDRLVDASTEFDVGQQHLSLSVPQIYVGRMARGYVSPDLWEEGINAGLLNYSFNGNSINNRSNHNAGKSNYAYLNLQSGINIGSWRLRDNSTWSYNSGSSNSSDSNKWQHINTSAERDIIPLRSRLTVGDSYTDGDIFDSVNFRGLKINSTEAMLPDSQHGFAPVIHGIARGTAQVSVKQNGYDVYQTTVPPGPFTIDDINSAANGGDLQVTIKEADGSIQTLYVPYSSVPVLQRAGYTRYALAMGEYRSGNNLQSSPRFIQGSLMHGLEGNWTPYGGMQIAEDYQAFNLGIGKDLGLFGAFSFDITQANTTLADGTRHSGQSVKSVYSKSFYQTGTNIQVAGYRYSTQGFYNLSDSAYSRMSGYTVKPPTGDSNEQTQFIDYFNLFYSKRGQEQISISQQLGNYGATFFSASRQSYWNTSRSDQQISFGLNVPFGDITTSLNYSYSNNIWQNDRDHLLAFTLNVPFSHWMRTDSQSAFRNSNASYSMSNDLKGGMTNLSGVYGTLLPDNNLNYSVQVGNTHGGNTSSGTSGYSTLNYRGAYGNTNVGYSRSGDSSQIYYGMSGGIIAHADGITFGQPLGDTMVLVKAPGADNVKIENQTGIHTDWRGYAILPFATEYRENRVALNANSLADNVELDETVVTVIPTHGAIARATFNAQIGGKVLMTLKYGNKSVPFGAIVTHGENKNGSIVAENGQVYLTGLPQSGKLQVSWGNDKNSNCIVDYKLPEVSPGTLLNQQTAICR

SEQ ID NO: 42627 - protein, 559 aa, Escherichia coli
MTQFTQNTAMPSSLWQYWRGLSGWNFYFLVKFGLLWAGYLNFHPLLNLVFAAFLLMPLPRYSLHRLRHWIALPIGFALFWHDTWLPGPESIMSQGSQVAGFSTDYLIDLVTRFINWQMIGAIFVLLVAWLFLSQWIRITVFVVAILLWLNVLTLAGPSFSLWPAGQPTTTVTTTGGNAAATVAATGGAPVVGDMPAQTAPPTTANLNAWLNNFYNAEAKRKSTFPSSLPADAQPFELLVINICSLSWSDIEAAGLMSHPLWSHFDIEFKNFNSATSYSGPAAIRLLRASCGQTSHTNLYQPANNDCYLFDNLSKLGFTQHLMMGHNGQFGGFLKEVRENGGMQSELMDQTNLPVILLGFDGSPVYDDTAVLNRWLDVTEKDKNSRSATFYNTLPLHDGNHYPGVSKTADYKARAQKFFDELDAFFTELEKSGRKVMVVVVPEHGGALKGDRMQVSGLRDIPSPSITDVPVGVKFFGMKAPHQGAPIVIEQPSSFLAISDLVVRVLDGKIFTEDNVDWKKLTSGLPQTAPVSENSNAVVIQYQDKPYVRLNGGDWVPYPQ

SEQ ID NO: 42628 - protein, 98 aa, Escherichia coli
MKKENYSFKQACAVVGGQSAMARLLGVSPPSVNQWIKGVRQLPAERCPAIERATRGEVLCEELRPDIDWSYLRRSACCSQNMSVKQLNDSNKSSFDHT

SEQ ID NO: 42629 - protein, 140 aa, Escherichia coli
MKIKHEHIESVLFALAAEKGQAWVANAITEEYLRQGGGELPLVPGKDWNNQQNIYHRWLKGETKTQREKIQKLIPAILAILPRELRHRLCIFDTLERRALLAAQEALSTAIDAHDDAVQAVYRKAHFSGGGSSDDSVIVH

SEQ ID NO: 42630 - protein, 444 aa, Escherichia coli
MILDTVDEKKKGVHTRYLILLIIFIVTAVNYADRATLSIAGTEVAKELQLSAVSMGYIFSAFGWAYLLMQIPGGWLLDKFGSKKVYTYSLFFWSLFTFLQGFVDMFPLAWAGISMFFMRFMLGFSEAPSFPANARIVAAWFPTKERGTASAIFNSAQYFSLALFSPLLGWLTFAWGWEHVFTVMGVIGFVLTALWIKLIHNPTDHPRMSAEELKFISENGAVVDMDHKKPGSAAASGPKLHYIKQLLSNRMMLGVFFGQYFINTITWFFLTWFPIYLVQEKGMSILKVGLVASIPALCGFAGGVLGGVFSDYLIKRGLSLTLARKLPIVLGMLLASTIILCNYTNNTTLVVMLMALAFFGKGFGALGWPVISDTAPKEIVGLCGGVFNVFGNVASIVTPLVIGYLVSELHSFNAALVFVGCSALMAMVCYLFVVGDIKRMELQK

SEQ ID NO: 42631 - protein, 246 aa, Escherichia coli
MKFKVIALAALMGISGMAAQANELPDGPHIVTSGTASVDAVPDIATLAIEVNVAAKDAATAKKQADERVAQYISFLELNQIAKKDISSANLRTQPDYDYQDGKSILKGYRAVRTVEVTLRQLDKLNSLLDGALKAGLNEIRSVSLGVAQPDAYKDKARKAAIDNAIHQAQELANGFHRKLGPVYSVRYHVSNYQPSPMVRMMKADAAPVSAQETYEQAAIQFDDQVDVVFQLEPVDQQPAKTPAAQ

SEQ ID NO: 42632 - protein, 82 aa, Escherichia coli
MGILSWIIFGLIAGILAKWIMPGKDGGGFFMTILLGIVGAVVGGWISTLFGFGKVDGFNFGSFVVAVIGAIVVLFIYRKIKS

SEQ ID NO: 42633 - protein, 60 aa, Escherichia coli
MGKATYTVTVTNNSNGVSVDYETETPMTLLVPEVAAEVIKDLVNTVRSYDTENEHDVCGW

SEQ ID NO: 42634 - protein, 119 aa, Escherichia coli
MLQIPQNYIHTRSTPFWNKQTAPAGIFERHLDKGTRPGVYPRLSVMHGAVKYLGYADEHSAEPDQVILIEAGQFAVFPPEKWHNIEAMTDDTYFNIDFFVAPEVLMEGAQQRKVIHNGK

SEQ ID NO: 42635 - protein, 427 aa, Escherichia coli
MADTKAKLTLNGDTAVELDVLKGTLGQDVIDIRTLGSKGVFTFDPGFTSTASCESKITFIDGDEGILLHRGFPIDQLATDSNYLEVCYILLNGEKPTQEQYDEFKTTVTRHTMIHEQITRLFHAFRRDSHPMAVMCGITGALAAFYHDSLDVNNPRHREIAAFRLLSKMPTMAAMCYKYSIGQPFVYPRNDLSYAGNFLNMMFSTPCEPYEVNPILERAMDRILILHADHEQNASTSTVRTAGSSGANPFACIAAGIASLWGPAHGGANEAALKMLEEISSVKHIPEFVRRAKDKNDSFRLMGFGHRVYKNYDPRATVMRETCHEVLKELGTKDDLLEVAMELENIALNDPYFIEKKLYPNVDFYSGIILKAMGIPSSMFTVIFAMARTVGWIAHWSEMHSDGMKIARPRQLYTGYEKRDFKSDIKR

SEQ ID NO: 42636 - protein, 400 aa, Escherichia coli [sequence omitted]

SEQ ID NO: 42637 - protein, 555 aa, Escherichia coli
MAQFVYTMHRVGKVVPPKRHILKNISLSFFPGAKIGVLGLNGAGKSTLLRIMAGIDKDIEGEARPQPDIKIGYLPQEPQLNPEHTVRESIEEAVSEVVNALKRLDEVYALYADPDADFDKLAAEQGRLEEIIQAHDGHNLNVQLERAADALRLPDWDAKIANLSGGERRRVALCRLLLEKPDMLLLDEPTNHLDAESVAWLERFLHDFEGTVVAITHDRYFLDNVAGWILELDRGEGIPWEGNYSSWLEQKDQRLAQEASQEAARRKSIEKELEWVRQGTKGRQSKGKARLARFEELNSTEYQKRNETNELFIPPGPRLGDKVLEVSNLRKSYGDRLLIDDLSFSIPKGAIVGIIGPNGAGKSTLFRMISGQEQPDSGTITLGETVKLASVDQFRDSMDNSKTVWEEVSGGLDIMKIGNTEMPSRAYVGRFNFKGVDQGKRVGELSGGERGRLHLAKLLQVGGNMLLLDEPTNDLDIETLRALENALLEFPGCAMVISHDRWFLDRIATHILDYQDEGKVEFFEGNFTEYEEYKKRTLGADALEPKRIKYKRIAK

SEQ ID NO: 42638 - protein, 173 aa, Escherichia coli
MSKPKYPFEKRLEVVNHYFTTDDGYRIISARFGVPRTQVRTWVALYEKHGEKGLIPKPKGVSADPELRIKVVKAVIEQHMSLNQAAAHFMLAGSGSVARWLKVYEERGEAGLRALKIGTKRNIAISVDPEKAASALELSKDRRIEDLERQVRFLETRLMYLKKLKALAHPTKK

SEQ ID NO: 42639 - protein, 70 aa, Escherichia coli
MSGKMTGIVKWFNADKGFGFITPDDGSKDVFVHFSAIQNDGYKSLDEGQKVSFTIESGAKGPAAGNVTSL

SEQ ID NO: 42640 - protein, 180 aa, Escherichia coli
MKGGKRVQTARPNRINGEIRAQEVRLTGLEGEQLGIVSLREALEKAEEAGVDLVEISPNAEPPVCRIMDYGKFLYEKSKSSKEQKKKQKVIQVKEIKFRPGTDEGDYQVKLRSLIRFLEEGDKAKITLRFRGREMAHQQIGMEVLNRVKDDLQELAVVESFPTKIEGRQMIMVLAPKKKQ

SEQ ID NO: 42641 - protein, 307 aa, Escherichia coli [sequence omitted]

SEQ ID NO: 42642 - protein, 320 aa, Escherichia coli
MMIKTRFSRWLTFFTFAAAVALALPAKANTWPLPPAGSRLVGENKFHVVENDGGSLEAIAKKYNVGFLALLQANPGVDPYVPRAGSVLTIPLQTLLPDAPREGIVINIAELRLYYYPPGKNSVTVYPIGIGQLGGDTLTPTMVTTVSDKRANPTWTPTANIRARYKAQGIELPAVVPAGLDNPMGHHAIRLAAYGGVYLLHGTNADFGIGMRVSSGCIRLRDDDIKTLFSQVTPGTKVNIINTPIKVSAEPNGARLVEVHQPLSEKIDDDPQLLPITLNSAMQSFKDAAQTDAEVMQHVMDVRSGMPVDVRRHQVSPQTL

SEQ ID NO: 42643 - protein, 177 aa, Escherichia coli [sequence omitted]

SEQ ID NO: 42644 - protein, 316 aa, Escherichia coli
MSKLDTFIQHAVNAVPVSGTSLISSLYGDSLSHRGGEIWLGSLAALLEGLGFGERFVRTALFRLNKEGWLDVSRIGRRSFYSLSDKGLRLTRRAESKIYRAEQPAWDGKWLLLLSEGLDKSTLADVKKQLIWQGFGALAPSLMASPSQKLADVQTLLHEAGVADNVICFEAQIPLALSRAALRARVEECWHLTEQNAMYETFIQSFRPLVPLLKEAADELTPERAFHIQLLLIHFYRRVVLKDPLLPEELLPAHWAGHTARQLCINIYQRVAPAALAFVSEKGETSVGELPAPGSLYFQRFGGLNIEQEALCQFIR

SEQ ID NO: 42645 - protein, 450 aa, Escherichia coli
MTKHYDYIAIGGGSGGIASINRAAMYGQKCALIEAKELGGTCVNVGCVPKKVMWHAAQIREAIHMYGPDYGFDTTINKFNWETLIASRTAYIDRIHTSYENVLGKNNVDVIKGFARFVDAKTLEVNGETITADHILIATGGRPSHPDIPGVEYGIDSDGFFALPALPERVAVVGAGYIAVELAGVINGLGAKTHLFVRKHAPLRSFDPMISETLVEVMNAEGPQLHTNAIPKAVVKNTDGSLTLELEDGRSETVDCLIWAIGREPANDNINLEAAGVKTNEKGYIVVDKYQNTNIEGIYAVGDNTGAVELTPVAVAAGRRLSERLFNNKPDEHLDYSNIPTVVFSHPPIGTVGLTEPQAREQYGDDQVKVYKSSFTAMYTAVTTHRQPCRMKLVCVGSEEKIVGIHGIGFGMDEMLQGFAVALKMGATKKDFDNTVAIHPTAAEEFVTMR

SEQ ID NO: 42646 - protein, 865 aa, Escherichia coli
MTIEYTKNYHHLTRIATFCALLYCNTAFSAELVEYDHTFLMGQNASNIDLSRYSEGNPAIPGVYDVSVYVNDQPIINQSITFVAIEGKKNAQACITLKNLLQFHINSPDINNEKAVLLARDETLGNCLNLTEIIPQASVRYDVNDQRLDIDVPQAWVMKNYQNYVDPSLWENGINAAMLSYNLNGYHSETPGRKNESIYAAFNGGMNLGAWRLRASGNYNWMTDSGSNYDFKNRYVQRDIASLRSQLILGESYTTGETFDSVSIRGIRLYSDSRMLPPTLASFAPIIHGVANTNAKVTITQGGYKIYETTVPPGAFVIDDLSPSGYGSDLIVTIEESDGSKRTFSQPFSSVVQMLRPGVGRWDISGGQVLKDDIQDEPNLFQASYYYGLNNYLTGYTGIQITDNNYTAGLLGLGLNTSVGAFSFDVTHSNVRIPDDKTYQGQSYRVSWNKLFEETSTSLNIAAYRYSTQNYLGLNDALTLIDEVKHPEQDLEPKSMRNYSRMKNQVTVSINQPLKFEKKDYGSFYLSGSWSDYWASGQNRSNYSIGYSNSTSWGSYSVSAQRSWNEDGDTDDSVYLSFTIPIEKLLGTEQRTSGFQSIDTQISSDFKGNNQLNVSSSGYSDNARVSYSVNTGYTMNKASKDLSYVGGYASYESPWGTLAGSISANSDNSRQVSLSTDGGFVLHSGGLTFSNDSFSDSDTLAVVQAPGAQGARINYGNSTIDRWGYGVTSALSPYHENRIALDINDLENDVELKSTSAVAVPRQGSVVFADFETVQGQSAIMNITRSDGKNIPFAADIYDEQGNVIGNVGQGGQAFVRGIEQQGNISIKWLEQSKPVSCLAHYQQSPEAEKIAQSIILNGIRCQIQ

SEQ ID NO: 42647 - protein, 867 aa, Escherichia coli
MKIPTTTDIPQRYTWCLAGICYSSLAILPSFLSYAESYFNPAFLLENGTSVADLSRFERGNHQPAGVYRVDLWRNDEFIGSQDIVFESTTENTGDKSGGLMPCFNQVLLERIGLNSSAFPELAQQQNNKCINLLKAVPDATINFDFAAMRLNITIPQIALLSSAHGYIPPEEWDEGIPALLLNYNFTGNRGNGNDSYFFSELSGINIGPWRLRNNGSWNYFRGNGYHSEQWNNIGTWVQRAIIPLKSELVMGDGNTGSDIFDGVGFRGVRLYSSDNMYPDSQQGFAPTVRGIARTAAQLTIRQNGFIIYQSYVSPGAFEITDLHPTSSNGDLDVTIDERDGNQQNYTIPYSTVPILQREGRFKFDLTAGDFRSGNSQQSSPFFFQGTALGGLPQEFTAYGGTQLSANYTAFLLGLGRNLGNWGAVSLDVTHARSQLADASRHEGDSIRFLYAKSMNTFGTNFQLMGYRYSTQGFYTLDDVAYRRMEGYEYDYDGEHRDEPIIVNYHNLRFSRKDRLQLNVSQSLNDFGSLYISGTHQKYWNTSDSDTWYQVGYTSSWVGISYSLSFSWNESVGIPDNERIVGLNVSVPFNVLTKRRYTRENALDRAYASFNANRNSNGQNSWLAGVGGTLLEGHNLSYHVSQGDTSNNGYTGSATANWQAAYGTLGGGYNYDRDQHDVNWQLSGGVVGHENGITLSQPLGDTNVLIKAPGAGGVRIENQTGILTDWRGYAVMLYATVYRYNRIALDTNTMGNSIDVEKNISSVVPTQGALVRANFDTRIGVRALITVTQGGKPVPFGSLVRENSTGITSMVGDDGQVYLSGAPLSGELLVQWGDGANSRCIAHYVLPKQSLQQAVTVISAVCTHPGS

SEQ ID NO: 42648 - protein, 365 aa, Escherichia coli
MFEINPVNNRIQDLTERSDVLRGYLDYDAKKERLEEVNAELEQPDVWNEPERAQALGKERSSLEAVVDTLDQMKQGLEDVSGLLELAVEADDEETFNEAVAELDALEEKLAQLEFRRMFSGEYDSADCYLDIQAGSGGTEAQDWASMLERMYLRWAESRGFKTEIIEESEGEVAGIKSVTIKISGDYAYGWLRTETGVHRLVRKSPFDSGGRRHTSFSSAFVYPEVDDDIDIEINPADLRIDVYRTSGAGGQHVNRTESAVRITHIPTGIVTQCQNDRSQHKNKDQAMKQMKAKLYELEMQKKNAEKQAMEDNKSDIGWGSQIRSYVLDDSRIKDLRTGVETRNTQAVLDGSLDQFIEASLKAGL

SEQ ID NO: 42649 - protein, 577 aa, Escherichia coli
MKQQIQLRRREVDETADLPAELPPLLRRLYASRGVRSAQELERSVKGMLPWQQLSGVEKAVEILYNAFREGTRIIVVGDFDADGATSTALSVLAMRSLGCSNIDYLVPNRFEDGYGLSPEVVDQAHARGAQLIVTVDNGISSHAGVEHARSLGIPVIVTDHHLPGDTLPAAEAIINPNLRDCNFPSKSLAGVGVAFYLMLALRTFLRDQGWFDERNIAIPNLAELLDLVALGTVADVVPLDANNRILTWQGMSRIRAGKCRPGIKALLEVANRDAQKLAASDLGFALGPRLNAAGRLDDMSVGVALLLCDNIGEARVLANELDALNQTRKEIEQGMQIEALTLCEKLERSRDTLPGGLAMYHPEWHQGVVGILASRIKERFHRPVIAFAPAGDGTLKGSGRSIQGLHMRDALERLDTLYPGMMLKFGGHAMAAGLSLEEDKFKLFQQRFGELVTEWLDPSLLQGEVVSDGPLSPAEMTMEVAQLLRDAGPWGQMFPEPLFDGHFRLLQQRLVGERHLKVMVEPVGGGPLLDGIAFNVDTALWPDNGVREVQLAYKLDINEFRGNRSLQIIIDNIWPI

SEQ ID NO: 42650 - protein, 400 aa, Escherichia coli
MRILHTSDWHLGQNFYSKSREAEHQAFLDWLLETAQTHQVDAIIVAGDVFDTGSPPSYARTLYNRFVVNLQQTGCHLVVLAGNHDSVATLNESRDIMAFLNTTVVASAGHAPQILPRRDGTPGAVLCPIPFLRPRDIITSQAGLNGIEKQQHLLAAITDYYQQHYADACKLRGDQPLPIIATGHLTTVGASKSDAVRDIYIGTLDAFPAQNFPPADYIALGHIHRAQIIGGMEHVRYCGSPIPLSFDECGKSKYVHLVTFSNGKLESVENLNVPVTQPMAVLKGDLASITAQLEQWRDVSQEPPVWLDIEITTDEYLHDIQRKIQALTESLPVEVLLVRRSREQRERVLASQQRETLSELSVEEVFNRRLALEELDESQQQRLQHLFTTTLHTLAGEHEA

SEQ ID NO: 42651 - protein, 452 aa, Escherichia coli
MKRLSITVRLTLLFILLLSVAGAGIVWTLYNGLASELKWRDDTTLINRTAQIKQLLIDGVNPDTLPVYFNRMMDVSQDILIIHGDSINKIVNRTNVSDGMLNNIPASETISAAGIYRSIINDTEIDALRINIDEVSPSLTVTVAKLASARHNMLEQYKINSIIICIVAIVLCSVLSPLLIRTGLREIKKLSGVTEALNYNDSREPVEVSALPRELKPLGQALNKMHHALVKDFERLSQFADDLAHELRTPINALLGQNQVTLSQTRSIAEYQKTIAGNIEELENISRLTENILFLARADKNNVLVKLDSLSLNKEVENLLDYLEYLSDEKEICFKVECNQQIFADKILLQRMLSNLIVNAIRYSPEKSRIHITSFLDTNSYLNIDIASPGTKINEPEKLFRRFWRGDNSRHSVGQGLGLSLVKAIAELHGGSATYHYLNKHNVFRITLPQRN

SEQ ID NO: 42652 - protein, 55 aa, Escherichia coli
MNKFIKVALVGAVLATLTACTGHIENRDKNCSYDYLLHPAISISKIIGGCGPTAQ

SEQ ID NO: 42653 - protein, 462 aa, Escherichia coli
MTANSPLQRIGQEKGIAMGSQELQRKLGFWAVLAIAVGTTVGSGIFVSVGEVAKAAGTPWLTVLAFVIGGLIVIPQMCVYAELSTAYPENGADYVYLKNAGSRPLAFLSGWASFWANDAPSLSIMALAIVSNLGFLTPIDPLLGKFIAAGLIIAFMLLHLRSVEGGAAFQTLITIAKIIPFTIVIGLGIFWFKAENFAAPTTTAIGATGSFMALLAGISATSWSYTGMASICYMTGEIKNPGKTMPRALIGSCLLVLVLYTLLALVISGLMPFDKLANSETPISDALTWIPALGSTAGIFVAITAMIVILGSLSSCVMYQPRLEYAMAKDNLFFKCFGHVHPKYNTPDVSIILQGALGIFFIFVSDLTSLLGYFTLVMCFKNTLTFGSIIWCRKRDDYKPLWRTPAFGLMTTLAIASSLILVASTFVWAPIPGLICAVIVIATGLPAYAFWAKRSRQLNALS

SEQ ID NO: 42654 - protein, 65 aa, Escherichia coli [sequence omitted]

SEQ ID NO: 42655 - protein, 673 aa, Escherichia coli
MRLNPGQQQAVEFVTGPCLVLAGAGSGKTRVITNKIAHLIRGCGYQARHIAAVTFTNKAAREMKERVGQTLGRKEARGLMISTFHTLGLDIIKREYAALGMKANFSLFDDTDQLALLKELTEGLIEDDKVLLQQLISTISNWKNDLKTPSQAAASAIGERDRIFAHCYGLYDAHLKACNVLDFDDLILLPTLLLQANEEVRKRWQNKIRYLLVDEYQDTNTSQYELVKLLVGSRARFTVVGDDDQSIYSWRGARPQNLVLLSQDFPALKVIKLEQNYRSSGRILKAANILIANNPHVFEKRLFSELGYGAELKVLSANNEEHEAERVTGELIAHHFVNKTQYKDYAILYRGNHQSRVFEKFLMQNRIPYKISGGTSFFSRPEIKDLLAYLRVLTNPDDDSAFLRIVNTPKREIGPATLKKLGEWAMTRNKSMFTASFDMGLSQTLSGRGYEALTRFTHWLAEIQRLAEREPIAAVRDLIHGMDYESWLYETSPSPKAAEMRMKNVNQLFSWMTEMLEGSELDEPMTLTQVVTRFTLRDMMERGESEEELDQVQLMTLHASKGLEFPYVYMVGMEEGFLPHQSSIDEDNIDEERRLAYVGITRAQKELTFTLCKERRQYGELVRPEPSRFLLELPQDDLIWEQERKVVSAEERMQKGQSHLANLKAMMAAKRGK

SEQ ID NO: 42656 - protein, 403 aa, Escherichia coli
MMVTVVSNYCQLSQTQLSQTFAEKFTVTEELLQSLKKTALSGDEESIELLHNIALGYDKFGKEAEDILYHIVRTPTNETLSIIRLIKNACLKLYNLAHIATNSPLKSHDSDDLLFKKLFSPSKLMTIIGDEIPLISEKQSLSKVLLNDENNELSDGTNFWDKNRQLTTDEIACYLQKIAANAKNTQVNYPTGLYVPYSTRTHLEDALNENIKSDPSWPNEVQLFPINTGGHWILVSLQKIVNKKNNKLQIKCVIFNSLRALGYDKENSLKRVINSFNSELMGEMSNNNIKVHLNEPEIIFLHADLQQYLSQSCGAFVCMAAQEVIEQRESNSDSAPYTLLKNHADRFKKYSAEEQYEIDFQHRLANRNCYLDKYGDANINHYYRNLEIKHSQPKNRASGKRVS

SEQ ID NO: 42657 - protein, 201 aa, Escherichia coli [sequence omitted]

SEQ ID NO: 42658 - protein, 209 aa, Escherichia coli [sequence omitted]

SEQ ID NO: 42659 - protein, 127 aa, Escherichia coli
MRDIQMVLERWGAWAANNHEDVTWSSIAAGFKGLITSKVKSRPQCCDDDAMIICGCMARLKKNNSDLHDLLVDYYVVGMTFMSLAGKHCCSDGYIGKRLQKAEGIIEGMLMALDIRLEMDIVVNNSN

SEQ ID NO: 42660 - protein, 117 aa, Escherichia coli [sequence omitted]

SEQ ID NO: 42661 - protein, 396 aa, Escherichia coli
MKIKTGARILALSALTTMMFSASALAKIEEGKLVIWINGDKGYNGLAEVGKKFEKDTGIKVTVEHPDKLEEKFPQVAATGDGPDIIFWAHDRFGGYAQSGLLAEITPDKAFQDKLYPFTWDAVRYNGKLIAYPIAVEALSLIYNKDLLPNPPKTWEEIPALDKELKAKGKSALMFNLQEPYFTWPLIAADGGYAFKYENGKYDIKDVGVDNAGAKAGLTFLVDLIKNKHMNADTDYSIAEAAFNKGETAMTINGPWAWSNIDTSKVNYGVTVLPTFKGQPSKPFVGVLSAGINAASPNKELAKEFLENYLLTDEGLEAVNKDKPLGAVALKSYEEELAKDPRIAATMENAQKGEIMPNIPQMSAFWYAVRTAVINAASGRQTVDEALKDAQTRITK

SEQ ID NO: 42662 - protein, 110 aa, Escherichia coli [sequence omitted]

SEQ ID NO: 42663 - protein, 510 aa, Escherichia coli
MATIDSMNKDTTRLSDGPDWTFDLLDVYLAEIDRVAKLYRLDTYPHQIEVITSEQMMDAYSSVGMPINYPHWSFGKKFIETERLYKHGQQGLAYEIVINSNPCIAYLMEENTITMQALVMAHACYGHNSFFKNNYLFRSWTDASSIVDYLIFARKYITECEERYGVDEVERLLDSCHALMNYGVDRYKRPQKISLQEEKARQKSREEYLQSQVNMLWRTLPKREEEKTVAEARRYPSEPQENLLYFMEKNAPLLESWQREILRIVRKVSQYFYPQKQTQVMNEGWATFWHYTILNHLYDEGKVTERFMLEFLHSHTNVVFQPPYNSPWYSGINPYALGFAMFQDIKRICQSPTEEDKYWFPDIAGSDWLETLHFAMRDFKDESFISQFLSPKVMRDFRFFTVLDDDRHNYLEISAIHNEEGYREIRNRLSSQYNLSNLEPNIQIWNVDLRGDRSLTLRYIPHNRAPLDRGRKEVLKHVHRLWGFDVMLEQQNEDGSIELLERCPPRMGNL

SEQ ID NO: 42664 - protein, 79 aa, Escherichia coli
MDVQQFFVVAVFFLIPIFCFREAWKGWRAGAIDKRVKNAPEPVYVWRAKNPGLFFAYMVAYIGFGILSIGMIVYLIFYR

SEQ ID NO: 42665 - protein, 144 aa, Escherichia coli [sequence omitted]

SEQ ID NO: 42666 - protein, 243 aa, Escherichia coli
MKMLRDPLFWLIALFVALIFWLPYSQPLFAALFPQLPRPVYQQESFAALALAHFWLVGISSLFAVIIGTGAGIAVTRPWGAEFRPLVETIAAVGQTFPPVAVLAIAVPVIGFGLQPAIIALILYGVLPVLQATLAGLGAIDASVTEVAKGMGMSRGQRVRKVELPLAAPVILAGVRTSVIINIGTATIASTVGASTLGTPIIIGLSGFNTAYVIQGALLVALAAIIADRLFERLVQALSQHAK

SEQ ID NO: 42667 - protein, 168 aa, Escherichia coli
MNSVITQKVSSGVTLYADTKTGGFMNRTILVPIDISDSELTQRVISHVEEEAKIDDAEVHFLTVIPSLPYYASLGLAYSAELPAMDDLKAEAKSQLEEIIKKFKLPTDRVHVHVEEGSPKDRILELAKKIPAHMIIIASHRPDITTYLLGSNAAAVVRHAECSVLVVR

SEQ ID NO: 42668 - protein, 377 aa, Escherichia coli
MKSKVLALLIPALLAAGAAHAAEVYNKDGNKLDLYGKVDGLHYFSDNSAKDGDQSYARLGFKGETQINDQLTGYGQWEYNIQANNTESSKNQSWTRLAFAGLKFADYGSFDYGRNYGVMYDIEGWTDMLPEFGGDSYTNADNFMTGRANGVATYRNTDFFGLVNGLNFAVQYQGNNEGASNGQEGTNNGRDVRHENGDGWGLSTTYDLGMGFSAGAAYTSSDRTNDQVNHTAAGGDKADAWTAGLKYDANNIYLATMYSETRNMTPFGDSDYAVANKTQNFEVTAQYQFDFGLRPAVSFLMSKGRDLHAAGGADNPAGVDDKDLVKYADIGATYYFNKNMSTYVDYKINLLDEDDSFYAANGISTDDIVALGLVYQF

SEQ ID NO: 42669 - protein, 392 aa, Escherichia coli
MSHDPQPLGGKIISKPVMIFGPLIVICMLLIVKRLVFGLGSVSDLNGGFPWGVWIAFDLLIGTGFACGGWALAWAVYVFNRGQYHPLVRPALLASLFGYSLGGLSITIDVGRYWNLPYFYIPGHFNVNSVLFETAVCMTIYIGVMALEFAPALFERLGWKVSLQRLNKVMFFIIALGALLPTMHQSSMGSLMISAGYKVHPLWQSYEMLPLFSLLTAFIMGFSIVIFEGSLVQAGLRGNGPDEKSLFVKLTNTISVLLAIFIVLRFGELIYRDKLSLAFAGDFYSVMFWIEVLLMLFPLVVLRVAKLRNDSRMLFLSALSALLGCATWRLTYSLVAFNPGGGYAYFPTWEELLISIGFVAIEICAYIVLIRLLPILPPLKQNDHNRHEASKA

SEQ ID NO: 42670 - protein, 567 aa, Escherichia coli
MSQRITIDPVTRIEGHLRIDCEIENGVVSKAWASGTMWRGMEEIVKNRDPRDAWMIVQRICGVCTTTHALSSVRAAESALNIDVPVNAQYIRNIILAAHTTHDHIVHFYQLSALDWVDITSALQADPTKASEMLKGVSTWHLNSPEEFTKVQNKIKDLVASGQLGIFANGYWGHPAMKLPPEVNLIAVAHYLQALECQRDANRVVALLGGKTPHIQNLAVGGVANPINLDGLGVLNLERLMYIKSFIDKLSDFVEQVYKVDTAVIAAFYPEWLTRGKGAVNYLSVPEFPTDSKNGSFLFPGGYIENADLSSYRPITSHSDEYLIKGIQESAKHSWYKDEAPQAPWEGTTIPAYDGWSDDGKYSWVKSPTFYGKTVEVGPLANMLVKLAAGRESTQNKLNEIVAIYQKLTGNTLEVAQLHSTLGRIIGRTVHCCELQDILQNQYSALITNIGKGDHTTFVKPNIPATGEFKGVGFLEAPRGMLSHWMVIKDGIISNYQAVVPSTWNSGPRNFNDDVGPYEQSLVGTPVADPNKPLEVVRTIHSFDPCMACAVHVVDADGNEVVSVKVL

SEQ ID NO: 42671 - protein, 425 aa, Escherichia coli
MLRLPNIYFKGYIRITQETNMATAWYKQVNPPQRKALFSAWLGYVFDGFDFMMIFYILHIIKADLGITDIQATLIGTVAFIARPIGGGFFGAMADKYGRKPMMMWAIFIYSVGTGLSGIATNLYMLAVCRFIVGLGMSGEYACASTYAVESWPKNLQSKASAFLVSGFSVGNIIAAQIIPQFAEVYGWRNSFFIGLLPVLLVLWIRKSAPESQEWIEDKYKDKSTFLSVFRKPHLSISMIVFLVCFCLFGANWPINGLLPSYLADNGVNTVVISTLMTIAGLGTLTGTIFFGFVGDKIGVKKAFVVGLITSFIFLCPLFFISVKNSSLIGLCLFGLMFTNLGIAGLVPKFIYDYFPTKLRGLGTGLIYNLGATGGMAAPVLATYISGYYGLGVSLFIVTVAFSALLILLVGFDIPGKIYKLSVAK

SEQ ID NO: 42672 - protein, 567 aa, Escherichia coli
MAFVSEREIVRKIFSKKIDFTILAFFYISSIFFLLCSGVLFQYFTAAFTKGNCYECSMKLDYIKQFYFSLETAWYLISAVAVFIASVFIQHRIKAYLTLLAITWIVLTITDVALIHALDNIAMNNILLNILYNLFGAILLSLFMCLSNSLLFHLNKIKHIPMILSAMIPLVSAIIIAILITAVIYLLFARQAVEIEMDISEGSDIAYVGVKDNEESFGFLNDKKTDTPTYLDVIKNGSLIYNDTQGLSGADIYIVSGCYALPDLLRNVPLDAKKSFLNVKKLEITQKLPMMGFIQGESADVMPKAASRLSLSKQDDKFMLASSVTDSQIKFKSNNAQLMVAFAFMPITTNGILHDYTYDIIINDKKYKIENHVAPLSRLDKNKKMKCEYQQISDLTNTYNINANYLTGFLLVLKPDDIINYNNSPSVLLKTDFAFYKKTYQKLDKIYDDISNGKLSSLRATGISQFSINGKHLSLRPESEIIISEGSLYGLVNKSKKIKIYGTADLVFVDNKIMNLRKITYLQSKLEIFGSSIMDILKYIFGLGLLAISIKFIHSYFKNDVNENLFL

SEQ ID NO: 42673 - protein, 82 aa, Escherichia coli [sequence omitted]

SEQ ID NO: 42674 - protein, 292 aa, Escherichia coli
MKLGFIGLGIMGTPMAINLARAGHQLHVTTIGPVADELLSLGAVSVETARQVTEASDIIFIMVPDTPQVEEVLFGENGCTKASLKGKTIVDMSSISPIETKRFARQVNELGGDYLDAPVSGGEIGAREGTLSIMVGGDEAVFERVKPLFELLGKNITLVGGNGDGQTCKVANQIIVALNIEAVSEALLFASKAGADPVRVRQALMGGFASSRILEVHGERMIKRTFNPGFKIALHQKDLNLALQSAKALALNLPNTATCQELFNTCAANGGSQLDHSALVQALELMANHKLA

SEQ ID NO: 42675 - protein, 92 aa, Escherichia coli
MNRPAILKKKAAKDVASVLKIIFLFYLFLIARLKQRYSIREIKRDLWNIRENYSSNAAIAKIYCRKRKASGPGKHLTILPYGWVRFITFPIM

SEQ ID NO: 42676 - protein, 253 aa, Escherichia coli
MRICSDQPCIVLLTEKDVWIRVNGKEPISLKANHMALLNCENNIIDVSSLNNTLVAHISHDIIKDYLRFLNKDLSQIPVWQRSATPILTLPCLTPDVFRVAAQHSMMPAETESEKERTRALLFTVLSRFLDSKKFVSLMMYMLRNCVSDSVYQIIESDIHKDWNLSMVASCLCLSPSLLKKKLKSENTSYSQIITTCRMRYAVNELMMDGKNISQVSQSCGYNSTSYFISVFKDFYGMTPLHYVSQHRERTVA

SEQ ID NO: 42677 - protein, 101 aa, Escherichia coli
MAKQSMKAREVKRVALADKYFAKRAELKAIISDVNASDEDRWNAVLKLQTLPRDSSPSRQRNRCRQTGRPHGFLRKFGLSRIKVREAAMRGEIPGLKKASW

SEQ ID NO: 42678 - protein, 179 aa, Escherichia coli [sequence omitted]

SEQ ID NO: 42679 - protein, 127 aa, Escherichia coli [sequence omitted]

SEQ ID NO: 42680 - protein, 138 aa, Escherichia coli
MIAFEVLKWAGAAYLIWLGIQQWRAAGAIDLKSLASTQSRRHLFQRAVFVNLTNPKSIVFLAALFPQFIMPQQPQLMQYIVLGVTTIVVDIIVMIGYATLAQRIALWIKGPKQMKALNKIFGSLFMLVGALLASARHA

SEQ ID NO: 42681 - protein, 1025 aa, Escherichia coli
MKFFALFIYRPVATILLSVAITLCGILGFRMLPVAPLPQVDFPVIIVSASLPGASPETMASSVATPLERSLGRIAGVSEMTSSSSLGSTRIILQFDFDRDINGAARDVQAAINAAQSLLPSGMPSRPTYRKANPSDAPIMILTLTSDTYSQGELYDFASTQLAPTISQIDGVGDVDVGGSSLPAVRVGLNPQALFNQGVSLDDVRTAVSNANVRKPQGALEDGTHRWQIQTNDELKTAAEYQPLIIHYNNGGAVRLGDVATVTDSVQDVRNAGMTNAKPAILLMIRKLPEANIIQTVDSIRAKLPELQETIPAAIDLQIAQDRSPTIRASLEEVEQTLIISVALVILVVFLFLRSGRATIIPAVSVPVSLIGTFAAMYLCGFSLNNLSLMALTIATGFVVDDAIVVLENIARHLEAGMKPLQAALQGTREVGFTVLSMSLSLVAVFLPLLLMGGLPGRLLREFAVTLSVAIGISLLVSLTLTPMMCGWMLKASKPREQKRLRGFGRMLVALQQGYGKSLKWVLNHTRLVGVVLLGTIALNIWLYISIPKTFFPEQDTGVLMGGIQADQSISFQAMRGKLQDFMKIIRDDPAVDNVTGFTGGSRVNSGMMFITLKPRDERSETAQQIIDRLRVKLAKEPGANLFLMAVQDIRVGGRQSNASYQYTLLSDDLAALREWEPKIRKKLATLPELADVNSDQQDNGAEMNLVYDRDTMARLGIDVQAANSLLNNAFGQRQISTIYQPMNQYKVVMEVDPRYTQDISALEKMFVINNEGKAIPLSYFAKWQPANAPLSVNHQGLSAASTISFNLPTGKSLSDASAAIDRAMTQLGVPSTVRGSFAGTAQVFQETMNSQVILIIAAIATVYIVLGILYESYVHPLTILSTLPSAGVGALLALELFNAPFSLIALIGIMLLIGIVKKNAIMMVDFALEAQRHGNLTPQEAIFQACLLRFRPIMMTTLAALFGALPLVLSGGDGSELRQPLGITIVGGLVMSQLLTLYTTPVVYLFFDRLRLRFSRKPKQTVTE

SEQ ID NO: 42682 - protein, 343 aa, Escherichia coli
MQVKTQSCVVAGKKTVAVTEQTIDWNNNGTLVQITRGGICGSDLHYYQEGKVGNFMIKAPMVLGHEVIGKVIHSDSSELHEGQTVAINPSKPCGHCKYCIEHNENQCTDMRFFGSAMYFPHVDGGFTRYKMVETSQCVPYPAKADEKVMAFAEPLAVAIHAAHQAGELQGKRVFISGVGPIGCLIVSAVKTLGAAEIVCADVSPRSLSLGKEMGADVLVNPQNDDMDHWKAEKGYFDVSFEVSGHPSSVNTCLEVTRARGVMVQVGMGGAMAEFPMMTLIGKEISLRGSFRFTSEFNTAVSWLANGVINPLPLLSAEYPFTDLEEALRFAGDKTQAAKVQLVF

SEQ ID NO: 42683 - protein, 494 aa, Escherichia coli
MVAIHLLPVSYNSATSTVNISARIIPLLIIHQRYKIPMPKVQADGLPLPQRYGAILTIVIGISMAVLDGAIANVALPTIATDLHATPASSIWVVNAYQIAIVISLLSFSFLGDMFGYRRIYKCGLVVFLLSSLFCALSDSLQMLTLARVIQGFGGAALMSVNTALIRLIYPQRFLGRGMGINSFIVAVSSAAGPTIAAAILSIASWKWLFLINVPLGIIALLLAMRFLPPNGSRASKPRFDLPSAVMNALTFGLLITALSGFAQGQSLTLIAAELVVMVVVGIFFIRRQLSLPVPLLPVDLLRIPLFSLSICTSVCSFCAQMLAMVSLPFYLQTVLGRSEVETGLLLTPWPLATMVMAPLAGYLIERVHAGLLGALGLFIMAAGLFSLVLLPASPADINIIWPMILCGAGFGLFQSPNNHTIITSAPRERSGGASGMLGTARLLGQSSGAALVALMLNQFGDNGTHVSLMAAAILAVIAACVSGLRITQPRSRA

SEQ ID NO: 42684 - protein, 464 aa, Escherichia coli
MSAGKLPEGWVIAPVSTVTTLIRGVTYKKEQAINYLKDDYLPLIRANNIQNGKFDTTDLVFVPKNLVKESQKISPEDIVIAMSSGSKSVVGKSAHQHLPFECSFGAFCGVLRPEKLIFSGFIAHFTKSSLYRNKISSLSAGANINNIKPASFDLINIPIPPLAEQKIIAEKLDTLLAQVDSTKARFEQIPQILKRFRQAVLGGAVNGKLTEKWRNFEPQHSVFKKLNFESILTELRNGLSSKPNESGVGHPILRISSVRAGHVDQNDIRFLECSESELNRHKLQDGDLLFTRYNGSLEFVGVCGLLKKLQHQNLLYPDKLIRARLTKDALPEYIEIFFSSPSARNAMMNCVKTTSGQKGISGKDIKSQVVLLPPVKEQAEIVRRVEQLFAYADTIEKQVNNALARVNNLTQSILAKAFRGELTAQWRAENPDLISGENSAAALLEKIKAERAASGGKKASRKKS

SEQ ID NO: 42685 - protein, 92 aa, Escherichia coli
MPRSLKKGPFIDLHLLKKVEKAVESGDKKPLRTWSRRSTIFPNMIGLTIAVHNGRQHVPVFVTDEMVGHKLGEFAPTRTYRGHAADKKAKKK

SEQ ID NO: 42686 - protein, 587 aa, Escherichia coli
MQWQTKLPLIAILRGITPDEALAHVGAVIDAGFDAVEIPLNSPQWEQSIPAIVDAYGDKALIGAGTVLKPEQVDALARMGCQLIVTPNIHSEVIRRAVGYGMTVCPGCATATEAFTALEAGAAGAENISVIGFWSAIHQSVKSGIAIGHRSLCRWRRDAENLAQWIDAGCAGAGLGSDLYRAGQSVERTAQQAAAFVKAYREAGAMKITKITTYRLPPRWMFLKIETDEGVVGWGEPVIEGRARTVEAAVHELGDYLIGQDPSRINDLWQVMYRAGFYRGGPILMSAIAGIDQALWDIKGKVLNAPVWQLMGGLVRDKIKAYSWVGGDRPADVIDGIKTLREIGFDTFKLNGCEELGLIDNSRAVDAAVNTVAQIREAFGNQIEFGLDFHGRVSAPMAKVLIKELEPYRPLFIEEPVLAEQAEYYPKLAAQTHIPLAAGERMFSRFDFKRVLEAGGISILQPDLSHAGGITECYKIAGMAEAYDVTLAPHCPLGPIALAACLHIDFVSYNAVLQEQSMGIHYNKGAELLDFVKNKEDFSMVGGFFKPLTKPGLGVEIDEAKVIEFSKNAPDWRNPLWRHEDNSVAEW

SEQ ID NO: 42687 - protein, 46 aa, Escherichia coli [sequence omitted]

SEQ ID NO: 42688 - protein, 119 aa, Escherichia coli
MVKLAFPRELRLLTPSQFTFVFQQPQRAGTPQITILGRLNSLGHPRIGLTVAKKNVRRAHERNRIKRLTRESFRLRQHELPAMDFVVVAKKGVADLDNRALSEALEKLWRRHCRLARGS

SEQ ID NO: 42689 - protein, 591 aa, Escherichia coli
MIEKLRNIAIIAHVDHGKTTLVDKLLQQSGTFDSRAETQERVMDSNDLEKERGITILAKNTAIKWNDYRINIVDTPGHADFGGEVERVMSMVDSVLLVVDAFDGPMPQTRFVTKKAFAYGLKPIVVINKVDRPGARPDWVVDQVFDLFVNLDATDEQLDFPIVYASALNGIAGLDHEDMAEDMTPLYQAIVDHVPAPDVDLDGPFQMQISQLDYNSYVGVIGIGRIKRGKVKPNQQVTIIDSEGKTRNAKVGKVLGHLGLERIETDLAEAGDIVAITGLGELNISDTVCDTQNVEALPALSVDEPTVSMFFCVNTSPFCGKEGKFVTSRQILDRLNKELVHNVALRVEETEDADAFRVSGRGELHLSVLIENMRREGFELAVSRPKVIFREIDGRKQEPYENVTLDVEEQHQGSVMQALGERKGDLKNMNPDGKGRVRLDYVIPSRGLIGFRSEFMTMTSGTGLLYSTFSHYDDVRPGEVGQRQNGVLISNGQGKAVAFALFGLQDRGKLFLGHGAEVYEGQIIGIHSRSNDLTVNCLTGKKLTNMRASGTDEAVVLVPPIRMTLEQALEFIDDDELVEVTPTSIRIRKRH

SEQ ID NO: 42690 - protein, 329 aa, Escherichia coli [sequence omitted]

SEQ ID NO: 42691 - protein, 134 aa, Escherichia coli
MFMTWEYALIGLVVGIIIGAVAMRFGNRKLRQQQALQYELEKNKAELDEYREELVSHFARSAELLDTMAHDYRQLYQHMAKSSSSLLPELSAEANPFRNRLAESEASNDQAPVQMPRDYSEGASGLLRTGAKRD

SEQ ID NO: 42692 - protein, 86 aa, Escherichia coli
MSLKRMVNLTTRCPQWGRNNPAILTAAPFRGVPQPEAHVRRNLTTSLLRERASPYAFALCTDFSGKYPFSKLSVPDSYPCPAHDHT

SEQ ID NO: 42693 - protein, 1160 aa, Escherichia coli
MSEPRFVHLRVHSDYSMIDGLAKTAPLVKKAAALGMPALAITDFTNLCGLVKFYGAGHGAGIKPIVGADFNVQCDLLGDELTHLTVLAANNTGYQNLTLLISKAYQRGYGAAGPIIDRDWLIELNEGLILLSGGRMGDVGRSLLRGNSALVDECVAFYEEHFPDRYFLELIRTGRPDEESYLHAAVELAEARGLPVVATNDVRFIDSSDFDAHEIRVAIHDGFTLDDPKRPRNYSPQQYMRSEEEMCELFADIPEALANTVEIAKRCNVTVRLGEYFLPQFPTGDMSTEDYLVKRAKEGLEERLAFLFPDEEERLKRRPEYDERLETELQVINQMGFPGYFLIVMEFIQWSKDNGVPVGPGRGSGAGSLVAYALKITDLDPLEFDLLFERFLNPERVSMPDFDVDFCMEKRDQVIEHVADMYGRDAVSQIITFGTMAAKAVIRDVGRVLGHPYGFVDRISKLIPPDPGMTLAKAFEAEPQLPEIYEADEEVKALIDMARKLEGVTRNAGKHAGGVVIAPTKITDFAPLYCDEEGKHPVTQFDKSDVEYAGLVKFDFLGLRTLTIINWALEMINKRRAKNGEPPLDIAAIPLDDKKSFDMLQRSETTAVFQLESRGMKDLIKRLQPDCFEDMIALVALFRPGPLQSGMVDNFIDRKHGREEISYPDVQWQHESLKPVLEPTYGIILYQEQVMQIAQVLSGYTLGGADMLRRAMGKKKPEEMAKQRSVFAEGAEKNGINAELAMKIFDLVEKFAGYGFNKSHSAAYALVSYQTLWLKAHYPAEFMAAVMTADMDNTEKVVGLVDECWRMGLKILPPDINSGLYHFHVNDDGEIVYGIGAIKGVGEGPIEAIIEARNKGGYFRELFDLCARTDTKKLNRRVLEKLIMSGAFDRLGPHRAALMNSLGDALKAADQHAKAEAIGQADMFGVLAEEPEQIEQSYASCQPWPEQVVLDGERETLGLYLTGHPINQYLKEIERYVGGVRLKDMHPTERGKVITAAGLVVAARVMVTKRGNRIGICTLDDRSGRLEVMLFTDALDKYQQLLEKDRILIVSGQVSFDDFSGGLKMTAREVMDIDEAREKYARGLAISLTDRQIDDQLLNRLRQSLEPHRSGTIPVHLYYQRADARARLRFGATWRVSPSDRLLNDLRGLIGSEQVELEFD

SEQ ID NO: 42694 - protein, 84 aa, Escherichia coli
MTDKIRTLQGRVVSDKMEKSIVVAIERFVKHPIYGKFIKRTTKLHVHDENNECGIGDVVEIRECRPLSKTKSWTLVRVVEKAVL

SEQ ID NO: 42695 - protein, 63 aa, Escherichia coli [sequence omitted]

SEQ ID NO: 42696 - protein, 95 aa, Escherichia coli
MLHTLHRSPWLTDFAALLRLLSEGDELLLLQDGVTAAVDGNRYLESLRNAPIKVYALNEDLIARGLTGQISNDIILIDYTDFVRLTVKHPSQMAW

SEQ ID NO: 42697 - protein, 101 aa, Escherichia coli
MSLKRMVNLTTRCPQRGKNNPAILTAAPFRGLPQPEAHGRIKFNDGSKGEGLRRALSCYALTFQGYILSVNCQCRILICVRRTTTRSSVLVSIFNSALNGG

SEQ ID NO: 42698 - protein, 471 aa, Escherichia coli
MQSPSDAIFCRHLSLQYALDSLRNGKGKVNLIKHYSSVESIQQHVPLVRDAEFRALLRHPPAGSRVIASKDFGFALDIFFCRMMANNVSHMSAILYIDNHTLSVRLRIKQSVYGQLNYVVSVYDPNDTNVAVRDTHRTARGFLSLDKFISSGPDAQTWADRYVRNCAIAILPLLPVGVPGAIFAGIASRMPFAPIHPSAMLLIMATGQSQQLITLFKQLPILPEKEIIEIITAQNSVGTPALFLAMMNGHTDNVKIFMQEIQSLVDNHIIHEDNLVKLLQTKSANETPGLYISMLYGFDEIIDIFLNALTTPIAQELLNKKLVMSILAMKIHDGEPGLYAAMENNHPLCVTRFLSKINGIAFKYKLSKANIMDLLKGATAQGTPALYIAMSKGNEDVVLSYISTLGAFAKKHSFSQHQLFTLLAAKNHDNMSAVHIAIHHKHYKTVETYYAAINAISQSLSFSADEIKTYL

SEQ ID NO: 42699 - protein, 167 aa, Escherichia coli
MAHIEKQAGELQEKLIAVNRVSKTVKGGRIFSFTALTVVGDGNGRVGFGYGKAREVPAAIQKAMEKARRNMINVALNNGTLQHPVKGVHTGSRVFMQPASEGTGIIAGGAMRAVLEVAGVHNVLAKAYGSTNPINVVRATIDGLENMNSPEMVAAKRGKSVEEILGK

SEQ ID NO: 42700 - protein, 239 aa, Escherichia coli
MNVNFFVTCIGDALKSRMARDSVLLLEKLGCRVNFPEKQGCCGQPAINSGYIKEAIPGMKNLIAALEDNDDPIISPAGSCTYAVKSYPTYLADEPEWASRAAKVAARMQDLTSFIVNKLGVVDVGASLQGRAVYHPSCSLARKLGVKDEPLTLLKNVRGLELLTFAEQDTCCGFGGTFSVKMAEISGEMVKEKVAHLMEVRPEYLIGADVSCLLNISGRLQREGQKVKVMHIAEVLMSR

SEQ ID NO: 42701 - protein, 433 aa, Escherichia coli
MLCSGYLGHDMEDDCDIIIIGAGIAGTACALRCARAGLSVLLLERAEIPGSKNLSGGRLYTHALAELLPQFHLTAPLERRITHESLSLLTPDGVTTFSSLQPGGESWSVLRARFDPWLVAEAEKEGVECIPGATVDALYEENGRVCGVICGDDILRARYVVLAEGANSVLAERHGLVTRPAGEAMALGIKEVLSLETSAIEERFHLENNEGAALLFSGRICDDLPGGAFLYTNQQTLSLGIVCPLSSLTQSRVPASELLTRFKAHPAVRPLIKNTESLEYGAHLVPEGGLHSMPVQYAGNGWLLVGDALRSCVNTGISVRGMDMALTGAQAAAQTLISACQHREPQNLFPLYHHNVERSLLWDVLQRYQHVPALLQRPGWYRTWPALMQDISRDLWDQGDKPVPPLRQLFWHHLRRHGLWHLAGDVIRSLRCL

SEQ ID NO: 42702 - protein, 121 aa, Escherichia coli
MMSTTLFKDFTFEAAHRLPHVPEGHKCGRLHGHSFMVRLEITGEVDPHTGWIIDFAELKAAFKPTYERLDHHYLNDIPGLENPTSEVLAKWIWDQVKPVVPLLSAVMVKETCTAGCIYRGE

SEQ ID NO: 42703 - protein, 319 aa, Escherichia coli
MRVLIVKTSSMGDVLHTLPALTDAQQAIPGIKFDWVVEEGFAQIPSWHAAVERVIPVAIRRWRKAWFSAPIKAERKAFREALQAENYDAVIDAQGLVKSAALVTRLAHGVKHGMDWQTAREPLASLFYNRKHHIAKQQHAVERTRELFAKSLGYSKPQTQGDYAIAQHFLTNLPTDAGEYAVFLHATTRDDKHWPEEHWRELIGLLADSGIRIKLPWGAPHEEERAKRLAEGFAYVEVLPKMSLEGVARVLAGAKFVVSVDTGLSHLTAALDRPNITVYGPTDPGLIGGYGKNQMVCRAPRENLINLNSQAVLEKLSSL

SEQ ID NO: 42704 - protein, 455 aa, Escherichia coli
MKKQTQLLSALALSVGLTLSASFQAVASIPGQVADQAPLPSLAPMLEKVLPAVVSVRVEGTASQGQKIPEEFKKFFGDDLPDQPAQPFEGLGSGVIINASKGYVLTNNHVINQAQKISIQLNDGREFDAKLIGSDDQSDIALLQIQNPSKLTQIAIADSDKLRVGDFAVAVGNPFGLGQTATSGIVSALGRSGLNLEGLENFIQTDASINRGNSGGALLNLNGELIGINTAILAPGGGSVGIGFAIPSNMARTLAQQLIDFGEIKRGLLGIKGTEMSADIAKAFNLDVQRGAFVSEVLPGSGSAKAGVKAGDIITSLNGKPLNSFAELRSRIATTEPGTKVKLGLLRNGKPLEVEVTLDTSTSSSASAEMITPALEGATLSDGQLKDGGKGIKIDEVVKGSPAAQAGLQKDDVIIGVNRDRVNSIAEMRKVLAAKPAIIALQIVRGNESIYLLMR

SEQ ID NO: 42705 - protein, 390 aa, Escherichia coli
MSEIAMHVTAKPSSFQCNLKCDYCFYLEKESQFTHEKWMDDSTLKEFIKQYIAASGNQVYFTWQGGEPTLAGLDFFRKVIHYQQRYAGQKRIFNALQTNGILLNNEWCAFLKEHEFLVGISIDGPQELHDRYRRSNSGNGTFAKVIAAIERLKSYQVEFNTLTVINNVNVHYPLEVYHFLKSIGSKHMQFIELLETGTPNIDFSGHSENTFRIIDFSVPPTAYGKFMSTIFMQWVKNDVGEIFIRQFESFVSRFLGNGHTSCIFQESCKDNLVVESNGDIYECDHFVYPQYKIGNINKSELKTMNSVQLTAQKKRIPAKCQQCAYKPICNGGCPKHRITKVNNETVSYFCEGYKILFSTMVPYMNAMVELAKNRVPLYHIMDVAKQMENN

SEQ ID NO: 42706 - protein, 266 aa, Escherichia coli
MAKSLFRALVALSFLAPLWLNAAPRVITLSPANTELAFAAGITPVGVSSYSDYPPQAQKIEQVSTWQGMNLERIVALKPDLVIAWRGGNAERQVDQLASLGIKVMWVDATSIEQIANALRQLAPWSPQPDKAEQAAQSLLDQYAQLKAQYADKPKKRVFLQFGINPPFTSGKESIQNQVLEVCGGENIFKDSRVPWPQVSREQVLARSPQAIVITGGPDQIPKIKQYWGEQLKIPVIPLTSDWFERASPRIILAAQQLCNALSQVD

SEQ ID NO: 42707 - protein, 274 aa, Escherichia coli
MTEFTTLLQQGNAWFFIPSAILLGALHGLEPGHSKTMMAAFIIAIKGTIKQAVMLGLAATISHTAVVWLIAFGGMVISKRFTAQSAEPWLQLISAVIIISTAFWMFWRTWRGERNWLENMHGHDYEHHHHDHEHHHDHGHHHHHEHGEYQDAHARAHANDIKRRFDGREVTNWQILLFGLTGGLIPCPAAITVLLICIQLKALTLGATLVVSFSIGLALTLVTVGVGAAISVQQVAKRWSGFNTLAKRAPYFSSLLIGLVGVYMGVHGFMGIMR

SEQ ID NO: 42708 - protein, 396 aa, Escherichia coli
MNDTSFENCIKCTVCTTACPVSRVNPGYPGPKQAGPDGERLRLKDGALYDEALKYCINCKRCEVACPSDVKIGDIIQRARAKYDTTRPSLRNFVLSHTDLMGSVSTPFAPIVNTATSLKPVRQLLDAALKIDHRRTLPKYSFGTFRRWYRSVAAQQAQYKDQVAFFHGCFVNYNHPQLGKDLIKVLNAMGTGVQLLSKEKCCGVPLIANGFTDKARKQAITNVESIREAVGVKGIPVIATSSTCTFALRDEYPEVLNVDNKGLRDHIELATRWLWRKLDEGKTLPLKPLPLKVVYHTPCHMEKMGWTLYTLELLRNIPGLELTVLDSQCCGIAGTYGFKKENYPTSQAIGAPLFRQIEESGADLVVTDCETCKWQIEMSTSLRCEHPITLLAQALA

SEQ ID NO: 42709 - protein, 548 aa, Escherichia coli
MDSQRNLLVIALLFVSFMIWQAWEQDKNPQPQAQQTTQTTTTAAGSAADQGVPASGQGKLISVKTDVLDLTINTRGGDVEQALLPAYPKELNSTQPFQLLETSPQFIYQAQSGLTGRDGPDNPANGPRPLYNVEKDAYVLAEGQNELQVPMTYTDAAGNTFTKTFVLKRGDYAVNVNYNVQNAGEKPLEISSFGQLKQSITLPPHLDTGSSNFALHTFRGAAYSTPDEKYEKYKFDTIADNENLNISSKGGWVAMLQQYFATAWIPHNDGTNNFYTANLGNGIAAIGYKSQPVLVQPGQTGAMNSTLWVGPEIQDKMAAVAPHLDLTVDYGWLWFISQPLFKLLKWIHSFVGNWGFSIIIITFIVRGIMYPLTKAQYTSMAKMRMLQPKIQAMRERLGDDKQRISQEMMALYKAEKVNPLGGCFPLLIQMPIFLALYYMLMGSVELRQAPFALWIHDLSAQDPYYILPILMGVTMFFIQKMSPTTVTDPMQQKIMTFMPVIFTVFFLWFPSGLVLYYIVSNLVTIIQQQLIYRGLEKRGLHSREKKKS

SEQ ID NO: 42710 - protein, 302 aa, Escherichia coli
MQLRKPATAILALALSAGLAQADDAAPAAGSTLDKIAKNGVIVVGHRESSVPFSYYDNQQKVVGYSQDYSNAIVEAVKKKLNKPDLQVKLIPITSQNRIPLLQNGTFDFECGSTTNNVERQKQAAFSDTIFVVGTRLLTKKGGDIKDFANLKDKAVVVTSGTTSEVLLNKLNEEQKMNMRIISAKDHGDSFRTLESGRAVAFMMDDALLAGERAKAKKPDNWEIVGKPQSQEAYGCMLRKDDPQFKKLMDDTIAQVQTSGEAEKWFDKWFKNPIPPKNLNMNFELSDEMKALFKEPNDKALN

SEQ ID NO: 42711 - protein, 328 aa, Escherichia coli
MNNSAFTFQTLHPDTIMDALFEHGIRVDSGLTPLNSYENRVYQFQDEDRRRFVVKFYRPERWTADQILEEHQFALQLVNDEVPVAAPVAFNGQTLLNHQGFYFAVFPSVGGRQFEADNIDQMEAVGRYLGRMHQTGRKQLFIHRPTIGLNEYLIEPRKLFEDATLIPSGLKAAFLKATDELIAAVTAHWREDFTVLRLHGDCHAGNILWRDGPMFVDLDDARNGPAVQDLWMLLNGDKAEQRMQLETIIEAYEEFSEFDTAEIGLIEPLRAMRLVYYLAWLMRRWADPAFPKNFPWLTGEDYWLRQTATFIEQAKVLQEPPLQLTPMY

SEQ ID NO: 42712 - protein, 251 aa, Escherichia coli
MTEAQRHQILLEMLAQLGFVTVEKVVERLGISPATARRDINKLDESGKLKKVRNGAEAITQQRPRWTPMNLHQAQNHDEKVRIAKAASQLVNPGESVVINCGSTAFLLGREMCGKPVQIITNYLPLANYLIDQEHDSVIIMGGQYNKSQSITLSPQGSENSLYAGHWMFTSGKGLTAEGLYKTDMLTAMAEQKMLSVVGKLVVLVDSSKIGERAGMLFSRADQIDMLITGKNANPEILQQLEAQGVSILRV

SEQ ID NO: 42713 - protein, 123 aa, Escherichia coli [sequence omitted]

SEQ ID NO: 42714 - protein, 437 aa, Escherichia coli
MVGGFFILGLSTFSIMLAIILSAFFIAAVMVLNGAAGSKYGVPFAMILRASYGVRGALFPGLLRGGIAAIMWFGLQCYAGSLACLILIGKIWPGFLTLGGDFTLLGLSLPGLITFLIFWLVNVGIGFGGGKVLNKFTAILNPCIYIVFGGMAIWAISLVGIGPIFDYIPSGIQKAENGGFLFLVVINAVVAVWAAPAVSASDFTQNAHSFREQALGQTLGLVVAYILFAVAGVCIIAGASIHYGADTWNVLDIVQRWDSLFASFFAVLVILMTTISTNATGNIIPAGYQIAAIAPTKLTYKNGVLIASIISLLICPWKLMENQDSIYLFLDIIGGMLGPVIGVMMAHYFVVMRGQINLDELYTAPGDYKYYDNGFNLTAFSVTLVAVILSLGGKFIHFMEPLSRVSWFVGVIVAFAAYALLKKRTTAEKTGEQKTIG

SEQ ID NO: 42715 - protein, 391 aa, Escherichia coli
MQKLINSVQNYAWGSKTALTELYGMENPSSQPMAELWMGAHPKSSSRVQNAAGDIVSLRDVIESDKSTLLGEAVAKRFGELPFLFKVLCAAQPLSIQVHPNKHNSEIGFAKENAAGIPMDAAERNYKDPNHKPELVFALTPFLAMNAFREFSEIVSLLQPVAGAHPAIAHFLQQPDAERLSELFASLLNMQGEEKSRALAILKSALDSQQGEPWQTIRLISEFYPEDSGLFSPLLLNVVKLNPGEAMFLFAETPHAYLQGVALEVMANSDNVLRAGLTPKYIDIPELVANVKFEAKPANQLLTQPVKQGAELDFPIPVDDFAFSLHDLSDKETTISQQSAAILFCVEGDATLWKGSQQLQLKPGESAFIAANESPVTVKGHGRLARVYNKL

SEQ ID NO: 42716 - protein, 104 aa, Escherichia coli [sequence omitted]

SEQ ID NO: 42717 - protein, 552 aa, Escherichia coli
MILERVEIVGFRGINRLSLMLEQNNVLIGENAWGKSSLLDALTLLLSPESDLYHFERDDFWFPPGDINGREHHLHIILTFRESLPGRHRVRRYRPLEACWTPCTDGYHRIFYRLEGESAEDGSVMTLRSFLDKDGHPIDVEDINDQARHLVRLMPVLRLRDARFMRRIRNGTVPNVPNVEVTARQLDFLARELSSHPQNLSDGQIRQGLSAMVQLLEHYFSEQGAGQARYRLMRRRASNEQRSWRYLDIINRMIDRPGGRSYRVILLGLFATLLQAKGTLRLDKDARPLLLIEDPETRLHPIMLSVAWHLLNLLPLQRIATTNSGELLSLTPVEHVCRLVRESSRVAAWRLGPSGLSTEDSRRISFHIRFNRPSSLFARCWLLVEGETETWVINELARQCGHHFDAEGIKVIEFAQSGLKPLVKFARRMGIEWHVLVDGDEAGKKYAATVRSLLNNDREAEREHLTALPALDMEHFMYRQGFSDVFHRMAQIPENVPMNLRKIISKAIHRSSKPDLAIEVAMEAGRRGVDSVPTLLKKMFSRVLWLARGRAD

SEQ ID NO: 42718 - protein, 352 aa, Escherichia coli
MLELNFSQTLGNHCLTINETLPANGITAIFGVSGAGKTSLINAISGLTRPQKGRIVLNGRVLNDAEKGICLTPEKRRVGYVFQDARLFPHYKVRGNLRYGMSKSMVDQFDKLVALLGIEPLLDRLPGSLSGGEKQRVAIGRALLTAPELLLLDEPLASLDIPRKRELLPYLQRLTREINIPMLYVSHSLDEILHLADRVMVLENGQVKAFGALEEVWGSSVMNPWLPKEQQSSILKVTVLEHHPHYAMTALALGDQHLWVNKLDEPLQAALRIRIQASDVSLVLQPPQQTSIRNVLRAKVVNSYDDNGQVEVELEVGGKTLWARISPWARDELAIKPGLWLYAQIKSVSITA

SEQ ID NO: 42719 - protein, 156 aa, Escherichia coli
MKTQRGYTLIETLVAMLILVMLSASGLYGWQYWQQSQRLWQTASQARDYLLYLREDANWHNRDHSISVIREGTLWCLVSSAAGANTCHGSSPLVFVPRWPEVEMSDLTPSLAFFGLRNTAWAGHIRFKNSTGEWWLVVSPWGRLRLCQQGETEGCL

SEQ ID NO: 42720 - protein, 442 aa, Escherichia coli
MKKIECACNFLMDKDAQGYIDLSDLDLTSCHFKGDVISKVSFLSSNLQHVTFECKEIGDCNFTTAIVDNVIFRCRRLHNVIFIKASGECVDFSKNILDTVDFSQSQLGHSNFRECQIRNSNFDNCYLYASHFTRAEFLSAKEISFIKSNLTAVMFDYVRMSTGNFKDCITEQLELTIDYSDIFWNEDLDGYINNIIKMIDTLPDNAMILKSVLAVKLVMQLKILNIVNKNFIENMKKIFSHCPYIKDPIIRSYIHSDEDNKFDDFMRQHRFSEVNFDTQQMIDFINRFNTNKWLIDKNNNFFIQLIDQALRSTDDMIKANVWHLYKEWIRSDDVSPIFIETEDNLRTFNTNELTRNDNIFILFSSVDDGPVMVVSSQRLHDMLNPTKDTNWNSTYIYKSRHEMLPVNLTQETLFSSKSHGKYALFPIFTASWRAHRIMNKGV

SEQ ID NO: 42721 - protein, 428 aa, Escherichia coli
MKTSLFKSLYFQVLTAIAIGILLGHFYPEIGEQMKPLGDGFVKLIKMIIAPVIFCTVVTGIAGMESMKAVGRTGAVALLYFEIVSTIALIIGLIIVNVVQPGAGMNVDPATLDAKAVAVYADQAKDQGIVAFIMDVIPASVIGAFASGNILQVLLFAVLFGFALHRLGSKGQLIFNVIESFSQVIFGIINMIMRLAPIGAFGAMAFTIGKYGVGTLVQLGQLIICFYITCILFVVLVLGSIAKATGFSIFKFIRYIREELLIVLGTSSSESALPRMLDKMEKLGCRKSVVGLVIPTGYSFNLDGTSIYLTMAAVFIAQATNSQMDIVHQITLLIVLLLSSKGAAGVTGSGFIVLAATLSAVGHLPVAGLALILGIDRFMSEARALTNLVGNGVATIVVAKWVKELDHKKLDDVLNNRAPDGKTHELSS

SEQ ID NO: 42722 - protein, 396 aa, Escherichia coli
MTTRQHSSFAIVFILGLLAMLMPLSIDMYLPALPVISAQFGVPAGSTQMTLSTYILGFALGQLIYGPMADSFGRKPVVLGGTLVFAAAAVACALANTIDQLIVMRFFHGLAAAAASVVINALMRDIYPKEEFSRMMSFVMLVTTIAPLMAPIVGGWVLVWLSWHYIFWILALAAILASAMIFFLIKETLPPERRQPFHIRTTIGNFAALFRHKRVLSYMLASGFSFAGMFSFLSAGPFVYIEINHVAPENFGYYFALNIVFLFVMTIFNSRFVRRIGALNMFRSGLWIQFIMAAWMVISALLGLGFWSLVVGVAAFVGCVSMVSSNAMAVILDEFPHMAGTASSLAGTFRFGIGAIVGALLSLATFNSAWPMIWSIAFCATSSILFCLYASRPKKR

SEQ ID NO: 42723 - protein, 79 aa, Escherichia coli
MENLNMDLLYMAAAVMMGLAAIGAAIGIGILGGKFLEGAARQPDLIPLLRTQFFIVMGLVDAIPMIAVGLGLYVMFAVA

SEQ ID NO: 42724 - protein, 271 aa, Escherichia coli
MASENMTPQDYIGHHLNNLQLDLRTFSLVDPQNPPATFWTINIDSMFFSVVLGLLFLVLFRSVAKKATSGVPGKFQTAIELVIGFVNGSVKDMYHGKSKLIAPLALTIFVWVFLMNLMDLLPIDLLPYIAEHVLGLPALRVVPSADVNVTLSMALGVFILILFYSIKMKGIGGFTKELTLQPFNHWAFIPVNLILEGVSLLSKPVSLGLRLFGNMYAGELIFILIAGLLPWWSQWILNVPWAIFHILIITLQAFIFMVLTIVYLSMASEEH

SEQ ID NO: 42725 - protein, 287 aa, Escherichia coli
MIRSMTAYARREIKGEWGSATWEMRSVNQRYLETYFRLPEQFRSLEPVVRERIRSRLTRGKVECTLRYEPDVSAQGELILNEKLAKQLVTAANWVKMQSDEGEINPVDILRWPGVMAAQEQDLDAIAAEILAALDGTLDDFIVARETEGQALKALIEQRLEGVTAEVVKVRSHMPEILQWQRERLVAKLEDAQVQLENNRLEQELVLLAQRIDVAEELDRLEAHVKETYNILKKKEAVGRRLDFMMQEFNRESNTLASKSINAEVTNSAIELKVLIEQMREQIQNIE

SEQ ID NO: 42726 - protein, 648 aa, Escherichia coli
MNILGFFQRLGRALQLPIAVLPVAALLLRFGQPDLLNVAFIAQAGGAIFDNLALIFAIGVASSWSKDSAGAAALAGAVGYFVLTKAMVTINPEINMGVLAGIITGLVGGAAYNRWSDIKLPDFLSFFGGKRFVPIATGFFCLVLAAIFGYVWPPVQHAIHAGGEWIVSAGALGSGIFGFINRLLIPTGLHQVLNTIAWFQIGEFTNAAGTVFHGDINRFYAGDGTAGMFMSGFFPIMMFGLPGAALAMYFAAPKERRPMVGGMLLSVAVTAFLTGVTEPLEFLFMFLAPLLYLLHALLTGISLFVATLLGIHAGFSFSAGAIDYALMYNLPAASQNVWMLLVMGVIFFAIYFVVFSLVIRMFNLKTPGREDKEDEIVTEEANSNTEEGLTQLATNYIAAVGGTDNLKAIDACITRLRLTVADSARVNDTMCKRLGASGVVKLNKQTIQVIVGAKAESIGDAMKKVVARGPVAAASAEATPATAAPVAKPQAVPNAVSIAELVSPITGDVVALDQVPDEAFASKAVGDGVAVKPTDKIVVSPAAGTIVKIFNTNHAFCLETEKGAEIVVHMGIDTVALEGKGFKRLVEEGAQVSAGQPILEMDLDYLNANARSMISPVVCSNIDDFSGLIIKAQGHIVAGQTPLYEIKK

SEQ ID NO: 42727 - protein, 163 aa, Escherichia coli
MSTETIEIFNNSDEWANQLKHALSKGENLALLHGLTPDILDRIYAYAFDYHEKGNITDAEIYYKFLCIYAFENHEYLKDFASVCQPKKKYQQAYDLYKLSYNYFPYDDYSVIYRMGQCQIGAKNIDNAMQCFYHIINNCEDDSVKSKAQAYIELLNDNSEDNG

SEQ ID NO: 42728 - protein, 104 aa, Escherichia coli
MIRKAFVMQVNPDAHEEYQRRHNPIWPELEAVLKSHGAHNYAIYLDKARNLLFAMVEIESEERWNAVASTDVCQRWWKYMTDVMPANPDNSPVSSELQEVFYLP

SEQ ID NO: 42729 - protein, 1342 aa, Escherichia coli [sequence omitted]

SEQ ID NO: 42730 - protein, 167 aa, Escherichia coli
MPGNRPHYGRWPQHDFPPFKKLRPQSVTSRIQPGSDVIVCAEMDEQWGYVGAKSRQRWLFYAYDRLRKTVVAHVFGERTMATLGRLMSLLSPFDVVIWMTDGWPLYESRLKGKLHVISKRYTQRIERHNLNLRQHLARLGRKSLSFSKSVEQHDKVIGHYLNIKHYQ

SEQ ID NO: 42731 - protein, 1377 aa, Escherichia coli
MSGKPAARQGDMTQYGGSIVQGSAGVRIGAPTGVACSVCPGGVTSGHPVNPLLGAKVLPGETDIALPGPLPFILSRTYSSYRTKTPAPVGSLGPGWKMPADIRLQLRDNTLILSDNGGRSLYFEHLFPGEDGYSRSESLWLVRGGVAKLDEGHRLAALWQALPEELRLSPHRYLATNSPQGPWWLLGWCERVPEADEVLPAPLPPYRVLTGLVDRFGRTQTFHREAAGEFSGEITGVTDGAWRHFRLVLTTQAQRAEEARQQAISGGTEPSAFPDTLPGYTEYGRDNGIRLSAVWLTHDPEYPENLPAAPLVRYGWTPRGELAVVYDRSGKQVRSFTYDDKYRGRMVAHRHTGRPEIRYRYDSDGRVTEQLNPAGLSYTYQYEKDRITITDSLDRREVLHTQGEAGLKRVVKKEHADGSVTQSQFDAVGRLRAQTDAAGRTTEYSPDVVTGLITRITTPDGRASAFYYNHHNQLTSATGPDGLELRREYDELGRLIQETAPDGDITRYRYDNPHSDLPCATEDATGSRKTMTWSRYGQLLSFTDCSGYVTRYDHDRFGQMTAVHREEGLSQYRAYDSRGQLIAVKDTQGHETRYEYNIAGDLTAVIAPDGSRNGTQYDAWGKAVRTTQGGLTRSMEYDAAGRVIRLTSENGSHTTFRYDVLDRLIQETGFDGRTQRYHHDLTGKLIRSEDEGLVTHWHYDEADRLTHRTVKGETAERWQYDERGWLTDISHISEGHRVAVHYRYDEKGRLTGERQTVHHPQTEALLWQHETRHAYNAQGLANRCIPDSLPAVEWLTYGSGYLAGMKLGDTPLVEYTRDRLHRETLRSFGRYELTTAYTPAGQLQSQHLNSLLSDRDYTWNDNGELIRISSPRQTRSYSYSTTGRLTGVHTTAANLDIRIPYATDPAGNRLPDPELHPDSTLSMWPDNRIARDAHYLYRYDRHGRLTEKTDLIPEGVIRTDDERTHRYHYDSQHRLVHYTRTQYEEPLVESRYLYDPLGRRVAKRVWRRERDLTGWMSLSRKPQVTWYGWDGDRLTTIQNDRTRIQTIYQPGSFTPLIRVETATGELAKTQRRSLADALQQSGGEDGGSVVFPPVLVQMLDRLESEILADRVSEESRRWLASCGLTVEQMQNQMDPVYTPARKIHLYHCDHRGLPLALISKEGTTEWCAEYDEWGNLLNEENPHQLQQLIRLPGQQYDEESGLYYNRHRYYDPLQGRYITQDPIGLKGGWNFYQYPLNPVTNTDPLGLEVFPRPFPLPIPWPKSPAQQQADDNAAKALTKWWNDTASQRIFDSLILNNPGLALDITMIASRGNVADTGITDRVNDIINDRFWSDGKKPDRCDVLQELIDCGDISAKDAKSTQKAWNCRHSRQSNDKKR

SEQ ID NO: 42732 - protein, 148 aa, Escherichia coli
MKPRNINNSLPLQPLVPDQENKNKKNEEKSVNPVKITMGSGLNYIEQESLGGKYLTHDLSIKIADISEEIIQQAILSAMSIYKFSITDDLMSMAVNELIKLTKIENNVDLNKFTTICTDVLSPRVTRHNKEKNKRHSTLLKNPLFNFH

SEQ ID NO: 42733 - protein, 114 aa, Escherichia coli
MILDRHITSRGYVCMRPATIAPLTPYDKWDGEKWVTDTEAQHSVAVDAAEAQRQSLIDTAMASISLIQLKLQAGRKLMQAETSRLNTVLDYIDAVTATDTSTAPDVIWPELPEE

SEQ ID NO: 42734 - protein, 466 aa, Escherichia coli
MNSEGGKPGNVLTVNGNYTGNNGLMTFNATLGGDNSPTDKMNVKGDTQGNTRVRVDNIGGVGAQTVNGIELIEVGGNSAGNFALTTGTVEAGAYVYTLAKGKGNDEKNWYLTSKWDGVTPADTPDPINNPPVVDPEGPSVYRPEAGSYISNIAAANSLFSHRLHDRLGEPQYTDSLHSQGSASSMWMRHVGGHERSRAGDGQLNTQANRYVLQLGGDLAQWSSNAQDRWHLGVMAGYANQHSNTQSNRVGYKSDGRISGYSAGLYATWYQNDANKTGAYVDSWALYNWFDNSVSSDNRSADDYDSRGVTASVEGGYTFEAGTFSGSEGTLNTWYVQPQAQITWMGVKDSDHTRKDGTRIETEGDGNVQTRLGVKTYLNSHHQRDDGKQREFQPYIEANWINNSKVYAVKMNGQTVGREGARNLGEVRTGVEAKVNNNLSLWGNVGVQLGDKGYSDTQGMLGVKYSW

SEQ ID NO: 42735 - protein, 439 aa, Escherichia coli
MMSGEHTLKAVRGSFIDVTRTIDNPEEIASALRFIEDGLLLIKQGKVEWFGEWENGKHQIPDTIRVRDYRGKLIVPGFVDTHIHYPQSEMVGAYGEQLLEWLNKHTFPTERRYEDLEYAREMSAFFIKQLLRNGTTTALVFGTVHPQSVDALFEAASHINMRMIAGKVMMDRNAPDYLLDTAESSYHQSKELIERWHKNGRLLYAITPRFAPTSSPEQMAMAQRLKEEYPDTWVHTHLCENKDEIAWVKSLYPDHDGYLDVYHQYGLTGKNCVFAHCVHLEEKEWDRLSETKSSIAFCPTSNLYLGSGLFNLKKAWQKKVKVGMGTDIGAGTTFNMLQTLNEAYKVLQLQGYRLSAYEAFYLATLGGAKSLGLDDLIGNFLPGKEADFVVMEPTATPLQQLRYDNSVSLVDKLFVMMTLGDDRSIYRTYVDGRLVYERN

SEQ ID NO: 42736 - protein, 412 aa, Escherichia coli
MKTIFRYILFLALYSCCNTVSAYTSFIVGNNAGVDNYRGPSTAAQMTFNYTSTASNLVFYKPTQLGPTGVKMYWSYLDTGTGGGILYCNTSGRANPGPITIENAMVYSGKDYGGHKLFNTSVPGLYYTMLISRVWSAYDTITDIQSPGIYIGDPSNQEFFFSVTDSDLQTKGCNKADDYDKFWAIGGIVHNITVEFYTDTNFDPTLNQQVQLSSSSNYLYSFKAYSPGTKVVDHSNHIYVNFTLNNVKLTLPTCFTSILTGPSVNGSTVRMGEYSSGTIKNGASPVPFDISLQNCIRVRNIETKLVTGKVGTQNTQLLGNTLTGSTAAKGVGVLIEGLATSKNPLMTLKPNDTNSVYIDYETEDDTSDGVYPNQGNGTSQPLHFQATLKQDGNIAIEPGEFKATSTFQVTYP

SEQ ID NO: 42737 - protein, 198 aa, Escherichia coli
MHPTQRKLMKRIILFLSLLFCIACPAIAGQDIDLVANVKNSTCKSGISNQGNIDLGVVGVGYFSGNVTPESYQPGGKEFTITVSDCALQGTGDVLNQLHIDFRALSGVMAAGSRQIFANEISSGASNVGVVIFSTQDSANTFNVLNASGGSRSVYPVMSDDMNGSSWKFSTRMQKIDPALSVTSGQLMSHVLVDIYYE

SEQ ID NO: 42738 - protein, 246 aa, Escherichia coli
MFFNTKHTTALCFVTCMAFSSSSIADIVISGTRVIYKSDQKSVNVRLENKGNNPLLVQSWLDTGDDNAEPGSITVPFTATPPVSRIDAKRGQTIKLMYTASTSLPKDRESVFWFNVLEVPPKPDAEKVANQSLLQLAFRTRIKLFYRPDGLKGNPSEAPLALKWFWSGSEGKASLRVTNPTPYYVSFSSGDLEASGKRYPIDVKMIAPFSDEVMKVNGLNGKANSAKVHFYAINDFGGAIEGNARL

SEQ ID NO: 42739 - protein, 118 aa, Escherichia coli [sequence omitted]

SEQ ID NO: 42740 - protein, 352 aa, Escherichia coli
MLPSISINNTSAAYPESINENNNDEVNGLVQEFKNLFNGKEGISTCIKHLLELIKNAIRVNDDPYRFNINNSSVTYIDIDSNDTDHITIGIDNQEPIELPANYKDKELVRTIINDNIVEKTHDINNKEMIFSALKEIYDGDPGFIFDKISHKLRHTVTEFDESGKSEPTDLFTWYGKDKKGDSLAIVIKNKNGNDYLSLGYYDQDDYHIQRGIRINGDSLTQYCSENARSASAWFESSKAIMAESFATGSDHQVVNELNGERLREPNDVFKRYGRAIRYDFQVDDAKYKCDHLKEIVSTLVGNKINVGHSQKIYKHFKDLEGKIEERLQNRQAEYQNEINQPSAPGVNFDDI

SEQ ID NO: 42741 - protein, 417 aa, Escherichia coli
MLEQMGIAAKQASYKLAQLSSREKNRVLEKIADELEAQSEIILNANAQDVADARANGLSEAMLDRLALTPARLKGIADDVRQVCNLADPVGQVIDGGVLDSGLRLERRRVPLGVIGVIYEARPNVTVDVASLCLKTGNAVILRGGKETCRTNAATVAVIQDALKSCGLPAGAVQAIDNPDRALVSEMLRMDKYIDMLIPRGGAGLHKLCREQSTIPVITGGIGVCHIYVDESVEIAEALKVIVNAKTQRPSTCNTVETLLVNKNIADSFLPALSKQMAESGVTLHADAAALAQLQAGPAKVVAVKAEEYDDEFLSLDLNVKIVSDLDDAIAHIREHGTQHSDAILTRDMRNAQRFVNEVDSSAVYVNASTRFTDGGQFGLGAEVAVSTQKLHARGPMGLEALTTYKWIGIGDYTIRA

SEQ ID NO: 42742 - protein, 388 aa, Escherichia coli
MIYLVISVFLITAFICLYLKKDIFYPAVCVNIIFALVLLGYEITSDIYAFQLNDATLIFLLCNVLTFTLSCLLTESVLDLNIRKVNNAIYSIPSKKVHNVGLLVISFSMIYICMRLSNYQFGTSLLSYMNLIRDADVEDTSRNFSAYMQPIILTTFALFIWSKKFTNTKVSKTFTLLVFIVFIFAIILNTGKQIVFMVIISYAFIVGVNRVKHYVYLITAVGVLFSLYMLFLRGLPGGMAYYLSMYLVSPIIAFQEFYFQQVSNSASSHVFWFFERLMGLLTGGVSMSLHKEFVWVGLPTNVYTAFSDYVYISAELSYLMMVIHGCISGVLWRLSRNYISVKIFYSYFIYTFSFIFYHESFMTNISSWIQITLCIIVFSQFLKAQKIK

SEQ ID NO: 42743 - protein, 315 aa, Escherichia coli
MCHRAFRLHLCKDWVFMFSGLLIILVPLIVGYLIPLRQQAALKVINQLLSWMVYLILFFMGISLAFLDNLASNLLAILHYSAVSITVILLCNIAALMWLERGLPWRNHHQQEKLPSRIAMALESLKLCGVVVIGFAIGLSGLAFLQHATEASEYTLILLLFLVGIQLRNNGMTLKQIVLNRRGMIVAVVVVVSSLIGGLINAFILDLPINTALAMASGFGWYSLSGILLTESFGPVIGSAAFFNDLARELIAIMLIPGLIRRSRSTALGLCGATSMDFTLPVLQRTGGLDMVPAAIVHGFILSLLVPILIAFFSA

SEQ ID NO: 42744 - protein, 48 aa, Escherichia coli
MTKSTTMMIHFIMTLSLFKAPSSGGAFPFQRPAEIVGLPPFALNSVYR

SEQ ID NO: 42745 - protein, 395 aa, Escherichia coli
MFPVSSIGNDISSDLVRRKMNDLPESPTGNNLEALAPGIEKLKQTSIEMVTLLNTLQPGGKCIITGDFQKELAYLQNVILYNVSSLRLDFLGYNAQIIQRSDNTCELTINEPLKNQEISTGNININCPLKDIYNEIRRLNVIFSCGTGDIVDLSSLDLRNVDLDYYDFTDKHMANTILNPFKLNSTNFTNANMFQVNFVSSTQNATISWDYLLKITPVLISISDMYSEEKIKFVESCLNEPGDITEEQLKIMRFAIIKSIPRATLTDKLENELTKEIYKSSSKIINCLNRIKLTEMKEFSSEKIYDYIDIIIEDYENTKENAYLVVPQINYTMDLNIEDSSSEELLSDNTLEKDENSPDNGFEVGEYNTYEAYNSEKQYFTREDYTYDYDLLNAI

SEQ ID NO: 42746 - protein, 157 aa, Escherichia coli
MLNIVLYEPEIPPNTGNIIRLCANTGFRLHIIEPMGFAWDDKRLRRAGLDYHEFTAVTRHHDYRAFLEAENPQRLFALTTKGTPAHSAVSYQDGDYLMFGPETRGLPASILDALPAEQKIRIPMVPDSRSMNLSNAVSVVVYEAWRQLGYPGAVLRD

SEQ ID NO: 42747 - protein, 235 aa, Escherichia coli
MYRYLSIAAVVLSAAFSGPALAEGINSFSQAKAAAVKVHADAPGTFYCGCKINWQGKKGVVDLQSCGYQVRKNENRASRVEWEHVVPAWQFGHQRQCWQDGGRKNCAKDPVYRKMESDMHNLQPSVGEVNGDRGNFMYSQWNGGEGQYGQCAMKVDFKEKAAEPPARARGAIARTYFYMRDQYNLTLSRQQTQLFNAWNKMYPVTDWECERDERIAKVQGNHNPYVQRACQARKS

SEQ ID NO: 42748 - protein, 182 aa, Escherichia coli
MIRQRRRALTPEQQQEMGQQAATRMMTYPPVVMAHTVAVFLSFDGELDTQPLIEQLWRAGKRVYLPVLHPFSAGNLLFLNYHPQSELVMNRLKIHEPKLDVRDVLPLSRLDVLITPLVAFDEYGQRLGMGGGFYDRTLQNWQHYKTQPVGYAHDCQLVEKLPVEEWDIPLPAVVTPSKVWEW

SEQ ID NO: 42749 - protein, 375 aa, Escherichia coli
MMRHLRNIFNLGIKELRSLLGDKAMLTLIVFSFTVSVYSSATVTPGSLNLAPIAIADMDQSQLSNRIVNSFYRPWFLPPEMITADEMDAGLDAGRYTFAINIPPNFQRDVLAGRQPDIQVNVDATRMSQAFTGNGYIQNIINGEVNSFVARYRDNSEPLVSLETRMRFNPNLDPAWFGGVMAIINNITMLAIVLTGSALIREREHGTVEHLLVMPITPFEIMMAKIWSMGLVVLVVSGLSLVLMVKGVLGVPIEGSIPLFMLGVALSLFATTSIGIFMGTIARSMPQLGLLVILVLLPLQMLSGGSTPRESMPQMVQDIMLTMPTTHFVSLAQAILYRGAGFEIVWPQFLTLMAIGGAFFTIALLRFRKTIGTMA

SEQ ID NO: 42750 - protein, 233 aa, Escherichia coli
MGQKVHPNGIRLGIVKPWNSTWFANTKEFADNLDSDFKVRQYLTKELAKASVSRIVIERPAKSIRVTIHTARPGIVIGKKGEDVEKLRKVVADIAGVPAQINIAEVRKPELDAKLVADSITSQLERRVMFRRAMKRAVQNAMRLGAKGIKVEVSGRLGGAEIARTEWYREGRVPLHTLRADIDYNTSEAHTTYGVIGVKVWIFKGEILGGMAAVEQPEKPAAQPKKQQRKGRK

SEQ ID NO: 42751 - protein, 421 aa, Escherichia coli
MLTKKKWALFSLLTLCGGTIYKLPSLKDAFYIPMQEYFHLTNGQIGNAMSVNSFVTTVGFFLSIYFADKLPRRYTMSFSLIATGLLGVYLTTMPGYWGILFVWALFGVTCDMMNWPVLLKSVSRLGNSEQQGRLFGFFETGRGIVDTVVAFSALAVFTWFGSGLLGFKAGIWFYSLIVIAVGIIIFFVLNDKEEAPSVEVKKEDGASKNTSMTSVLKDKTIWLIAFNVFFVYAVYCGLTFFIPFLKNIYLLPVALVGAYGIINQYCLKMIGGPIGGMISDKILKSPSKYLCYTFIISTAALVLLIMLPHESMPVYLGMACTLGFGAIVFTQRAVFFAPIGEAKIAENKTGAAMALGSFIGYAPAMFCFSLYGYILDLNPGIIGYKIVFGIMACFAFSGAVVSVMLVKRISQRKKEMLAAEA

SEQ ID NO: 42752 - protein, 770 aa, Escherichia coli
MPRLLTKRGCWITLAAAPFLLFLAAWGADKLWPLPLHEVNPARVVVAQDGTPLWRFADADGIWRYPVTIEDVSPRYLEALINYEDRWFWKHPGVNPFSVARAAWQDLTSGRVISGGSTLTMQVARLLDPHPKTFGGKIRQLWRALQLEWHLSKREILTLYLNRAPFGGTLQGIGAASWAYLGKSPANLSYSEAAMLAVLPQAPSRLRPDRWPERAEAARNKVLERMAVQGVWSREQVKESREEPIWLAPRQMPQLAPLFSRMMLGKSKSDKITTTLDAGLQRRLEELAQNWKGRLPPRSSLAMIVVDHTDMRVRGWVGSVDLNDDSRFGHVDMVNSIRSPGSVLKPFVYGLALDEGLIHPASLLQDVPRRTGDYRPGNFDSGFHGPISMSEALVRSLNLPAVQVLEAYGPKRFAAKLRNVGLPLYLPNGAAPNLSLILGGAGAKLEDMAAAYTAFARHGKAGKLRLQPDDPLLERPLMSSGAAWIIRRIMADEAQPLPDSALPRVAPLAWKTGTSYGYRDAWAIGVNARYVIGIWTGRPDGTPVVGQFGFASAVPLLNQVNNILLSRSANLPEDPRPNSVTRGVICWPGGQSLPEGDGNCRRRLATWLLDGSQPPTLLLPEQEGINGIRFPIWLDENGKRVAADCPQARQEMINVWPLPLEPWLPASERRAVRLPPASTSCPPYGHDAQLPLQLTGVRDGAIIKRLPGAAEATLPLQSSGGAGERWWFLNGEPLTERGRNVTLHLTDKGDYQLLVMDDVGQIATVKFVMQ

SEQ ID NO: 42753 - protein, 543 aa, Escherichia coli
MRHSLPYRMLRKRPMKLSTTVILMVSAVLFSVLLVVHLIYFSQISDMTRDGLANKALAVARTLADSPEIRQGLQKKPQESGIQAIAEAVRKRNDLLFIVVTDMQSLRYSHPEAQRIGQPFKGDDILKALNGEENVAINRGFLAQALRVFTPIYDENHKQIGVVAIGLELSRVTQQINDSRWSIIWSVLFGMLVGLIGTCILVKVLKKILFGLEPYEISTLFEQRQAMLQSIKEGVVAVDDRGEVTLINDAAQELLNYRKSQDDEKLSTLSHSWSQVVDVSEVLRDGTPRRDEEITIKDRLLLINTVPVRSNGVIIGAISTFRDKTEVRKLMQRLDGLVNYADALRERSHEFMNKLHVILGLLHLKSYKQLEDYILKTANNYQEEIGSLLGKIKSPVIAGFLISKINRATDLGHTLILNSESQLPDSGSEDQVATLITTLGNLIENALEALGPEPGGEISVTLHYRHGWLHCEVNDDGPGIAPDKIDHIFDKGVSTKGSERGVGLALVKQQVENLGGSIAVESEPGIFTQFFVQIPWDGERSNR

SEQ ID NO: 42754 - protein, 257 aa, Escherichia coli
MSMVETAPSKIQVRNLNFYYGKFHALKNINLDIAKNQVTAFIGPSGCGKSTLLRTFNKMFELYPEQRAEGEILLDGDNILTNSQDIALLRAKVGMVFQKPTPFPMSIYDNIAFGVRLFEKLSRADMDERVQWALTKAALWNETKDKLHQSGYSLSGGQQQRLCIARGIAIRPEVLLLDEPCSALDPISTGRIEELITELKQDYTVVIVTHNMQQAARCSDHTAFMYLGELIEFSNTDDLFTKPAKKQTEDYITGRYG

SEQ ID NO: 42755 - protein, 236 aa, Escherichia coli
MGSGLVNGGDYFYNNLSFTVTRYNGIMATDSTQCVKKSRGRPKVFDRDAALDKAMKLFWQHGYEATSLADLVEATGAKAPTLYAEFTNKEGLFRAVLDRYIDRFAAKHEAQLFCEEKSVESALADYFAAIANCFTSKDTPAGCFMINNCTTLSPDSGDIANTLKSRHAMQERTLQQFLCQRQARGEIPPHCDVTHLAEFLNCIIQGMSISAREGASLEKLMQIAGTTLRLWPELVK

SEQ ID NO: 42756 - protein, 702 aa, Escherichia coli
MYLFESLNQLIQTYLPEDQIKRLRQAYLVARDAHEGQTRSSGEPYITHPVAVACILAEMKLDYETLMAALLHDVIEDTPATYQDMEQLFGKSVAELVEGVSKLDKLKFRDKKEAQAENFRKMIMAMVQDIRVILIKLADRTHNMRTLGSLRPDKRRRIARETLEIYSPLAHRLGIHHIKTELEELGFEALYPNRYRVIKEVVKAARGNRKEMIQKILSEIEGRLQEAGIPCRVSGREKHLYSIYCKMVLKEQRFHSIMDIYAFRVIVNDSDTCYRVLGQMHSLYKPRPGRVKDYIAIPKANGYQSLHTSMIGPHGVPVEVQIRTEDMDQMAEMGVAAHWAYKEHGETSTTAQIRAQRWMQSLLELQQSAGSSFEFIESVKSDLFPDEIYVFTPEGRIVELPAGATPVDFAYAVHTDIGHACVGARVDRQPYPLSQPLTSGQTVEIITAPGARPNAAWLNFVVSSKARAKIRQLLKNLKRDDSVSLGRRLLNHALGGSRKLNEIPQENIQRELDRMKLATLDDLLAEIGLGNAMSVVVAKNLQHGDASIPPATQSHGHLPIKGADGVLITFAKCCRPIPGDPIIAHVSPGKGLVIHHESCRNIRGYQKEPEKFMAVEWDKETAQEFITEIKVEMFNHQGALANLTAAINTTTSNIQSLNTEEKDGRVYSAFIRLTARDRVHLANIMRKIRVMPDVIKVTRNRN

SEQ ID NO: 42757 - protein, 328 aa, Escherichia coli
MSVPLSTWNLLRYNNSYLQKVTMFPQCKFSREFLHPRYWLTWFGLGVLWLWVQLPYPVLCFLGTRIGAMARPFLKRRESIARKNLELCFPQHSAEEREKMIAENFRSLGMALVETGMAWFWPDSRVRKWFDVEGLDNLKRAQMQNRGVMVVGVHFMSLELGGRVMGLCQPMMATYRPHNNQLMEWVQTRGRMRSNKAMIGRNNLRGIVGALKKGEAVWFAPDQDYGRKGSSFAPFFAVENVATTNGTYVLSRLSGAAMLTVTMVRKADYSGYRLFITPEMEGYPTDENQAAAYMNKIIEKEIMRAPEQYLWIHRRFKTRPVGESSLYI

SEQ ID NO: 42758 - protein, 264 aa, Escherichia coli
MKQYLELMQKVLDEGTQKNDRTGTGTLSIFGHQMRFNLQDGFPLVTTKRCHLRSIIHELLWFLQGDTNIAYLHENNVTIWDEWADENGDLGPVYGKQWRAWPTPDGRHIDQITTVLNQLKNDPDSRRIIVSAWNVGELDKMALAPCHAFFQFYVADGKLSCQLYQRSCDVFLGLPFNIASYALLVHMMAQQCDLEVGDFVWTGGDTHLYSNHMDQTHLQLSREPRPLPKLIIKRKPESIFDYRFEDFEIEGYDPHPGIKAPVAI

SEQ ID NO: 42759 - protein, 246 aa, Escherichia coli
MNNNTTAPTYTLRGLQLIGWRDMQHALDYLFADGQLKQGTLVAINAEKMLTIEDNAEVRELINAAEFKYADGISVVRSVRKKYPQAQVSRVAGADLWEELMARAGKEGTPVFLVGGKPEVLAQTEAKLRNQWNVNIVGSQDGYFKPEQRQALFERIHASGAQIVTVAMGSPKQEIIMRDCRLVHPDALYMGVGGTYDVFTGHVKRAPKIWQTLGLEWLYRLLSQPSRIKRQLRLLRYLRWHYTGNL

SEQ ID NO: 42760 - protein, 325 aa, Escherichia coli
MSSISLIQPDRDLFSWPQYWAACFGPAPFLPMSREEMDQLGWDSCDIILVTGDAYVDHPSFGMAICGRMLEAQGFRVGIIAQPDWSSKDDFMRLGKPNLFFGVTAGNMDSMINRYTADRRLRHDDAYTPDNVAGKRPDRATLVYTQRCKEAWKDVPVILGGIEASLRRTAHYDYWSDTVRRSVLVDSKADMLMFGNGERPLVEVAHRLAMGEPISEIRDVRNTAIIVKEALPGWSGVDSTRLDTPGKIDPIPHPYGEDLPCADNKPVAPKKQEAKAVTVQPPRPKPWEKTYVLLPSFEKVKGDKVLYAHASRILHHETNPAVPAH

SEQ ID NO: 42761 - protein, 413 aa, Escherichia coli
MQKHGDRYVWINPPAIPLSTEEMDSVFALPYKRVPHPAYGNARIPAYEMIRFSVNIMRGCFGGCSFCSITEHEGRIIQSRSEDSIINEIEAIRDTVPGFTGVISDLGGPTANMYMLRCKSPRAEQTCRRLSCVYPDICPHMDTNHEPTINLYRRARDLKGIKKILIASGVRYDIAVEDPRYIKELATHHVGGYLKIAPEHTEEGPLSKMMKPGMGSYDRFKELFDTYSKQAGKEQYLIPYFISAHPGTRDEDMVNLALWLKKHRFRLDQVQNFYPSPLANSTTMYYTGKNPLAKIGYKSEDVFVPKGDKQRRLHKALLRYHDPANWPLIRQALEAMGKKHLIGSRRDCLVPAPTIEEMREARRQNRNTRPALTKHTPMATQRQTPATAKKASSTQSRPVNAGAKKRPKAAVGR

SEQ ID NO: 42762 - protein, 212 aa, Escherichia coli
MAVAANKRSVMTLFSGPTDIYSHQVRIVLAEKGVSFEIEHVEKDNPPQDLIDLNPNQSVPTLVDRELTLWESRIIMEYLDERFPHPPLMPVYPVARGESRLYMHRIEKDWYTLMNTIINGSASEADAARKQLREELLAIAPVFGQKPYFLSDEFSLVDCYLAPLLWRLPQLGIEFSGPGAKELKGYMTRVFERDSFLASLTEAEREMRLGRS

SEQ ID NO: 42763 - protein, 226 aa, Escherichia coli
MIQYLNVFFYDIYPYICATVFFLGSWLRYDYGQYTWRASSSQMLDKRGMVIWSNLFHIGILGIFFGHLFGMLTPHWMYAWFLPVAAKQLMAMVLGGICGVLTLIGGAGLLWRRLTNQRVRATSTTPDIIIMSILLIQCLLGLSTIPFSAQYPDGSEMMKLVGWAQSIVTFRGGSSEMLNGVAFVFRLHLVLGMTIFLLFPFTRLVHVWSAPFEYFTRRYQIVRSRR

SEQ ID NO: 42764 - protein, 480 aa, Escherichia coli
MSRRLRRTKIVTTLGPATDRDNNLEKVIAAGANVVRMNFSHGSPEDHKMRADKVREIAAKLGRHVAILGDLQGPKIRVSTFKEGKVFLNIGDKFLLDANLGKGEGDKEKVGIDYKGLPADVVPGDILLLDDGRVQLKVLEVQGMKVFTEVTVGGPLSNNKGINKLGGGLSAEALTEKDKADIKTAALIGVDYLAVSFPRCGEDLNYARRLARDAGCDAKIVAKVERAEAVCSQDAMDDIILASDVVMVARGDLGVEIGDPELVGIQKALIRRARQLNRAVITATQMMESMITNPMPTRAEVMDVANAVLDGTDAVMLSAETAAGQYPSETVAAMARVCLGAEKIPSINVSKHRLDVQFDNVEEAIAMSAMYAANHLKGVTAIITMTESGRTALMTSRISSGLPIFAMSRHERTLNLTALYRGVTPVHFDSANDGVAAASEAVNLLRDKGYLMSGDLVIVTQGDVMSTVGSTNTTRILTVE

SEQ ID NO: 42765 - protein, 321 aa, Escherichia coli
MTTQTVSGRRYFTKAWLMEQKSLIALLVLIAIVSTLSPNFFTINNLFNILQQTSVNAIMAVGMTLVILTSGIDLSVGSLLALTGAVAASIVGIEVNALVAVAAALALGAAIGAVTGVIVAKGRVQAFIATLVMMLLLRGVTMVYTNGSPVNTGFTENADLFGWFGIGRPLGVPTPVWIMGIVFLAAWYMLHHTRLGRYIYALGGNEAATRLSGINVNKIKIIVYSLCGLLASLAGIIEVARLSSAQPTAGTGYELDAIAAVVLGGTSLAGGKGRIVGTLIGALILGFLNNGLNLLGVSSYYQMIVKAVVILLAVLVDNKKQ

SEQ ID NO: 42766 - protein, 296 aa, Escherichia coli
MNMKKLATLVSAVALSATVSANAMAKDTIALVVSTLNNPFFVSLKDGAQKEADKLGYNLVVLDSQNNPAKELANVQDLTVRGTKILLINPTDSDAVGNAVKMANQANIPVITLDRQATKGEVVSHIASDNVLGGKIAGDYIAKKAGEGAKVIELQGIAGTSAARERGEGFQQAVAAHKFNVLASQPADFDRIKGLNVMQNLLTAHPDVQAVFAQNDEMALGALRALQTAGKSDVMVVGFDGTPDGEKAVNDGKLAATIAQLPDQIGAKGVETADKVLKGEKVQAKYPVDLKLVVKQ

SEQ ID NO: 42767 - protein, 238 aa, Escherichia coli
MGRKWANIVAKKTAKDGATSKIYAKFGVEIYAAAKQGEPDPELNTSLKFVIERAKQAQVPKHVIDKAIDKAKGGGDETFVQGRYEGFGPNGSMIIAETLTSNVNRTIANVRTIFNKKGGNIGAAGSVSYMFDNTGVIVFKGTDPDHIFEILLEAEVDVRDVTEEEGNIVIYTEPTDLHKGIAALKAAGITEFSTTELEMIAQSEVELSPEDLEIFEGLVDALEDDDDVQKVYHNVANL

SEQ ID NO: 42768 - protein, 264 aa, Escherichia coli
MDLLYRVKTLWAALRGNHYTWPAIDITLPGNRHFHLIGSIHMGSHDMAPLPTRLLKKLKNADALIVEADVSTSDTPFANLPACEALEERISEEQLQNLQHISQEMGISPSLFSTQPLWQIAMVLQATQAQKLGLRAEYGIDYQLLQAAKQQHKPVIELEGAENQIAMLLQLPDKGLALLDDTLTHWHTNARLLQQMMSWWLNAPPQNNDITLPNTFSQSLYDVLMHQRNLAWRDKLRAMPPGRYVVAVGALHLYGEGNLPQMLR

SEQ ID NO: 42769 - protein, 230 aa, Escherichia coli
MTSSITNEIMQLYTDREVLNMGLCSRYKSLTCNSCSMHCQIMPEESPRLQYCANSCFCMWPEESSYFNRGVVEGILTKNHNARLSGYIFVDFSVSFLRLFLEKDWIDYLASTDMGIVLVSDRNMQSLANYWRKHNSAISAVIYNDDGLDVANEKIRQLFIGRYLSFTGGNTLTQMEFTIMGYMVSGYNPYQIAEVLDMDIRSIYAYKQRIEKRMGGKINELFIRSHSVQH

SEQ ID NO: 42770 - protein, 118 aa, Escherichia coli
MARIAGINIPDHKHAVIALTSIYGVGKTRSKAILAAAGIAEDVKISELSEGQIDTLRDEVAKFVVEGDLRREISMSIKRLMDLGCYRGLRHRRGLPVRGQRTKTNARTRKGPRKPIKK

SEQ ID NO: 42771 - protein, 38 aa, Escherichia coli [sequence omitted]

SEQ ID NO: 42772 - protein, 201 aa, Escherichia coli
MALHDENVVWHSHPVTVQQRELHHGHRGVVLWFTGLSGSGKSTVAGALEEALHKLGVSTYLLDGDNVRHGLCSDLGFSDADRKENIRRVGEVANLMVEAGLVVLTAFISPHRAERQMVRERVGEGRFIEVFVDTPLAICEARDPKGLYKKARAGELRNFTGIDSVYEAPESAEIHLNGEQLVTNLVQQLLDLLRQNDIIRS

SEQ ID NO: 42773 - protein, 322 aa, Escherichia coli
MDNFLALTLTGKKPVITEREINGVRWRWLGDGVLELTPLTPPQGALVISAGIHGNETAPVEMLDALLGAISHGEIPLRWRLLVILGNPPALKQGKRYCHSDMNRMFGGRWQLFAESGETCRARELEQCLEDFYDQGKESVRWHLDLHTAIRGSLHPQFGVLPQRDIPWDEKFLTWLGAAGLEALVFHQEPGGTFTHFSARHFGALACTLELGKALPFGQNDLRQFAVTASAIAALLSGESVGIVRTPPLRYRVVSQITRHSPSFEMHMASDTLNFMPFEKGTLLAQDGEERFTVTHDVEYVLFPNPLVALGLRAGLMLEKIS

SEQ ID NO: 42774 - protein, 430 aa, Escherichia coli
MRYNGLNNMFFPLCLINDNHSVTSPSHTKKTKSDNYSKHHKNTLIDNKALSLFKMDDHEKVIGLIQKMKRIYDSLPSGKITKETDRKIHKYFIDIASHANNKCDDRITRRVYLNKDKEVSIKVVYFINNVTVHNNTIEIPQTVNGGYDFSHLSLKGIVIKDEDLSNSNFAGCRLQNAIFQDCNMYKTNFNFAIMEKILFDNCILDDSNFAQIKMTDGTLNSCSAMHVQFYNATMNRANIKNTFLDYSNFYMAYMAEVNLYKVIAPYINLFRADLSFSKLDLINFEHADLSRVNLNKATLQNINLIDSKLFFTRLTNTFLEMVICTDSNMANVNFNNANLSNCHFNCSVLTKAWMFNIRLYRVNFDEASVQGMGITILRGEENISINSDILVTLQKFFEEDCATHTGMSQTEDNLHAVAMKITADIMQDAD

SEQ ID NO: 42775 - protein, 129 aa, Escherichia coli
MAKAPIRARKRVRKQVSDGVAHIHASFNNTIVTITDRQGNALGWATAGGSGFRGSRKSTPFAAQVAAERCADAVKEYGIKNLEVMVKGPGPGRESTIRALNAAGFRITNITDVTPIPHNGCRPPKKRRV

SEQ ID NO: 42776 - protein, 460 aa, Escherichia coli
MTQLTMKDKIGYGLGDTACGFVWQATMFLLAYFYTDVFGLSAGIMGTLFLVSRVLDAVTDPLMGLLVDRTRTRHGQFRPFLLWGAIPFGIVCVLTFYTPDFSAQGKIIYACVTYILLTLVYTFVNVPYCAMPGVITADPKERHALQSWRFFLAAAGSLAISGIALPLVSIIGKGDEQVGYFGAMCVLGLSGVVLLYVCFFTTKERYTFEVQPGSSVAKDLKLLLGNSQWRIMCAFKMMATCSNVVRGGATLYFVKYVMDHPELATQFLLYGSLATMFGSLCSSRLLGRFDRVTAFKWIIVAYSLISLLIFVTPAEHIALIFALNILFLFVFNTTTPLQWLMASDVVDYEESRSGRRLDGLVFSTYLFSLKIGLAIGGAVVGWILAYVNYSASSSVQPVEVLTTIKILFCVVPVVLYAGMFIMLSLYKLTDARVEAISRQLIKHRAAQGEAVPDAATAASH

SEQ ID NO: 42777 - protein, 280 aa, Escherichia coli
MLSYRHSFHAGNHADVLKHTVQSLIIESLKEKDKPFLYLDTHAGAGRYQLGSEHAERTGEYLEGIARIWQQDDLPAELEAYINVVKHFNRSGQLRYYPGSPLIARLLLREQDSLQLTELHPSDYPLLRSEFQKDSRARVEKADGFQQLKAKLPPVSRRGLILIDPPYEMKTDYQAVVSGIAEGYKRFATGIYALWYPVVLRQQIKRMIHDLEATGIRKILQIELAVLPDSDRRGMTASGMIVINPPWKLEQQMNNVLPWLHSKLVPAGTGHATVSWIVPE

SEQ ID NO: 42778 - protein, 496 aa, Escherichia coli
MLYLNFPSVSIRLFASDESNTLKRWPVFPRSLRQLVMLAFLLILLPLLVLAWQAWQSLNALSDQAALVNRTTLIDARRSEAMTNAALEMERSYRQYCVLDDPTLAKVYQSQRKRYSEMLDAHAGVLPDDKLYQALRQDLHNLAQLQCNNSGPDAAAAARLEAFASANTEMVQATRTVVFSRGQQLQREIAERGQYFGWQSLVLFLVSLVMVLLFTRMIIGPVKNIERMINRLGEGRSLGNSVSFSGPSELRSVGQRILWLSERLSWLESQRHQFLRHLSHELKTPLASMREGTELLADQVVGPLTPEQKEVVSILDSSSRNLQKLIEQLLDYNRKQADSAVELENVELAPLVETVVSAHSLPARAKMMHTDVDLKATACLAEPMLLMSVLDNLYSNAVHYGAESGNICLRSSLHGARVYIDVINTGTPIPQEERAMIFEPFFQGSHQRKGAVKGSGLGLSIARDCIRRMQGELYLVDESGQDVCFRIELPSSKNTK

SEQ ID NO: 42779 - protein, 76 aa, Escherichia coli
MMKKTAAIISACMLTFALSACSGSNYVMHTNDGRTIVSDGKPQTDNDTGMISYKDANGNKQQINRTDVKEMVELDQ

SEQ ID NO: 42780 - protein, 443 aa, Escherichia coli
MAKQPGLDFQSAKGGLGELKRRLLFVIGALIVFRIGSFIPIPGIDAAVLAKLLEQQRGTIIEMFNMFSGGALSRASIFALGIMPYISASIIIQLLTVVHPTLAEIKKEGESGRRKISQYTRYGTLVLAIFQSIGIATGLPNMPGMQGLVINPGFAFYFTAVVSLVTGTMFLMWLGEQITERGIGNGISIIIFAGIVAGLPPAIAHTIEQARQGDLHFLVLLLVAVLVFAVTFFVVFVERGQRRIVVNYAKRQQGRRVYAAQSTHLPLKVNMAGVIPAIFASSIILFPATIASWFGGGTGWNWLTTISLYLQPGQPLYVLLYASAIIFFCFFYTALVFNPRETADNLKKSGAFVPGIRPGEQTAKYIDKVMTRLTLVGALYITFICLIPEFMRDAMKVPFYFGGTSLLIVVVVIMDFMAQVQTLMMSSQYESALKKANLKGYGR

SEQ ID NO: 42781 - protein, 419 aa, Escherichia coli
MLTSFKLHSLKPYTLKSSMILEIITYILCFFSMIIAFVDNTFSIKIYNITAIVCLLSLILRGRQENYNIKNLILPLSIFLIGLLDLIWYSAFKVDNSPFRATYHSYLNTAKIFIFGSFIVFLTLTSQLKSKKESVLYTLYSLSFLIAGYAMYINSIHENDRISFGVGTATGAAYSTMLIGIVSGVAILYTKKNHPFLFLLNSCAVLYVLALTQTRATLLLFPIICVAALIAYYNKSPKKFTSSIVLLIAILASIVIIFNKPIQNRYNEALNDLNSYTNANSVTSLGARLAMYEIGLNIFIKSPFSFRSAESRAESMNLLVAEHNRLRGALEFSNVHLHNEIIEAGSLKGLMGIFSTLFLYFSLFYIAYKKRALGLLILTLGIVGIGLSDVIIWARSIPIIIISAIVLLLVINNRNNTIN

SEQ ID NO: 42782 - protein, 341 aa, Escherichia coli
MPGYAQYRSFSEDLSMNMEEIVALSVKHNVSDLHLCSAWPARWRIRGRMEAAPFDTPDVEELLREWLDDDQRAILLENGQLDFAVSLAENQRLRGSAFAQRHGISLALRLLPSHCPQLEQLGAPTVLPELLKSENGLILVTGATGSGKSTTLAAMVGYLNQHADAHILTLEDPVEYLYASQRCLIQQREIGLHCMTFASGLRAALREDPDVILLGELRDSETIRLALTAAETGHLVLATLHTRGAAQAVERLVDSFPAQEKDPVRNQLAGSLRAVLSQKLEVDKQEGRVALFELLINTPAVGNLIREGKTHQLPHVIQTGQQVGMITFQQSYQHRVGEGRL

SEQ ID NO: 42783 - protein, 1122 aa, Escherichia coli
MNMAVKISGVLKDGTGKPVQNCTIQLKAKRNSTTVVVNTLASENPDEAGRYSMDVEYGQYSVILLVEGFPPSHAGTITVYEDSQPGTLNDFLGAMTEDDARPEALRRFELMVEEVARNASAVAQNTAAAKKSASDASTSAREAATHAADAADSARAASTSAGQAASSAQSASSSAGTASTKATEASKSAAAAESSKSAAATSAGAAKTSETNASASLQSAATSASTATTKASEAATSARDAAASKEAAKSSETNASSSASSAASSATAAGNSAKAAKTSETNARSSETAAGQSASAAAGSKTAAASSASAASTSAGQASASATAAGKSAESAASSASTATTKAGEATEQASAAARSASAAKTSETNAKASETSAESSKTAAASSASSAASSASSASASKDEATRQASAAKSSATTASTKATEAAGSATAAAQSKSTAESAATRAETAAKRAEDIASAVALEDASTTKKGIVQLSSATNSTSETLAATPKAVKSAYDNAEKRLQKDQNGADIPDKGCFLNNINAVSKTDFADKRGMRYVRVNAPAGATSGKYYPVVVMRSAGSVSELASRVIITTATRTAGDPMNNCEFNGFVMPGGWTDRGRYAYGMFWQYQNNERAIHSIMMSNKGDDLRSVFYVDGAAFPVFAFIEDGLSISAPGADLVVNDTTYKFGATNPATECIAADVILDFKSGRGFYESHSLIVNDNLSCKKLFATDEIVARGGNQIRMIGGEYGALWRNDGAKTYLLLTNQGDVYGGWNTLRPFAIDNATGELVIGTKLSASLNGNALTATKLQTPRRVSGVEFDGSKDITLTAAHVAAFARRATDTYADADGGVPWNAESGAYNVTRSGDSYILVNFYTGVGSCRTLQMKAHYRNGGLFYRSSRDGYGFEEDWAEVYTSKNLPPESYPVGAPIPWPSDTVPSGYALMQGQAFDKSAYPKLAAAYPSGVIPDMRGWTIKGKPASGRAVLSQEQDGIKSHTHSASASSTDLGTKTTSSFDYGTKSTNNTGAHTHSVSGSTNSAGAHTHSLANVNTASANSGAGSASTRLSVVHNQNYATSSAGAHTHSLSGTAASAGAHAHTVGIGAHTHSVAIGSHGHTITVNAAGNAENTVKNIAFNYIVRLA

SEQ ID NO: 42784 - protein, 442 aa, Escherichia coli
MHIGQALDLVSRYDSLRNPLTSLGDYLDPELISRCLAESGTVTLRKRRLPLEMMVWCIVGMALERKEPLHQIVNRLDIMLPGNRPFVAPSAVIQARQRLGSEAVRRVFTKTAQLWHNATPHPHWCGLTLLAIDGVFWRTPDTPENDAAFPRQTHAGNPALYPQVKMVCQMELTSHLLTAAAFGTMKNSENELAEQLIEQTGDNTLTLMDKGYYSLGLLNAWSLAGEHRHWMIPLRKGAQYEEIRKLGKGDHLVKLKTSPQARKKWPGLGNEVTARLLTVTRKGKVCHLLTSMTDAMRFPGGEMGDLYSHRWEIELGYREIKQTMQRSRLTLRSKKPELVEQELWGVLLAYNLVRYQMIKMAEHLKGYWPNQLSFSESCGMVMRMLMTLQGASPGRIPELMRDLASMGQLVKLPTRRERAFPRVVKERPWKYPTAPKKSQSVA

SEQ ID NO: 42785 - protein, 237 aa, Escherichia coli
MKIFLENLYHSDCYFLPIRDNQQVLVGVELITHFSSEDGTVRIPTSRVIAQLTEEQHWQLFSEQLELLKSCQHFFIQHKLFAWLNLTPQVATLLLERDNYAGELLKYPFIELLINENYPHLNEGKDNRGLLSLSQVYPLVLGNLGAGNSTMKAVFDGLFTRVMLDKSFIQQQITHRSFEPFIRAIQAQISPCCNCIIAGGIDTAEILAQITPFDFHALQGCLWPAVPINQITTLVQR

SEQ ID NO: 42786 - protein, 554 aa, Escherichia coli
MSEAEARPTNFIRQIIDEDLASGKHTTVHTRFPPEPNGYLHIGHAKSICLNFGIAQDYKGQCNLRFDDTNPVKEDIEYVESIKNDVEWLGFHWSGNVRYSSDYFDQLHAYAIELINKGLAYVDELTPEQIREYRGTLTQPGKNSPYRDRSVEENLALFEKMRAGGFEEGKACLRAKIDMASPFIVMRDPVLYRIKFAEHHQTGNKWCIYPMYDFTHCISDALEGITHSLCTLEFQDNRRLYDWVLDNITIPVHPRQYEFSRLNLEYTVMSKRKLNLLVTDKHVEGWDDPRMPTISGLRRRGYTAASIREFCKRIGVTKQDNTIEMASLESCIREDLNENAPRAMAVIDPVKLVIENYQGEGEMVTMPNHPNKPEMGSRQVPFSGEIWIDRADFREEANKQYKRLVLGKEVRLRNAYVIKAERVEKDAEGNITTIFCTYDADTLSKDPADGRKVKGVIHWVSAAHALPVEIRLYDRLFSVPNPGAADDFLSVINPESLVIKQGFAEPSLKDAVAGKAFQFEREGYFCLDSRHSTAEKPVFNRTVGLRDTWAKVGE

SEQ ID NO: 42787 - protein, 396 aa, Escherichia coli [sequence omitted]

SEQ ID NO: 42788 - protein, 441 aa, Escherichia coli
MSKVTPQPKIGFVSLGCPKNLVDSERILTELRTEGYDVVPSYDDADMVIVNTCGFIDSAVQESLEAIGEALNENGKVIVTGCLGAKEDQIREVHPKVLEITGPHSYEQVLEHVHHYVPKPKHNPFLSLVPEQGVKLTPRHYAYLKISEGCNHRCTFCIIPSMRGDLVSRPIGEVLSEAKRLVDAGVKEILVISQDTSAYGVDVKHRTGFHNGEPVKTSMVSLCEQLSKLGIWTRLHYVYPYPHVDDVIPLMAEGKILPYLDIPLQHASPRILKLMKRPGSVDRQLARIKQWREICPELTLRSTFIVGFPGETEEDFQMLLDFLKEARLDRVGCFKYSPVEGADANALPDQVPEEVKEERWNRFMQLQQQISAERLQEKVGREILVIIDEVDEEGAIGRSMADAPEIDGAVYLNGETNVKPGDILRVKVEHADEYDLWGSRV

SEQ ID NO: 42789 - protein, 300 aa, Escherichia coli
MANLYDLKKFDLNLLVIFECIYQHLSISKAAESLYITPSAVSQSLQRLRAQFNDPLFIRSGKGIAPTTTGLNLHHHLEKNLRGLEQTINIVNKSELKKNFIIYGPQLISCSNNSMLIRCLRQDSSVEIECHDILMSAENAEELLVHRKADLVITQMPVISRSVICMPLHTIRNTLICSNRHPRITDNSTYEQIMAEEFTQLISKSAGVDDIQMEIDERFMNRKISFRGSSLLTIINSIAVTDLLGIVPYELYNSYRDFLNLKEIKLEHPLPSIKLYISYNKSSLNNLVFSRFIDRLNESF

SEQ ID NO: 42790 - protein, 644 aa, Escherichia coli
MFQDNPLLAQLKQQLHSQTPRAEGVVKATEKGFGFLEVDAQKSYFIPPPQMKKVMHGDRIIAVIHSEKERESAEPEELVEPFLTRFVGKVQGKNDRLAIVPDHPLLKDAIPCRAARGLNHEFKEGDWAVAEMRRHPLKGDRSFYAELTQYITFGDDHFVPWWVTLARHNLEKEAPDGVATEMLDEGLVREDLTALDFVTIDSASTEDMDDALFAKALPDDKLQLIVAIADPTAWIAEGSKLDKAAKIRAFTNYLPGFNIPMLPRELSDDLCSLRANEVRPVLACRMTLSADGTIEDNIEFFAATIESKAKLVYDQVSDWLENTGDWQPESEAIAEQVRLLAQICQRRGEWRHNHALVFKDRPDYRFILGEKGEVLDIVAEPRRIANRIVEEAMIAANICAARVLRDKLGFGIYNVHMGFDPANADALAALLKTHGLHVDAEEVLTLDGFCKLRRELDAQPTGFLDSRIRRFQSFAEISTEPGPHFGLGLEAYATWTSPIRKYGDMINHRLLKAVIKGETATRPQDEITVQMAERRRLNRMAERDVGDWLYARFLKDKAGTDTRFAAEIVDISRGGMRVRLVDNGAIAFIPAPFLHAVRDELVCSQENGTVQIKGETVYKVTDVIDVTIAEVRMETRSIIARPVA

SEQ ID NO: 42791 - protein, 262 aa, Escherichia coli
MMEFILSHVEKGVMTLTLNRPERLNSFNDEMHAQLAECLKQVERDDTIRCLLLTGAGRGFCAGQDLNDRNVDPTGPAPDLGMSVERFYNPLVRRLAKLPKPVICAVNGVAAGAGATLALGGDIVIAARSAKFVMAFSKLGLIPDCGGTWLLPRVAGRARAMGLALLGNQLSAEQAHEWGMIWQVVDDETLADTAQQLARHLATQPTFGLGLIKQAINSAETNTLDTQLDLERDYQRLAGRSADYREGVSAFLAKRSPQFTGK

SEQ ID NO: 42792 - protein, 475 aa, Escherichia coli
MMINVQTVAVIGSGTMGAGIAEVAASHGHQVLLYDISAEALTRAIDGIHARLNSRVTRGKLTAETCERTLKRLIPVTDIHALAAADLVIEAASERLEVKKALFAQLAEVCPPQTLLTTNTSSISITAIAAEIKNPERVAGLHFFNPAPVMKLVEVVSGLATAAEVVEQLCELTLSWGKQPVRCHSTPGFIVNRVARPYYSEAWRALEEQVAAPEVIDAALRDGAGFPMGPLELTDLIGQDVNFAVTCSVFNAFWQERRFLPSLVQQELVIGGRLGKKSGLGVYDWRAEREAVVGLEAVSDSFSPMKVEKKSDGVTEIDDVLLIETQGETAQALAIRLARPVVVIDKMAGKVVTIAAAAVNPDSATRKAIYYLQQQGKTVLQIADYPGMLIWRTVAMIINEALDALQKGVASEQDIDTAMRLGVNYPYGPLAWGAQLGWQRILRLLENLQHHYGEERYRPCSLLRQRALLESGYES

SEQ ID NO: 42793 - protein, 276 aa, Escherichia coli
MSMPLSNALQSQIITDAHFLHHPIVDSEFTRKLKYARMDSENIYLPPLTRGNNHNYDGKSVVEIRKLDISKEPWPFNYVTGACRESDGITTTGRMLYRNLKITSALDEIYGGICKKAHATTELAEGLRLNLFMKSPFDPVEDYTVHEITLGPGCNVPGYAGTTIGYISTLPASQAKRWTNEQPRIDIYIDQIMTVTGVANSSGFALAALLNANIELGNDPIIGIEAYPGTAEIHAKMGYKVIPGDENAPLKRMTLQPSSLPELFELKNGEWNYIGK

SEQ ID NO: 42794 - protein, 608 aa, Escherichia coli
MHYMKWIYPRRLRNQMILMAILMVIVPTLTIGYIVETEGRSAVLSEKEKKLSAVVNLLNQALGDRYDLYIDLPREERIRALNAELAPITENITHAFPGIGAGYYNKMLDAIITYAPSALYQNNVGVTIAADHPGREVMRTNTPLVYSGRQVRGDILNSMLPIERNGEILGYIWANELTEDIRRQAWKMDVRIIIVLTAGLLISLLLIVLFSRRLSANIDIITDGLSTLAQNIPTRLPQLPGEMGQISQSVNNLAQALRETRTLNDLIIENAADGVIAIDRQGDVTTMNPAAEVITGYQRHELVGQPYSMLFDNTQFYSPVLDTLEHGTEHVALEISFPGRDRTIELSVTTSRIHNTHGEMIGALVIFSDLTARKETQRRMAQAERLATLGELMAGVAHEVRNPLTAIRGYVQILRQQTSDPIHQEYLSVVLKEIDSINKVIQQLLEFSRPRHSQWQQVSLNALVEETLVLVQTAGVQARVDFISELDNELSPINADRELLKQVLLNILINAVQAISARGKIRIQTWQYSDSQQAISIEDNGCGIDLSLQKKIFDPFFTTKASGTGLGLALSQRIINAHQGDIRVASLPGYGATFTLILPINPQGNQTV

SEQ ID NO: 42795 - protein, 104 aa, Escherichia coli
MTNRLVLSGTVCRAPLRKVSPSGIPHCQFVLEHRSVQEEAGFHRQAWCQMPVIVSGHENQAITHSITVGSRITVQGFISCHKAKNGLSKMVLHAEQIELIDSGD

SEQ ID NO: 42796 - protein, 75 aa, Escherichia coli
MARYFRRRKFCRFTAEGVQEIDYKDIATLKNYITESGKIVPSRITGTRAKYQRQLARAIKRARYLSLLPYTDRHQ

SEQ ID NO: 42797 - protein, 200 aa, Escherichia coli
MLAFCRSSLKSKKYIIILLALAAIAGLGTHAAWSSNGLPRIDNKTLARLAQQHPVVVLFRHAERCDRSTNQCLSDKTGITVKGTQDARELGNAFSADIPDFDLYSSNTVRTIQSATWFSAGKKLTVDKRLLQCGNEIYSAIKDLQSKAPDKNIVIFTHNHCLTYIAKDKRDATFKPDYLDGLVMHVEKGKVYLDGEFVNH

SEQ ID NO: 42798 - protein, 268 aa, Escherichia coli
MIETLLEVRNLSKTFRYRTGWFRRQTVEAVKPLSFTLREGQTLAIIGENGSGKSTLAKMLAGMIEPTSGELLIDDHPLHFGDYSFRSQRIRMIFQDPSTSLNPRQRISQILDFPLRLNTDLEPEQRRKQIIETMRMVGLLPDHVSYYPHMLAPGQKQRLGLARALILRPKVIIADEALASLDMSMRSQLINLMLELQEKQGISYIYVTQHIGMMKHISDQVLVMHQGEVVERGSTADVLASPLHELTKRLIAGHFGEALTADAWRKDR

SEQ ID NO: 42799 - protein, 394 aa, Escherichia coli
MSKEKFERTKPHVNVGTIGHVDHGKTTLTAAITTVLAKTYGGAARAFDQIDNAPEEKARGITINTSHVEYDTPTRHYAHVDCPGHADYVKNMITGAAQMDGAILVVAATDGPMPQTREHILLGRQVGVPYIIVFLNKCDMVDDEELLELVEMEVRELLSQYDFPGDDTPIVRGSALKALEGDAEWEAKILELAGFLDSYIPEPERAIDKPFLLPIEDVFSISGRGTVVTGRVERGIIKVGEEVEIVGIKETQKSTCTGVEMFRKLLDEGRAGENVGVLLRGIKREEIERGQVLAKPGTIKPHTKFESEVYILSKDEGGRHTPFFKGYRPQFYFRTTDVTGTIELPEGVEMVMPGDNIKMVVTLIHPIAMDDGLRFAIREGGRTVGAGVVAKVLS

SEQ ID NO: 42800 - protein, 394 aa, Escherichia coli
  MISC_FEATURE (118)..(119): X=any amino acid
MSKEKFERTKPHVNVGTIGHVDHGKTTLTAAITTVLAKTYGGAARAFDQIDNAPEEKARGITINTSHVEYDTPTRHYAHVDCPGHADYVKNMITGAAQMDGAILVVAATDGPMPQTCXXILLGRQVGVPYIIVFLNKCDMVDDEELLELVEMEVRELLSQYDFPGDDTPIVRGSALKALEGDAEWEAKILELAGFLDSYIPEPERAIDKPFLLPIEDVFSISGRGTVVTGRVERGIIKVGEEVEIVGIKETQKSTCTGVEMFRKLLDEGRAGENVGVLLRGIKREEIERGQVLAKPGTIKPHTKFESEVYILSKDEGGRHTPFFKGYRPQFYFRTTDVTGTIELPEGVEMVMPGDNIKMVVTLIHPIAMDDGLRFAIREGGRTVGAGVVAKVLS

SEQ ID NO: 42801 - protein, 360 aa, Escherichia coli
MSLLCAFFRNVDIFRLWLRNEHRHVTLHLIRGSLLMNALTAVQNNAVDSGQDYSGFTLTPSAQSPRLLELTFTEQTTKQFLEQVAEWPVQALEYKSFLRFRVAKILDDLCANQLQPLLLKTLLNRAEGALLINAVGVDDVKQADEMVKLATAVAHLIGRSNFDAMSGQYYARFVVKNVDNSDSYLRQPHRVMELHNDGTYVEEITDYVLMMKIDEQNMQGGNSLLLHLDDWEHLDNYFRHPLARRPMRFAAPPSKNVSKDVFHPVFDVDQQGRPVMRYIDQFVQPKDFEEGVWLSELSDAIETSKGILSVPVPVGKFLLINNLFWLHGRDRFTPHPDLRRELMRQRGYFAYASNHYQTHQ

SEQ ID NO: 42802 - protein, 446 aa, Escherichia coli [sequence omitted]

SEQ ID NO: 42803 - protein, 549 aa, Escherichia coli
MEIFFTILIMTLVVSLSGVVTRVMPFQIPLPLMQIAIGALLAWPTFGLHVEFDPELFLVLFIPPLLFADGWKTPTREFLEHGREIFGLALALVVVTVVGIGFLIYWVVPGIPLIPAFALAAVLSPTDAVALSGIVGEGRIPKKIMGILQGEALMNDASGLVSLKFAVAVAMGTMIFTVGGATVEFMKVAIGGILAGFVVSWLYGRSLRFLSRWGGDEPATQIVLLFLLPFASYLIAEHIGVSGILAAVAAGMTITRSGVMRRAPLAMRLRANSTWAMLEFVFNGMVFLLLGLQLPGILETSLMAAEIDPNVEIWMLFTNIILIYAALMLVRFGWLWTMKKFSNRFLKKKPMEFGSWTTREILIASFAGVRGAITLAGVLSIPLLLPDGNVFPARYELVFLAAGVILFSLFVGVVMLPILLQHIEVADHSQQLKEERIARAATAEVAIVAIQKMEERLAADTEENIDNQLLTEVSSRVIGNLRRRADGRNDVESSVQEENLERRFRLAALRSERAELYHLRATREISNETLQKLLHDLDLLEALLIEENQ

SEQ ID NO: 42804 - protein, 21 aa, Escherichia coli [sequence omitted]

SEQ ID NO: 42805 - protein, 820 aa, Escherichia coli
MRVLKFGGTSVANAERFLRVADILESNARQGQVATVLSAPAKITNHLVAMIEKTISGQDALPNISDAERIFAELLTGLAAAQPGFPLAQLKTFVDQEFAQIKHVLHGISLLGQCPDSINAALICRGEKMSIAIMAGVLEARGHNVTVIDPVEKLLAVGHYLESTVDIAESTRRIAASRIPADHMVLMAGFTAGNEKGELVVLGRNGSDYSAAVLAACLRADCCEIWTDVDGVYTCDPRQVPDARLLKSMSYQEAMELSYFGAKVLHPRTITPIAQFQIPCLIKNTGNPQAPGTLIGASRDEDELPVKGISNLNNMAMFSVSGPGMKGMVGMAARVFAAMSRARISVVLITQSSSEYSISFCVPQSDCVRAERAMQEEFYLELKEGLLEPLAVTERLAIISVVGDGMRTLRGISAKFFAALARANINIVAIAQGSSERSISVVVNNDDATTGVRVTHQMLFNTDQVIEVFVIGVGGVGGALLEQLKRQQSWLKNKHIDLRVCGVANSKALLTNVHGLNLENWQEELAQAKEPFNLGRLIRLVKEYHLLNPVIVDCTSSQAVADQYADFLREGFHVVTPNKKANTSSMDYYHQLRYAAEKSRRKFLYDTNVGAGLPVIENLQNLLNAGDELMKFSGILSGSLSYIFGKLDEGMSFSEATTLAREMGYTEPDPRDDLSGMDVARKLLILARETGRELELADIEIEPVLPAEFNAEGDVAAFMANLSQLDDLFAARVAKARDEGKVLRYVGNIDEDGVCRVKIAEVDGNDPLFKVKNGENALAFYSHYYQPLPLVLRGYGAGNDVTAAGVFADLLRTLSWKLGV

SEQ ID NO: 42806 - protein, 302 aa, Escherichia coli
MAAINTKVKKAVIPVAGLGTRMLPATKAIPKEMLPLVDKPLIQYVVNECIAAGITEIVLVTHSSKNSIENHFDTSFELEAMLEKRVKRQLLDEVQSICPPHVTIMQVRQGLAKGLGHAVLCAHPVVGDEPVAVILPDVILDEYESDLSQDNLAEMIRRFDETGHSQIMVEPVADVTAYGVVDCKGVELAPGESVPMVGVVEKPKADVAPSNLAIVGRYVLSADIWPLLAKTPPGAGDEIQLTDAIDMLIEKETVEAYHMKGKSHDCGNKLGYMQAFVEYGIRHNTLGTEFKAWLEEEMGIKK

SEQ ID NO: 42807 - protein, 282 aa, Escherichia coli
MRRLPGILLLTGAALVVIAALLVSGLRIALPHLDAWRPEILNKIESATGMPVEASQLSASWQNFGPTLEAHDIRAELKDGGEFSVKRVTLALDVWQSLLHMRWQFRDLTFWQLRFRTNTPITSGGSDDSLEASHISDLFLRQFDHFDLRDSEVSFLTPSGQRAELAIPQLTWLNDPRRHRAEGLVSLSSLTGQHGVMQVRMDLRDDEGLLSNGRVWLQADDIDLKPWLGKWMQDNIALETAQFSLEGWMTIDKGDVTGGDVWLKTGRCQLVGREANAYAVGG

SEQ ID NO: 42808 - protein, 986 aa, Escherichia coli
MDNLTAHITRENPGWQFSIPDTRITMDGKPWPSGALTLAWIPEQDVGGKDNKRSDELRIRASNLELAGLEGIRPLAAKLSPALGDVWRSTQPSGKINTLALDIPLQAADKTRFQASWSDLAWKQWKLLPGAEHFSGTLSGSVENGLLTASMKQAKMPYETVFRAPLEIADGQATISWLNNNKGFQLDGRNIDVKAKAVHARGGFRYLQPANDEPWLGILAGISTDDGSQAWRYFPENLMGKDLVDYLSGAIQGGEADNATLVYGGNPQLFPYKHNEGQFEVLVPLRNAKFAFQPDWPALTNLDIELDFINDGLWMKTDGVNLGGVRASNLTAVIPDYSKEKLLIDADIKGPGKAVGPYFDETPLKDSLGATLQELQLDGDVNARLHLDIPLNGELVTAKGEVTLRNNSLFIKPLDSTLKNLSGKFSFINSDLQSEPLTASWFNQPLNVDFSTKEGAKAYQVAVNLNGNWQPAKTGVLPEAVNEALSGSVAWDGKVGIDLPYHAGATYNIELNGDLKNVSSHLPSPLAKPAGEPLAVNVKVDGNLNSFELTGQAGADNHFNSRWLLGQKLTLDRAIWAADSKTLPPLPEQSGVELNMPPMNGAEWLALFQKGAAESVGGAASFPQHITLRTPMLSLGNQQWNNLSIVSQPTANGTLVEAQGREINATLAMRNNAPWLANIKYLYYNPSVAKTRGDSTPSSPFPTTERINFRGWPDAQIRCTECWFWGQKFGRIDSDITISGDTLTLTNGLIDTGFSRLTADGEWVNNPGNERTSLKGKLRGQKIDAAAEFFGVTTPIRQSSFNVDYDLHWRKAPWQPDEATLNGIIHTQLGKGEITEINTGHAGQLLRLLSVDALMRKLRFDFRDTFGEGFYFDSIRSTAWIKDGVMHTDDTLVDGLEADIAMKGSVNLVRRDLNMEAVVAPEISATVGVAAAFAVNPIVGAAVFAASKVLGPLWSKVSILRYHISGPLDDPQINEVLRQPRKEKAQ

SEQ ID NO: 42809 - protein, 1337 aa, Escherichia coli
MGTGLANADDSLPSSNYAPPAGGTFFLLADSSFSSSEEAKVRLEAPGRDYRRYQMEEYGGVDVRLYRIPDPMAFLRQQKNLHRIVVQPQYLGDGLNNTLTWLWDNWYGKSRRVMQRTFSSQSRQNVTQALPELQLGNAIIKPSRYVQNNQFSPLKKYPLVKQFRYPLWQAKPFEPQQGVKLEGASSNFISPQPGNIYIPLGQQEPGLYLVEAMVGGYRATTVVFVSDTVALSKVSGKELLVWTAGKKQGEAKPGSEILWTDGLGVMTRGVTDDSGTLQLQHISPERSYILGKDAEGGVFVSENFFYESEIYNTRLYIFTDRPLYRAGDRVDVKVIGREFHDPLHSSPIVSAPAKLSVLDANGSLLQTVNVTLDARNGGQGSFRLPENAVAGGYELRLAYRNQVYSSSFRVANYIKPHFEIGLALAKKEFKTGEAVSGKLQLLYPDGEPVKNARVQLSLRAQQLSMVGNDLRYAGRFPVSLEGSETVSDASGHVALNLPAADKPSRYLLTVSASDGAAYRVTTTKEILIERGLAHYSLSTAAQYSNSGESVVFRYAALESSKQVPVTYEWLRLEDRTSHSGELPSGGKSFTVNFAKPGNYNLTLRDKDGLILAGLSHAVSGKGSTAHTGTVDIVADKTLYQPGETAKMLITFPEPIDEALLTLERDRVEQQSLLSHPANWLTLQRLNDTQYEARVPVSNSFAPNITFSVLYTRNGQYSFQNAGIKVAVPQLDIRVKTDKTHYQPGELVNVELTSSLKGKPVSAQLTVGVVDEMIYALQPEIAPNIGKFFYPLGRNNVRTSSSLSFISYDQALSSEPVAPGATNRSERRVKMLERPRREEVDTAAWMPSLTTDKQGKAYFTFLMPDSLTRWRITARGMNGDGLVGQGRAYLRSEKNLYMKWSMPTVYRVGDKPAAGLFIFSQQDNEPVALVTKFAGAEMRQTLTLHKGANYISLTQNIQQSGLLSAELQQNGQVQDSISTKLSFVDNSWPVEQQKNVMLGGGDNALMLPEQASNIRLQSSETPQEIFRNNLDALVDEPWGGVINTGSRLIPLSLAWRSLADHQSAAANDIRQMIQDNRLRLMQLAGPGARFTWWGEDGNGDAFLTAWAWYADWQASQAIGVTQQPEYWQHMLDSYAEQADNMPLLHRALVLAWAQEMNLPCKTLLKGLDEAIARRGTKTEDFSEEDTRDINDSLILDTPESPLADAVANVLTMTLLKKAQLKSTVMPQVQQYAWDKAANSNQPLAHTVVLLNSGGDATQTAAILSGLTAEQSTIERALAMNWLAKYMATMPPVVLPAPAGAWAKHKLTGGGEDWRWVGQGVPDILSFGDELSPQNVQVR

SEQ ID NO: 42810 - protein, 580 aa, Escherichia coli [sequence omitted]

SEQ ID NO: 42811 - protein, 102 aa, Escherichia coli
MHIQRKSTMSKCSADETPVCCCMDVGTIMDNSDCTASYSRVFANRAEAEQTLAALTEKARSVESEPCKITPTFTEESDGVRLDIDFTFACEAEMLIFQLGLR

SEQ ID NO: 42812 - protein, 367 aa, Escherichia coli
MNLLTVSTDLISIFLFTTLFLFFARKVAKKVGLVDKPNFRKRHQGLIPLVGGISVYAGICFTFGIVDYYIPHASLYLACAGVLVFIGALDDRFDISVKIRATIQAAVGIVMMVFGKLYLSSLGYIFGSWEMVLGPFGYFLTLFAVWAAINAFNMVDGIDGLLGGLSCVSFAAIGMILWFDGQTSLAIWCFAMIAAILPYIMLNLGILGRRYKVFMGDAGSTLIGFTVIWILLETTQGKTHPISPVTALWIIAIPLMDMVAIMYRRLRKGMSPFSPDRQHIHHLIMRAGFTSRQAFVLITLAAALLASIGVLAEYSHFVPEWVMLVLFLLAFFLYGYCIKRAWKVARFIKRVKRRLRRNRGGSPNLTK

SEQ ID NO: 42813 - protein, 574 aa, Escherichia coli
MLSPVCPGFVCMRYIKSITQQKLSFLLAIYIGLFMNGAVFYRRFGSYAHDFTVWKGISAVVELAATVLVTFFLLRLLSLFGRRSWRILASLVVLFSAGASYYMTFLNVVIGYGIIASVMTTDIDLSKEVVGLNFILWLIAVSALPLILIWNNRCRYTLLRQLRTPGQRIRSLAVVVLAGIMVWAPIRLLDIQQKKVERATGVDLPSYGGVVANSYLPSNWLSALGLYAWARVDESSDNNSLLNPAKKFTYQAPQNVDDTYVVFIIGETTRWDHMGIFGYERNTTPKLAQEKNLAAFRGYSCDTATKLSLRCMFVRQGGAEDNPQRTLKEQNIFAVLKQLGFSSDLYAMQSEMWFYSNTMADNIAYREQIGAEPRNRGKPVDDMLLVDEMQQSLGRNPDGKHLIILHTKGSHFNYTQRYPRSFAQWKPECIGVDSGCTKAQMINSYDNSVTYVDHFISSVIDQVRDKKAIVFYAADHGESINEREHLHGTPRELAPPEQFRVPMMVWMSDKYLENPANAQAFAQLKKEADMKVPRRHVELYDTIMGCLGYTSPDGGINENNNWCHIPQAKEAAAN

SEQ ID NO: 42814 - protein, 207 aa, Escherichia coli
MAIINTLYLMEKNMPKLILASTSPWRRALLEKLQISFECAAPEVDETPRSDESPRQLVLRLAQEKAQSLASRYPDHLIIGSDQVCVLDGEITGKPLTEENARLQLRKASGNIVTFYTGLALFNSANGHLQTEVEPFDVHFRHLSEAEIDNYVRKEHPLHCAGSFKSEGFGITLFERLEGRDPNTLVGLPLIALCQMLRREGKNPLMG

SEQ ID NO: 42815 - protein, 198 aa, Escherichia coli
MIEFVYPHTQLVAGVDEVGRGPLVGAVVTAAVILDPARPIAGLNDSKKLSEKRRLALYEEIKEKALSWSLGRAEPHEIDELNILHATMLAMQRAVAGLHIAPEYVLIDGNRCPKLPMPAMAVVKGDSRVPEISAASILAKVTRDAEMAALDIVFPQYGFAQHKGYPTAFHLEKLAEHGATEHHRRSFGPVKRALGLAS

SEQ ID NO: 42816 - protein, 258 aa, Escherichia coli
MLRFSANLSMLFGEYDFLARFEKAAQCGFRGVEFMFPYDYDIEELKHVLASNKLEHTLHNLPAGDWAAGERGIACIPGREEEFRDGVAAAIRYARALGNKKINCLVGKTPAGFSSEQIHATLVENLRYAANMLMKEDILLLIEPINHFDIPGFHLTGTRQALKLIDDVGCCNLKIQYDIYHMQRMEGELTNTMTQWADKIGHLQIADNPHRGEPGTGEINYDYLFKVIENSDYNGWVGCEYKPQTTTEAGLRWMDPYR

SEQ ID NO: 42817 - protein, 512 aa, Escherichia coli
MAITKSTPAPLTGGTLWCVTIALSLATFMQMLDSTISNVAIPTISGFLGASTDEGTWVITSFGVANAIAIPVTGRLAQRIGELRLFLLSVTFFSLSSLMCSLSTNLDVLIFFRVVQGLMAGPLIPLSQSLLLRNYPPEKRTFALALWSMTVIIAPICGPILGGYICDNFSWGWIFLINVPMGIIVLTLCLTLLKGRETETSPVKMNLPGLTLLVLGVGGLQIMLDKGRDLDWFNSSTIIILTVVSVISLISLVIWESTSENPILDLSLFKSRNFTIGIVSITCAYLFYSGAIVLMPQLLQETMGYNAIWAGLAYAPIGIMPLLISPLIGRYGNKIDMRLLVTFSFLMYAVCYYWRSVTFMPTIDFTGIILPQFFQGFAVACFFLPLTTISFSGLPDNKFANASSMSNFFRTLSGSVGTSLTMTLWGRRESLHHSQLTATIDQFNPVFNSSSQIMDKYYGSLSGVLNEINNEITQQSLSISANEIFRMAAIAFILLTVLVWFAKPPFTAKGVG

SEQ ID NO: 42818 - protein, 387 aa, Escherichia coli
MEQINSNKKHSNRRKYFSLLAVVLFIAFSGAYAYWSMELEDMISTDDAYVTGNADPISAQVSGSVTVVNHKDTNYVRQGDILVSLDKTDATIALNKAKNNLANIVRQTNKLYLQDKQYSAEVASARIQYQQSLEDYNRRVPLAKQGVISKETLEHTKDTLISSKAALNAAIQAYKANKALVMNTPLNRQPQVVEAADATKEAWLALKRTDIKSPVTGYIAQRSVQVGETVSPGQSLMAVVPARQMWVNANFKETQLTDVRIGQSVNIISDLYGENVVFHGRVTGINMGTGNAFSLLPAQNATGNWIKIVQRVPVEVSLDPKELMEHPLRIGLSMTATIDTKNEDIAEMPELASTVTSMPAYTSKALVIDTSPIEKEISNIISHNGQL

SEQ ID NO: 42819 - protein, 266 aa, Escherichia coli
MLNLTPSAISQSIQKLRVIFPDPLFIRKGQGVTPTAFAMHLHEYISQGLESILGALDIEGSYDKQRTITIATTPSVGALVLPVIYRAIKTHYPQLLLRNPPISDAENQLSQFQTDLIIDNMFCTNRTVQHHVLFTDNMVLICREGNPLLSLEDDRETIDNAAHVLLLPEEQNFSGLRQRVQEMFPDRQINFTSYNILTIAALVANSDMLAIIPSRFYNLFSRCWPLEKLPFPSLNEEQIDFSIHYNKFSLRDPILHGVIDVIRNAF

SEQ ID NO: 42820 - protein, 249 aa, Escherichia coli
MDYVCSVVFICQSFDLIINRRVISFKKNSLFIVSDKIRRELPVCPSKLRIVDIDKKTCLSFFIDVNNELPGKFTLDKNGYIAEEEPPLSLVFSLFEGIKIADSHSLWLKERLCISLLAMFKKRESVNSFILTNINTFTCKITGIISFNIERQWHLKDIAELIYTSESLIKKRLRDEGTSFTEILRDTRMRYAKKLITSNSYSINVVAQKCGYNSTSYFICAFKDYYGVTPSHYFEKIIGVTDGINKTID

SEQ ID NO: 42821 - protein, 152 aa, Escherichia coli
MDSNMAQLKFNSILVVCTGNICRSPIGERLLRKRLPGVKVKSAGVHGLVKHPADATAADVAANHGVSLEGHAGRKLTAEMARNYDLILAMESEHIAQVTAIAPEVRGKTMLFGQWLEQKEIPDPYRKSQDAFEHVYGMLERASQEWAKRLSR

SEQ ID NO: 42822 - protein, 527 aa, Escherichia coli
MNLTLKESLVTRSRVFSPWTAFYFLQSLLINLGLGYPFSLLYTAAFTAILLLLWRTLPRVQKVLVGVSSLVAACYFPFAQAYGAPNFNTLLALHSTNMEESTEILTIFPWYSYLVGLFIFALGVIAIRRKKENEKARWNTFDSLCLVFSVATFFVAPVQNLAWGGVFKLKDTGYPVFRFAKDVIVNNNEVIEEQERMAKLSGMKDTWTVTAVKPKYQTYVVVIGESARRDALGAFGGHWDNTPFASSVNGLIFADYIAASGSTQKSLGLTLNRVVDGKPQFQDNFVTLANRAGFQTWWFSNQGQIGEYDTAIASIAKRADEVYFLKEGNFEADKNTKDEALLDMTAQVLAQEHSQPQLIVLHLMGSHPQACDRTQGKYETFVQSKETSCYLYTMTQTDDLLRKLYDQLRNSGSSFSLVYFSDHGLAFKERGKDVQYLAHDDKYQQNFQVPFMVISSDDKAHRVIKARRSANDFLGFFSQWTGIKAKEINIKYPFISEKKAGPIYITNFQLQKVDYNHLGTDIFDPKP

SEQ ID NO: 42823 - protein, 271 aa, Escherichia coli
MRREMFSTNLIQSNYGDLNIKSLAFDSFKERLQSTMTALTFFISTGQCDCDEIAESNFNYMIAYMSNINYDASKPGAPALSFDTYLQDNVKYRVIINNLYGSEIRIRGINKDFIGMDVTSVFRPEKMTNLISIKNRLVIHYLRTIYYEQNYIHPVGSIFAAIQKNESLLKFPSIISMLNINLLFNPLNLPGMGSGVLEDIMSIPDSSLRKRLGYEVLSFSLQAHSLSQECIDKLDIFFADDLFKYESVCIAAMEHLKSKATAPIQNGPLPA

SEQ ID NO: 42824 - protein, 243 aa, Escherichia coli
MKKLVLAALLASFTFGASAAEKINFGVSATYPPFESIGANNEIVGFDIDLAKALCKQMQAECTFTNHAFDSLIPSLKFRKYDAVISGMDITPERSKQVSFTTPYYENSAVVIAKKDTYKTFADLKGKRIGMENGTTHQKYIQDQHPEVKTVSYDSYQNAFIDLKNGRIDGVFGDTAVVNEWLKTNPQLGVATEKVTDPQYFGTGLGIAVRPDNKALLEKLNNALAAIKADGTYQKISDQWFPQ

SEQ ID NO: 42825 - protein, 502 aa, Escherichia coli
MTEKKYIVALDQGTTSSRAVVMDHDANIISVSQREFEQIYPKPGWVEHDPMEIWATQSSTLVEVLAKADISSDQIAAIGITNQRETTIVWEKETGKPIYNAIVWQCRRTAEICEHLKRDGLEDYIRSNTGLVIDPYFSGTKVKWILDHVEGSRERARRGELLFGTVDTWLIWKMTQGRVHVTDYTNASRTMLFNIHTLDWDDKMLEVLDIPREMLPEVRRSSEVYGQTNIGGKGGTRIPISGIAGDQQAALFGQLCVKEGMAKNTYGTGCFMLMNTGEKAVKSENGLLTTIACGPTGEVNYALEGAVFMAGASIQWLRDEMKLINDAYDSEYFATKVQNTNGVYVVPAFTGLGAPYWDPYARGAIFGLTRGVNANHIIRATLESIAYQTRDVLEAMQADSGIRLHALRVDGGAVANNFLMQFQSDILGTRVERPEVREVTALGAAYLAGLAVGFWQNLDELQEKAVIEREFRPGIETTERNYRYAGWKKAVKRAMAWEEHDE

SEQ ID NO: 42826 - protein, 281 aa, Escherichia coli
MSQTSTLKGQCIAEFLGTGLLIFFGVGCVAALKVAGASFGQWEISVIWGLGVAMAIYLTAGVSGAHLNPAVTIALWLFACFDKRKVIPFIVSQVAGAFCAAALVYGLYYNLFFDFEQTHHIVRGSVESVDLAGTFSTYPNPHINFVQAFAVEMVITAILMGLILALTDDGNGVPRGPLAPLLIGLLIAVIGASMGPLTGFAMNPARDFGPKVFAWLAGWGNVAFTGGRDIPYFLVPLFGPIVGAIVGAFAYRKLIGRHLPCDICVVEEKETTTPSEQKASL

SEQ ID NO: 42827 - protein, 721 aa, Escherichia coli
MPGFTMDTKKIFKHIPWVILGIIGAFCLAVVALRRGEHISALWIVVASVSVYLVAYRYYSLYIAQKVMKLDPTRATPAVINNDGLNYVPTNRYVLFGHHFAAIAGAGPLVGPVLAAQMGYLPGTLWLLAGVVLAGAVQDFMVLFISSRRNGASLGEMIKEEMGPVPGTIALFGCFLIMIIILAVLALIVVKALAESPWGVFTVCSTVPIALFMGIYMRFIRPGRVGEVSVIGIVLLVASIYFGGVIAHDPYWGPALTFKDTTITFALIGYAFVSALLPVWLILAPRDYLATFLKIGVIVGLALGIVVLNPELKMPAMTQYIDGTGPLWKGALFPFLFITIACGAVSGFHALISSGTTPKLLANETDARFIGYGAMLMESFVAIMALVAASIIEPGLYFAMNTPPAGLGITMPNLHEMGGENAPIIMAQLKDVTAHAAATVSSWGFVISPEQILQTAKDIGEPSVLNRAGGAPTLAVGIAHVFHKVLPMADMGFWYHFGILFEALFILTALDAGTRSGRFMLQDLLGNFIPFLKKTDSLVAGIIGTAGCVGLWGYLLYQGVVDPLGGVKSLWPLFGISNQMLAAVALVLGTVVLIKMKRTQYIWVTVVPAVWLLICTTWALGLKLFSTNPQMEGFFYMASQYKEKIANGTDLTAQQIANMNHIVVNNYTNAGLSILFLIVVYSIIFYGFKTWLAVRNSDKRTDKETPYVPIPEGGVKISSHH

SEQ ID NO: 42828 - protein, 316 aa, Escherichia coli
MKELVVVAIGGNSIIKDNASQSIEHQAEAVKAVADTVLEMLASDYDIVLTHGNGPQVGLDLRRAEIAHKREGLPLTPLANCVADTQGGIGYLIQQALNNRLARHGEKKAVTVVTQVEVDKNDPGFAHPTKPIGAFFSDSQRDELQKANPDWCFVEDAGRGYRRVVASPEPKRIVEAPAIKALIQQGFVVIGAGGGGIPVVRTDAGDYQSVDAVIDKDLSTALLAREIHADILVITTGVEKVCIHFGKPQQQALDRVDIATMTRYMQEGHFPPGSMLPKIIASLTFLEQGGKEVIITTPECLPAALRGETGTHIIKT

SEQ ID NO: 42829 - protein, 247 aa, Escherichia coli
MSNWPYPRIVAHRGGGKLAPENTLASIDVGAKYGHKMIEFDAKLSKDGEIFLLHDDNLERTSNGWGVAGELNWQDLLRVDAGSWYSKMFKGEPLPLLSQVAERCREHGMMANIEIKPTTGTGPLTGKMVALAARELWAGMTPPLLSSFEIDALEAAQQAAPELPRGLLLDEWRDDWRELTARLGCVSIHLNHKLLNKARVMQLKDAGLRILVYTVNKPQRAAELLRWGVDCICTDAIDVIGPNFTAQ

SEQ ID NO: 42830 - protein, 135 aa, Escherichia coli
MVLWQSDLRVSWRAQWLSLLIHGLVAAVILLMPWPLSYTPLWMVLLSLVVFDCVRSQRRINARQGEIRLLMDGRLRWQGQEWSIVKAPWMIKSGMMLRLRSDGGKRQHLWLAADSMDEAEWRDLRRILLQQETQR

SEQ ID NO: 42831 - protein, 88 aa, Escherichia coli
MDINNKARIHWACRRGMRELDISIMPFFEHEYDSLSDDEKRIFIRLLECDDPDLFNWLMNHGKPADAELEMMVRLIQTRNRERGPVAI

SEQ ID NO: 42832 - protein, 166 aa, Escherichia coli
MLPRIRHNNFIGAVELFVKSSYTKTHSNNFFNNIHHAFKKKDWISNYDSLLTLREFFRCATQIDKSGYQVLSSKNETVHAMDKFLISFSLKDNGAEYTMTLRGSGFEYEEIPITINEYNSFMDFKNREFPLEQTDDCMPGIFYRKNSLTYRKGLKVIFTRRLVTCL

SEQ ID NO: 42833 - protein, 342 aa, Escherichia coli
MRVLLFLLLSLFMLPAFSADNLLRWHDAQHFTVQASTPLKAKRAWKLCALYPSLKDSYWLSLNYGMQEAARRYGVDLKVLEAGGYSQLATQQAQIDQCKQWGAEAILLGSSTTSFPDLQKQVASLPVIELVNAIDAPQVKSRVGVPWFQMGYQPGRYLVQWAHGKPLNVLLMPGPDNAGGSKEMVEGFRAAIAGSPVRIVDIALGDNDIEIQRNLLQEMLERHPEIDVVAGTAIAAEAAMGEGRNLKTPLTVVSFYLSHQVYRGLKRGRVIMAASDQMVWQGELAVEQAIRQLQGQSVSDNVSPPILVLTPKNADREHIRRSLSPGGFRPVYFYQHTSAAKK

SEQ ID NO: 42834 - protein, 266 aa, Escherichia coli [sequence omitted]

SEQ ID NO: 42835 - protein, 957 aa, Escherichia coli
MTQTLSQLENSGAFIERHIGPDAAQQQEMLNAVGAQSLNALTGQIVPKDIQLATPPQVGAPATEYAALAELKAIASRNKRFTSYIGMGYTAVQLPPVILRNMLENPGWYTAYTPYQPEVSQGRLEALLNFQQVTLDLTGLDMASASLLDEATAAAEAMAMAKRVSKLKNANRFFVASDVHPQTLDVVRTRAETFGFEVIVDDAQKVLDHQDVFGVLLQQVGTTGEIHDYTALISELKSRKIVVSVAADIMALVLLTAPGKQGADIVFGSAQRFGVPMGYGGPHAAFFAAKDEYKRSMPGRIIGVSKDAAGNTALRMAMQTREQHIRREKANSNICTSQVLLANIASLYAVYHGPVGLKRIANRIHRLTDILAAGLQQKGLKLRHAHYFDTLCVEVADKAGVLTRAEAAEINLRSDILNAVGITLDETTTRENVMQLFNVLLGDNHGLDIDTLDKDVAHDSRSIQPAMLRDDEILTHPVFNRYHSETEMMRYMHSLERKDLALNQAMIPLGSCTMKLNAAAEMIPITWPEFAELHPFCPPEQAEGYQQMIAQLADWLVKLTGYDAVCMQPNSGAQGEYAGLLAIRHYHESRNEGHRDICLIPASAHGTNPASAHMAGMQVVVVACDKNGNIDLTDLRAKAEQAGDNLSCIMVTYPSTHGVYEETIREVCEVVHQFGGQVYLDGANMNAQVGITSPGFIGADVSHLNLHKTFCIPHGGGGPGMGPIGVKAHLAPFVPGHSVVQIEGMLTRQGAVSAAPFGSASILPISWMYIRMMGAEGLKKASQVAILNANYIASRLQDAFPVLYTGRDGRVAHECILDIRPLKEETGISELDIAKRLIDYGFHAPTMSFPVAGTLMVEPTESESKVELDRFIDAMLAIRAEIDQVKAGVWPLEDNPLVNAPHIQSELVAEWAHPYSREVAVFPAGVADKYWPTVKRLDDVYGDRNLFCSCVPISEYQ

SEQ ID NO: 42836 - protein, 557 aa, Escherichia coli
MTESFAQLFEESLKEIETRPGSIVRGVVVAIDKDVVLVDAGLKSESAIPAEQFKNAQGELEIQVGDEVDVALDAVEDGFGETLLSREKAKRHEAWITLEKAYEDAETVTGVINGKVKGGFTVELNGIRAFLPGSLVDVRPVRDTLHLEGKELEFKVIKLDQKRNNVVVSRRAVIESENSAERDQLLENLQEGMEVKGIVKNLTDYGAFVDLGGVDGLLHITDMAWKRVKHPSEIVNVGDEITVKVLKFDRERTRVSLGLKQLGEDPWVAIAKRYPEGTKLTGRVTNLTDYGCFVEIEEGVEGLVHVSEMDWTNKNIHPSKVVNVGDVVEVMVLDIDEERRRISLGLKQCKANPWQQFAETHNKGDRVEGKIKSITDFGIFIGLDGGIDGLVHLSDISWNVAGEEAVREYKKGDEIAAVVLQVDAERERISLGVKQLAEDPFNNWVALNKKGAIVTGKVTAVDAKGATVELADGVEGYLRASEASRDRVEDATLVLSVGDEVEAKFTGVDRKNRAISLSVRAKDEADEKDAIATVNKQEDANFSNNAMAEAFKAAKGE

SEQ ID NO: 42837 - protein, 265 aa, Escherichia coli
MLLLAGKRPYNPSNSFFISGSIMSATDRYSHQLLYATVRQRLLDDIAQGVYQAGQQIPTENELCTQYNVSRITIRKAISDLVADGVLIRWQGKGTFVQSQKVENALLTVSGFTDFGVSQGKATKEKVIEQERVSAAPFCEKLNIPGNSEVFHLCRVMYLDKEPLFIDSSWIPLSRYPDFDEIYVEGSSTYQLFQERFDTRVVSDKKTIDIFAATRPQAKWLKCELGEPLFRISKIAFDQNDKPVHVSELFCRANRITLTIDNKRH

SEQ ID NO: 42838 - protein, 810 aa, Escherichia coli
MTTLKLDTLSDRIKAHKNALVHIVKPPVCTERAQHYTEMYQQHLDKPIPVRRALALAHHLANRTIWIKHDELIIGNQASEVRAAPIFPEYTVSWIEKEIDDLADRPGAGFAVSEENKRVLHEVCPWWRGQTVQDRCYGMFTDEQKGLLATGIIKAEGNMTSGDAHLAVNFPLLLEKGLDGLREEVAERRSRINLTVLEDLHGEQFLKAIDIVLVAVSEHIERFAALAREMAATETRESRRDELLAMAENCDLIAHQPPQTFWQALQLCYFIQLILQIESNGHSVSFGRMDQYLYPYYRRDVELNQTLDREHAIEMLHSCWLKLLEVNKIRSGSHSKASAGSPLYQNVTIGGQNLVDGQPMDAVNPLSYAILESCGRLRSTQPNLSVRYHAGMSNDFLDACVQVIRCGFGMPAFNNDEIVIPEFIKLGIEPQDAYDYAAIGCIETAVGGKWGYRCTGMSFINFARVMLAALEGGHDATSGKVFLPQEKALSAGNFNNFDEVMDAWDTQIRYYTRKSIEIEYVVDTMLEENVHDILCSALVDDCIERAKSIKQGGAKYDWVSGLQVGIANLGNSLAAVKKLVFEQGAIGQQQLAAALADDFDGLTHEQLRQRLINGAPKYGNDDDTVDTLLARAYQTYIDELKQYHNPRYGRGPVGGNYYAGTSSISANVPFGAQTMATPDGRKAHTPLAEGASPASGTDHLGPTAVIGSVGKLPTAAILGGVLLNQKLNPATLENESDKQKLMILLRTFFEVHKGWHIQYNIVSRETLLDAKKHPDQYRDLVVRVAGYSAFFTALSPDAQDDIIARTEHML

SEQ ID NO: 42839 - protein, 898 aa, Escherichia coli
MFKEIFTRLIRHLPSRLVHRDPLPGAQQTVNTVVPPSLSAHCLKMAVMPEEELWKTFDTHPEGLNQAEVESAREQHGENKLPAQQPSPWWVHLWVCYRNPFNILLTILGAISYATEDLFAAGVIALMVAISTLLNFIQEARSTKAADALKAMVSNTATVLRVINDKGENGWLEIPIDQLVPGDIIKLAAGDMIPADLRILQARDLFVAQASLTGESLPVEKAATTRQPEHSNPLECDTLCFMGTTVVSGTAQAMVIATGANTWFGQLAGRVSEQESEPNAFQQGISRVSMLLIRFMLVMAPVVLLINGYTKGDWWEAALFALSVAVGLTPEMLPMIVTSTLARGAVKLSKQKVIVKHLDAIQNFGAMDILCTDKTGTLTQDKIVLENHTDISGKTSERVLHSAWLNSHYQTGLKNLLDTAVLEGTDEESARSLASRWQKIDEIPFDFERRRMSVVVAENTEHHQLVCKGALQEILNVCSQVRHNGEIVPLDDIMLRKIKRVTDTLNRQGLRVVAVATKYLPAREGDYQRADESDLILEGYIAFLDPPKETTAPALKALKASGITVKILTGDSELVAAKVCHEVGLDAGEVVIGSDIETLSDDELANLAQRTTLFARLTPMHKERIVTLLKREGHVVGFMGDGINDAPALRAADIGISVDGAVDIAREAADIILLEKSLMVLEEGVIEGRRTFANMLKYIKMTASSNFGNVFSVLVASAFLPFLPMLPLHLLIQNLLYDVSQVAIPFDNVDDEQIQKPQRWNPADLGRFMIFFGPISSIFDILTFCLMWWVFHANTPETQTLFQSGWFVVGLLSQTLIVHMIRTRRVPFIQSCASWPLMIMTVIVMIVGIALPFSPLASYLQLQALPLSYFPWLVAILAGYMTLTQLVKGFYSRRYGWQ

SEQ ID NO: 42840 - protein, 62 aa, Escherichia coli
MHSAMGKLWFIVGLVASRYYIAIDATNIIGFSLLFAALFSLTGGYMEPDPTPLPRRRLKLFR

SEQ ID NO: 42841 - protein, 268 aa, Escherichia coli
MTGDKEIITMAFKIWQIGLHLQQQEAVAVAIVRGAKECFLQRWWRLPLENDIIKDGRIVDAQQLAKTLLPWSRELPQRHHIMLAFPASRTLQRSFPRPSMSLGEREQTAWLSGTMARELDMDPDSLRFDYSEDSLSPAYNVTAAQSKELATLLTLAERLRVHVSAITPDASALQRFLPFLPSHQQCLAWRDNEQWLWATRYSWGRKLAVGMTSAKELAAALSVDPESVAICGEGGFDPWEAVSVRQPPLPPPGGDFAIALGLALGKAY

SEQ ID NO: 42842 - protein, 230 aa, Escherichia coli
MKKINAIILLSSLTSASVFAGAYVENREAYNLASDQGEVMLRVGYNFDMGAGIMLTNTYNFQREDELKHGYNEIEGWYPLFKPTDKLTIQPGGLINDKSIGSGGAVYLDVNYKFVPWFNLTVRNRYNHNNYSSTDLSGELDNNDTYEIGTYWNFKITDKFSYTFEPHYFMRVNDFNSSNGKDHHWEITNTFRYRINEHWLPYFELRWLDRNVEPYHREQNQIRIGTKYFF

SEQ ID NO: 42843 - protein, 831 aa, Escherichia coli
MLTIQFLCPLPNGLHARPAWELKEQCSQWQSEITFINHRQNAKADAKSSLALIGTGTLFNDSCSLNISGSDEEQARRVLEEYIQVRFIDSDSVQPTQAELTAHPLPRSLSRLNPDLLYGNVLASGVGVGTLTLLQSDSLDSYRAIPASAQDSTRLEHSLATLAEQLNQQLRERDGESKTILSAHLSLIQDDEFAGNIRRLMTEQHQGLGAAIISNMEQVCAKLSASASDYLRERVSDIRDISEQLLHITWPELKPRNKLVLEKPTILVAEDLTPSQFLSLDLKNLAGMILEKTGRTSHTLILARASAIPVLSGLPLDAIARYAGQPAVLDAQCGVLAINPNDAVSGYYQVAQTLADKRQKQQAQAAAQLAYSRDNKRIDIAANIGTALEAPGAFANGAEGVGLFRTEMLYMDRDSAPDEQEQFEAYQQVLLAAGDKPIIFRTMDIGGDKSIPYLNIPQEENPFLGYRAVRIYPEFAGLFRTQLRAILRAASFGNAQLMIPMVHSLDQILWVKGEIQKAIVELKRDGLRHAETITLGIMVEVPSVCYIIDHFCDEVDFFSIGSNDMTQYLYAVDRNNPRVSPLYNPITPSFLRMLQQIVTTAHQRGKWVGICGELGGESRYLPLLLGLGLDELSMSSPRIPAVKSQLRQLDSEACRELARQACECRSAQEIEALLTAFTPEEDVRPLLALENIFVDQDFSNKEQAIQFLCGNLGVNGRTEHPFELEEDVWQREEIVTTGVGFGVAIPHTKSQWIRHSSISIARLAKPIGWQSEMGEVELVIMLTLGANEGMNHVKVFSQLARKLVNKNFRQSLFAAQDAQSILTLLETELTF

SEQ ID NO: 42844 - protein, 645 aa, Escherichia coli
MLLPEKPEIAHEIAQRLLGQKKLPSLEWLKIVATDEHILASLEKYHEPYAIFDDYYCGAIWSATVLQEQGVAALPRFAPYAASDYCADVLRHINHPFALTLLIRVAGQTKRCHDRMTKAIAAFPHAAMAALTELLGQKEENSWRIMLMTMLISQPALAEQVIPWLSTPAVAVLKSCQQQLTQPSNHASADLLPAVVVSPPWLSKKKKSPIPVLDLAPLGIEPICYLTEEISNQLLAKYIWYSKHITVSHEESTTNLLARMGFQRRIAGTYIKAPEAVVEAWLNEDYSTLLSEFKVFHSPTGHYWQLGILTTLPLEKAVKAWNALTLSPHTDTEYSMLHFGLKGLPGLVNSLARYPQEALPITNYFAASELAPAVARAFNKLKTLRENARSWLLKYPEHALTGLLPAALGKAGEAQDNARAALRMLTENGHQPLLQEIARRYNQPEVTDAVNALLALDPLDNHPTKIPTLPAFYQPSLWTRPVLKANAQSLPDSALLHLGEMLRFPQEEALYPGLLQVKDVCSADSLAGFAWDLFTAWQTAGAPSKESWAFTALGVLGNDDTARKLTPLIRAWPGESQHKRATVGLDILAAIGSDIALMQLNGIAQKLKFKALQERAKEKIADIAESRELTVAELEDRVSTGSRSG

SEQ ID NO: 42845 - protein, 394 aa, Escherichia coli
MQKTATTPSKILDLTAAAFLLVAFLTGIAGALQTPTLSIFLADELKARPIMVGFFFTGSAIMGILVSQFLARHSDKQGDRKLLILLCCLFGVLACTLFAWNRNYFILLSTGVLLSSFASTANPQMFALAREHADRTGRETVMFSTFLRAQISLAWVIGPPLAYELAMGFSFKVMYLTAAIAFVVCGLIVWLFLPSIQRNIPVVTQPVEILPSTHRKRDTRLLFVVCSMMWAANNLYMINMPLFIIDELHLTDKLTGEMIGIAAGLEIPMMLIAGYYMKRIGKRLLMLIAIVSGMCFYASVLMATTPAVELELQILNAIFLGILCGIGMLYFQDLMPEKIGSATTLYANTSRVGWIIAGSVDGIMVEIWSYHALFWLAIGMLGIAMICLLFIKDI

SEQ ID NO: 42846 - protein, 444 aa, Escherichia coli
MSSAKKIGLFACTGVVAGNMMGSGIALLPANLASIGGIAIWGWIISIIGAMSLAYVYARLATKNPQQGGPIAYAGEISPAFGFQTGVLYYHANWIGNLAIGITAVSYLSTFFPVLNDPVPAGIACIAIVWVFTFVNMLGGTWVSRLTTIGLVLVLIPVVMTAIVGWHWFDAATYAANWNTADTTDGHAIIKSILLCLWAFVGVESAAVSTGMVKNPKRTVPLATMLGTGLAGIVYIAATQVLSGMYPSSVMAASGAPFAISASTILGNWAAPLVSAFTAFACLTSLGSWMMLVGQAGVRAANDGNFPKVYGEVDSNGIPKKGLLLAAVKMTALMILITLMNSAGGKASDLFGELTGIAVLLTMLPYFYSCVDLIRFEGVNIRNFVSLICSVLGCVFCFIALMGASSFELAGTFIVSLIILMFYARKMHERQSHSMDNHTASNAH

SEQ ID NO: 42847 - protein, 325 aa, Escherichia coli
MACGEFSLIARYFDRVRSSRLDVELGIGDDCALLNIPEKQTLAISTDTLVAGNHFLPDIDPADLAYKALAVNLSDLAAMGADPAWLTLALTLPDVDEAWLESFSDSLFDLLNYYDMQLIGGDTTRGPLSMTLGIHGFVPMGRALTRSGAKPGDWIYVTGTPGDSAAGLAILQNRLQVADAKDADYLIKRHLRPSPRILQGQALRDLANSAIDLSDGLISDLGHIVKASDCGARIDLALLPFSDALSRHVEPEQALRWALSGGEDYELCFTVPELNRGALDVALGHLGVPFTCIGQMTADIEGLCFIRDGEPVTLDWKGYDHFATP

SEQ ID NO: 42848 - protein, 427 aa, Escherichia coli
MTWFIDRRLNGKNKSMVNRQRFLRRYKAQIKQSISEAINKRSVTDVDSGESVSIPTEDISEPMFHQGRGGLRHRVHPGNDHFVQNDRIERPQGGGGGSGSGQGQASQDGEGQDEFVFQISKDEYLDLLFEDLALPNLKQNQQRQLTEYKTHRAGYTANGVPANISVVRSLQNSLARRTAMTAGKRRELHALEENLAIISNSEPAQLLEEERLRKEIAELRAKIERVPFIDTFDLRYKNYEKRPDPSSQAVMFCLMDVSGSMDQSTKDMAKRFYILLYLFLSRTYKNVEVVYIRHHTQAKEVDEHEFFYSQETGGTIVSSALKLMDEVVKERYNPAQWNIYAAQASDGDNWADDSPLCHEILAKKLLPVVRYYSYIEITRRAHQTLWREYEHLQSTFDNFAMQHIRDQDDIYPVFRELFHKQNATAKG

SEQ ID NO: 42849 - protein, 491 aa, Escherichia coli
MIQSTRISMGLFFKYFLSLTKIDPGQNYISLPSIKSSTHIALLFMVSMGTQKLKAQSFFIFSLLLTLILFCITTLYNENTNVKLIPQMNYLMVVVALFFLNAVIFLFMLMKYFTNKQILPTLILSLAFLSGLIYLVETIVIIHKPINGSTLIQTKSNDVSIFYIFRQLSFICLTSLALFCYGKDNILDNNKKKTGILLLALIPFLVFPLLAHNLSSYNADYSLYVVDYCPDNHTATWGINYTKILVCLWAFLLFFIIMRTRLASELWPLIALLCLASLCCNLLLLTLDEYNYTIWYISRGIEVSSKLFVVSFLIYNIFQELQLSSKLAVHDVLTNIYNRRYFFNSVESLLSRPVVKDFCVMLVDINQFKRINAQWGHRVGDKVLVSIVDIIQQSIRPDDILARLEGEVFGLLFTELNSAQAKIIAERMRKNVELLTGFSNRYDVPEQMTISIGTVFSTGDTRNISLVMTEADKALREAKSEGGNKVIIHHI

SEQ ID NO: 42850 - protein, 231 aa, Escherichia coli
MFRKLAAECFGTFWLVFGGCGSAVLAAGFPELGIGFAGVALAFGLTVLTMAFAVGHISGGHFNPAVTIGLWAGGRFPAKEVVGYVIAQVVGGIVAAALLYLIASGKTGFDAAASGFASNGYGEHSPGGYSMLSALVVELVLSAGFLLVIHGATDKFAPAGFAPIAIGLALTLIHLISIPVTNTSVNPARSTAVAIFQGGWALEQLWFFWVVPIVGGIIGGLIYRTLLEKRD

SEQ ID NO: 42851 - protein, 361 aa, Escherichia coli
MFKRRYVTLLPLFVLLAACSSKPKPTETDTTTGTPSGGFLLEPQHNVMQMGGDFANNPNAQQFIDKMVNKHGFDRQQLQEILSQAKRLDSVLRLMDNQAPTTSVKPPSGPNGAWLRYRKKFITPDNVQNGVVFWNQYEDALNRAWQVYGVPPEIIVGIIGVETRWGRVMGKTRILDALATLSFNYPRRAEYFSGELETFLLMARDEQDDPLNLKGSFAGAMGYGQFMPSSYKQYAVDFSGDGHINLWDPVDAIGSVANYFKAHGWVKGDQVAVMANGQAPGLPNGFKTKYSISQLAAAGLTPQQPLGNHQQASLLRLDVGTGYQYWYGLPNFYTITRYNHSTHYAMAVWQLGQAVALARVQ

SEQ ID NO: 42852 - protein, 2383 aa, Escherichia coli
MLSVFTFFRCARKGAFMLARSGKVSMATKKRSGEEINDRQILCGMGIKLRRLTAGICLITQLAFPMAAAAQGVVNAATQQPVPAQIAIANANTVPYTLGALESAQSVAERFGISVAELRKLNQFRTFARSFDNVRQGDELDVPAQVSEKKLTPPPGNSSDNLEQQIASTSQQIGSLLAEDMNSEQAANMARGWASSQASGAMTDWLSRFGTARITLGVDEDFSLKNSQFDFLHPWYETPDNLFFSQHTLHRTDERTQINNGLGWRHFTPTWMSGINFFFDHDLSRYHSRAGIGAEYWRDYLKLSSNGYLRLTNWRSAPELDNDYEARPANGWDVRAESWLPAWPHLGGKLVYEQYYGDEVALFDKDDRQSNPHAITAGLNYTPFPLMTFSAEQRQGKQGENDTRFAVDFTWQPGSAMQKQLDPNEVAARRSLAGSRYDLVDRNNNIVLEYRKKELVRLTLTDPVTGKSGEVKSLVSSLQTKYALKGYNVEATALEAAGGKVVTTGKDILVTLPAYRFTSTPETDNTWPIEVTAEDVKGNLSNREQSMVVVQAPTLSQKDSSVSLSTQTLNADSHSTATLTFIAHDAAGNPVVGLVLSTRHEGVQDITLSDWKDNGDGSYTQILTTGAMSGTLTLMPQLNGVDAAKAPAVVNIISVSSSRTHSSIKIDKDRYLSGNPIEVTVELRDENDKPVKEQKQQLNNAVSIDNVKPGVTTDWKETADGVYKATYTAYTKGSGLTAKLLMQNWNEDLHTAGFIIDANPQSAKIATLSASNNGVLANENAANTVSVNVADEGSNPINDHTVTFAVLSGSATSFNNQNTAKTDVNGLATFDLKSSKQEDNTVEVTLENGVKQTLIVSFVGDSSTAQVDLQKSKNEVVADGNDSVTMTATVRDAKGNLLNDVMVTFNVNSAEAKLSQTEVNSHDGIATATLTSLKNGDYRVTASVSSGSQANQQVNFIGDQSTAALTLSVPSGDITVTNTAPQYMTATLQDKNGNPLKDKEITFSVPNDVASKFSISNGGKGMTDSNGVAIASLTGTLAGTHMIMARLANSNVSDAQPMTFVADKDRAVVVLQTSKAEIIGNGVDETTLTATVKDPSNHPVAGITVNFTMPQDVAANFTLENNGIAITQANGEAHVTLKGKKAGTHTVTATLGNNNTSDSQPVTFVADKASAQVVLQISKDEITGNGVDSATLTATVKDQFDNEVNNLPVTFSSASSGLTLTPGVSNTNESGIAQATLAGVAFGEKTVTASLANNGASDNKTVHFIGDTAAAKIIELAPVPDSIIAGTPQNSSGSVITATVVDNNGFPVKGVTVNFTSNAATAEMTNGGQAVTNEQGKATVTYTNTRSSIESGARPDTVEASLENGSSTLSTSINVNADASTAHLTLLQALFDTVSAGETTSLYIEVKDNYGNGVPQQEVTLSVSPSEGVTPSNNAIYTTNHDGNFYASFTATKAGVYQLTATLENGDSMQQTVTYVPNVANAEITLAASKDPVIADNNDLTTLTATVADTEGNAIANTEVTFTLPEDVKANFTLSDGGKVITDAEGKAKVTLKGTKAGAHTVTASMTGGKSEQLVVNFIADTLTAQVNLNVTEDNFIANNVGMTRLQATVTDGNGNPLANEAVTFTLPADVSASFTLGQGGSAITDINGKAEVTLSGTKSGTYPVTVSVNNYGVSDTKQVTLIADAGTAKLASLTSVYSFVVSTTEGATMTASVTDANGNPVEGIKVNFRGTSVTLSSTSVETDDRGFAEILVTSTEVGLKTVSASLADKPTEVISRLLNASADVNSATITSLEIPEGQVMVAQDVAVKAHVNDQFGNPVAHQPVTFSAEPSSQMIISQNTVSTNTQGVAEVTMTPERNGSYMVKASLPNGASLEKQLEAIDEKLTLTASSPLIGVYAPTGATLTATLTSANGTPVEGQVINFSVTPEGATLSGGKVRTNSSGQAPVVLTSNKVGTYTVTASFHNGVTIQTQTTVKVTGNSSTAHVASFIADPSTIAATNTDLSTLKATVEDGSGNLIEGLTVYFALKSGSATLTSLTAVTDQNGIATTSVKGAMTGSVTVSAVTTAGGMQTVDITLVAGPADTSQSVLKSNRSSLKGDYTDSAELRLVLHDISGNPIKVSEGMEFVQSGTNVPYIKISAIDYSLNINGDYKATVTGGGEGIATLIPVLNGVHQAGLSTTIQFTRAEDKIMSGTVSVNGTDLPTTTFPSQGFTGAYYQLNNDNFAPGKTAADYEFSSSASWVDVDATGKVTFKNVGSNSERITATPKSGGPSYVYEIRVKSWWVNAGEAFMIYSLAENFCSSNGYTLPRANYLNHCSSRGIGSLYSEWGDMGHYTTDAGFQSNMYWSSSPANSSEQYVVSLATGDQSVFEKLGFAYATCYKNL

SEQ ID NO: 42853 - protein, 1335 aa, Escherichia coli
MLARSGKVSMATKKRSGEEINDRQILCGMGIKLRRLTAGICLITQLVFPMAAAAQGVVNAATQQPVPAQIAIANANTVPYTLGALESAQSVAERFGISVAELRKLNQFRTFARGFDNVRQGDELDVPAQVSENNLTPPPGNSSGNLEQQIASTSQQIGSLLAEDMNSEQAANMARGWASSQASGAMTDWLSRFGTARITLGVDEDFSLKNSQFDFLHPWYETPDNLFFSQHTLHRTDERTQINNGLGWRHFTPTWMSGINFFFDHDLSRYHSRAGIGAEYWRDYLKLSSNGYLRLTNWRSAPELDNDYEARPANGWDVRAEGWLPAWPHLGGKLVYEQYYGDEVALFDKDDRQSNPHAITAGLNYTPFPLMTFSAEQRQGKQGENDTRFAVDFTWQPGSAMQKQLDPNEVDARRSLAGSRFDLVDRNNNIVLEYRKKELVRLTLTDPVTGKSGEVKSLVSSLQTKYALKGYNVEATALEAAGGKVVTTGKDILVTLPAYRFTSTPETDNTWPIEVTAEDVKGNFSNREQSMVVVQAPTLSQKDSSVSLSSQTLSADSHSTATLTFIAHDAAGNPVIGLVLSTRHEGVQDITLSDWKDNGDGSYTQILTTGAMSGTLTLMPQLNGVDAAKAPAVVNIISVSSSRTHSSIKIDKDRYLSGNPIEVTVELRDENDKPVKEQKQQLNTAVSIDNVKPGVTTDWKETADGVYKATYTAYTKGSGLTAKLLMQNWNEDLHTAGFIIDANPQSAKIATLSASNNGVLANENAANTVSVNVADEGSNPINDHTVTFAVLSGSATSFNNQNTAKTDVNGLATFDLKSSKQEDNTVEVTLENGVKQTLIVSFVGDSSTAQVDLQKSKNEVVADGNDSATMTATVRDAKGNLLNDVKVTFNVNSAAAKLSQTEVNSHDGIATATLTSLKNGDYTVTASVSSGSQANQQVIFIGDQSTAALTLSVPSGDITVTNTAPLHMTATLQDKNGNPLKDKEITFSVPNDVASRFSISNSGKGMTDSNGTAIASLTGTLAGTHMITARLANSNVSDTQPMTFVADKDRAVVVLQTSKAEIIGNGVDETTLTATVKDPFDNVVKNLSVVFRTSPADTQLSLNARNTNENGIAEVTLKGTVLGVHTAEAILLNGNRDTKIVNIAPDASNAQVTLNIPAQQVVTNNSDSVQLTATVKDPSNHPVAGITVNFTMPQDVAANFTLENNGIAITQANGEAHVTLKGKKAGTHTVTATLGNNNASDAQPVTFVADKDSAVVVLQTSKAEIIGNGVDETTLTATVKDPFDNAVKDLQVTFSTNPADTQLSQSKSNTNDSGVAEVTFKGTGFGCSYSRSHTA

SEQ ID NO: 42854 - protein, 441 aa, Escherichia coli
MINRIVSFFILCLVLCIPLCVAYFHSGELMMRFVFFWPFFMSIMWIVGGVYFWVYRERHWPWGENAPAPQLKDNPSISIIIPCFNEEKNVEETIHAALAQRYENIEVIAVNDGSTDKTRAILDRMAAQIPHLRVIHLAQNQGKAIALKTGAAAAKSEYLVCIDGDALLDRDAAAYIVEPMLYNPRVGAVTGNPRIRTRSTLVGKIQVGEYSSIIGLIKRTQRIYGNVFTVSGVIAAFRRSALAEVGYWSDDMITEDIDISWKLQLNQWTIFYEPRALCWILMPETLKGLWKQRLRWAQGGAEVFLKNMTRLWRKENFRMWPLFFEYCLTTIWAFTCLVGFIIYAVQLAGVPLNIELTHIAATHTAGILLCTLCLLQFIVSLMIENRYEHNLTSSLFWIIWFPVIFWMLSLATTLVSFTRVMLMPKKQRARWVSPDRGILRG

SEQ ID NO: 42855 - protein, 672 aa, Escherichia coli
MLRNGNKYLLMLVSIIMLTACISQSRTSFIPPQDRESLLAEQPWPHNGFVAISWHNVEDEAADQRFMSVRTSALREQFAWLRENGYQPVSIAQIREAHRGGKPLPEKAVVLTFDDGYQSFYTRVFPILQAFQWPAVWAPVGSWVDTPADKQVKFGDELVDREYFATWQQVREVARSRLVELASHTWNSHYGIQANATGSLLPVYVNRAYFTDHARYETAAEYRERIRLDAVKMTEYLRTKVEVNPHVFVWPYGEANGIAIEELKKLGYDMFFTLESGLANASQLDSIPRVLIANNPSLKEFAQQIITVQEKSPQRIMHIDLDYVYDENLQQMDRNIDVLIQRVKDMQISTVYLQAFADPDGDGLVKEVWFPNRLLPMKADIFSRVAWQLRTRSGVNIYAWMPVLSWDLDPTLTRVKYLPTGEKKAQIHPEQYHRLSPFDDRVRAQVGMLYEDLAGHAAFDGILFHDDALLSDYEDASAPAITAYQQAGFSGSLSEIRQNPEQFKQWARFKSRALTDFTLELSARVKAIRGPHIKTARNIFALPVIQPESEAWFAQNYADFLKSYDWTAIMAMPYLEGVAEKSADQWLIQLTNQIKNIPQAKDKSILELQAQNWQKNGQHQAISSQQLAHWMSLLQLNGVKNYGYYPDNFLHNQPEIDLIRPEFSTAWYPKND

SEQ ID NO: 42856 - protein, 165 aa, Escherichia coli
MALNLQDKQAIVAEVSEVAKGALSAVVADSRGVTVDKMTELRKAGREAGVYMRVVRNTLLRRAVEGTPFECLKDAFVGPTLIAYSMEHPGAAARLFKEFAKANAKFEVKAAAFEGELIPASQIDRLATLPTYEEAIARLMATMKEASAGKLVRTLAAVRDAKEAA

SEQ ID NO: 42857 - protein, 782 aa, Escherichia coli
MLSLYEKIKIRLIILFLLAALSFIGLFFIINYQLVSERAVKRADSRFELIQKNVGYFFKDIERSALTLKDSLYLLKNTEEIQRAVILKMEMMPFLDSVGLVLDDNKYYLFSRRANDKIVVYHQEQVNGPLVDESGRVIFADFNPSKRPWSVASDDSNNSWNPAYNCFDRPGKKCISFTLHINGKDHDLLAVDKIHVDLNWRYLNEYLDQISANDEVLFLKQGHEIIAKNQLAREKLIIYNSEGNYNIIDSVDTEYIEKTSAVPNNALFEIYFYYPGGNLLNASDKLFYLPFAFIIIVLLVVYLMTTRVFRRQFSEMTELVNTLAFLPDSTDQIEALKIREGDAKEIISIKNSIAEMKDAEIERSNKLLSLISYDQESGFIKNMAIIESNNNQYLAVGIIKLCGLEAVEAVFGVDERNKIVRKLCQRIAEKYAQCCDIVTFNADLYLLLCRENVQTFTRKIAMVNDFDSSFGYRNLRIHKSAICEPLQGENAWSYAEKLKLAISSIRDHMFSEFIFCDDAKLNEIEENIWIARNIRHAMEIGELFLVYQPIVDINTRAILGAEALCRWVSAERGIISPLKFITIAEDIGFINELGYQIIKTAMGEFRHFSQRASLKDDFLLHINVSPWQLNEPHFHERFTTIMKENGLKANSLCVEITETVIERINEHFYLNIEQLRKQGVRISIDDFGTGLSNLKRFYEINPDSIKVDSQFTGDIFGTAGKIVRIIFDLARYNRIPVIAEGVESEDVARELIKLGCVQAQGYLYQKPMPFSAWDKSGKLVKE

SEQ ID NO: 42858 - protein, 442 aa, Escherichia coli
MSRINKFVLTVSLLIFIMISAVACGIYTQMVKERVYSLKQSVIDTAFAVANIAEYRRSVAIDLINTLNPTEEQLLVGLRTAYADSVSPSYLYDVGPYLISSDECIQVKEFEKNYCADIMQVVKYRHVKNTGFISFDGKTFVYYLYPVTHNRSLIFLLGLERFSLLSKSLAMDSENLMFSLFKNGKPVTGDEYNAKNAIFTVSEAMEHFAYLPTGLYVFAYKKDVYLRVCTLIIFFAALVAVISGASCLYLVRRVINRGIVEKEAIINNHFERVLDGGLFFSAADVKKLYSMYNSAFLDDLTKAMGRKSFDEDLKALPEKGGYLCLFDVDKFKNINDTFGHLLGDEVLMKVVKILKSQIPVDKGKVYRFGGDEFAVIYTGGTLEELLSILKEIVHFQVGSINLSTSIGVAHSNECPTVERLKMLADERLYKSKKNGRAQISWQ

SEQ ID NO: 42859 - protein, 548 aa, Escherichia coli
MAAKDVKFGNDARVKMLRGVNVLADAVKVTLGPKGRNVVLDKSFGAPTITKDGVSVAREIELEDKFENMGAQMVKEVASKANDAAGDGTTTATVLAQAIITEGLKAVAAGMNPMDLKRGIDKAVTAAVEELKALSVPCSDSKAIAQVGTISANSDETVGKLIAEAMDKVGKEGVITVEDGTGLQDELDVVEGMQFDRGYLSPYFINKPETGAVELESPFILLADKKISNIREMLPVLEAVAKAGKPLLIIAEDVEGEALATLVVNTMRGIVKVAAVKAPGFGDRRKAMLQDIATLTGGTVISEEIGMELEKATLEDLGQAKRVVINKDTTTIIDGVGEEAAIQGRVAQIRQQIEEATSDYDREKLQERVAKLAGGVAVIKVGAATEVEMKEKKARVEDALHATRAAVEEGVVAGGGVALIRVASKLADLRGQNEDQNVGIKVALRAMEAPLRQIVLNCGEEPSVVANTVKGGDGNYGYNAATEEYGNMIDMGILDPTKVTRSALQYAASVAGLMITTECMVTDLPKNDAADLGAAGGMGGMGGMGGMM

SEQ ID NO: 42860 - protein, 111 aa, Escherichia coli
MVSRYVPDMGDLIWVDFDPTKGSEQAGHRPAVVLSPFMYNNKTGMCLCVPCTTQSKGYPFEVVLSGQERDGVALADQVKSIAWRARGATKKGTVAPEELQLIKAKINVLIG

SEQ ID NO: 42861 - protein, 453 aa, Escherichia coli
MFKPELLSPAGTLKNMRYAFAYGADAVYAGQPRYSLRVRNNEFNHENLQLGINEAHALGKKFYVVVNIAPHNAKLKTFIRDLKPVVEMGPDALIMSDPGLIMLVREHFPEMPIHLSVQANAVNWATVKFWQQMGLTRVILSRELSLEEIEEIRNQVPDMEIEIFVHGALCMAYSGRCLLSGYINKRDPNQGTCTNACRWEYNVQEGKEDDVGNIVHKYEPIPVQNVEPTLGIGAPTDKVFMIEEAQRPGEYMTAFEDEHGTYIMNSKDLRAIAHVERLTKMGVHSLKIEGRTKSFYYCARTAQVYRKAIDDAAAGKPFDTSLLETLEGLAHRGYTEGFLRRHTHDDYQNYEYGYSVSDRQQFVGEFTGERKGDLAAVAVKNKFSVGDSLELMTPQGNINFTLEHMENAKGEAMPIAPGDGYTVWLPVPQDLELNYALLMRNFSGETTRNPHGK

SEQ ID NO: 42862 - protein, 371 aa, Escherichia coli
MVTPVSISNYISLPDDFPVRNIAPQVKEVLKDFIDALSTIICNEEWRTSLNINSATKKIFNNLDNLSYIQRTSFRGNDTLYNEKVQFKLTYPARNGRHKENIEFQVVINLSPIYLDNFRHDGEINIFCAPNPKPVTMGRVFQTGVERVLFLFLNDFIEQFPMINPGVPIKRAHTPHIEPLPSDHHTAADYLRQFDLLVLNFISRGNFVILPRLWNNSEVHRWFVNKDPNLITAILDITDSELKEDLLQSLMDSLGSNKHVLPEVCICFLSLLAEQESPHFQNLFLFFANMLLHYHQFMNPNESDLNDVLMPASLSDDKIIKHMARRTLKLFVKNETPPKVTHEDLVKNRPRSPVRPPIPATAKTPDLPERH

SEQ ID NO: 42863 - protein, 89 aa, Escherichia coli
MFLFFANMLLHYHQFMNPNESDLNDVLMPASLSDDKIIKHMARKTLKLFVKNETPPKVTHEDLVKNRPRSPVRPPIPATSKTPDIPDRH

SEQ ID NO: 42864 - protein, 357 aa, Escherichia coli
MKQKELWINQIKGLCICLVVIYHSVITFYPHLTTFQHPLSEVLSKCWIYFNLYLAPFRMPVFFFISGYLIRRYIDSVPWGNCLDKRIWNIFWVLALWGVVQWLALSALNQWLAPERDLSNASNAAYADSTGEFLHGMITASTSLWYLYALIVYFVVCKIFSRLALPLFALFVLLSVAVNFVPTPWWGMNSVIRNLPYYSLGAWFGATIMTCVKEVPLRRHLLMASLLTVLAVGAWLFTISLLLSLVSIVVIMKLFYQYEQRFGMRSTSLLNVIGSNTIAIYTTHRILVEIFSLTLLAQMNAARWSPQVELTLLLVYPFVSLFICTVAGLLVRKLSQRAFSDLLFSPPSLPAAVSYSR

SEQ ID NO: 42865 - protein, 412 aa, Escherichia coli
MKIYLVGGAVRDALLGLPVKDRDWVVVGSTPQEMLDAGYQQVGRDFPVFLHPQTHEEYALARTERKSGSGYTGFTCYAAPDVTLEDDLKRRDLTINALAQDDNGEIIDPYNGLGDLQNRLLRHVSPAFGEDPLRVLRVARFAARYAHLGFRIADETLALMREMTHAGELEHLTPERVWKETESALTTRNPQVFFQVLRDCGALRVLFPEIDALFGVPAPAKWHPEIDTGIHTLMTLSMAAMLSPQVDVRFATLCHDLGKGLTPPELWPRHHGHGPAGVKLVEQLCQRLRVPNEIRDLARLVAEFHDLIHTFPMLNPKTIVKLFDSIDAWRKPQRVEQLALTSEADVRGRTGFESADYPQGRWLREAWEVAQSVPTKAVVEAGFKGVEIREELTRRRIAAVASWKEQRCPKPE

SEQ ID NO: 42866 - protein, 271 aa, Escherichia coli
MSVKVIVTDMDGTFLNDAKTYNQPRFMAQYQELKKRGIKFVVASGNQYYQLISFFPELKDEISFVAENGALVYEHGKQLFHGELTRHESRIVIGELLKDKQLNFVACGLQSAYVSENAPEAFVALMAKHYHRLKPVKDYQEIDDVLFKFSLNLPDEQIPLVIDKLHVALDGIMKPVTSGFGFIDLIIPGLHKANGISRLLKRWDLSPQNVVAIGDSGNDAEMLKMARYSFAMGNAAENIKQIARYATDDNNHEGALNVIQAVLDNTSPFNS

SEQ ID NO: 42867 - protein, 177 aa, Escherichia coli
MNTKIRYGLSAAVLALIGAGASAPQILDQFLDEKEGNHTMAYRDGSGIWTICRGATVVDGKTVFPNMKLSKEKCDQVNAIERDKALAWVERNIKVPLTEPQKAGIASFCPYNIGPGKCFPSTFYKRLNAGDRKGACEAIRWWIKDGGRDCRIRSNNCYGQVIRRDQESALTCWGIEQ

SEQ ID NO: 42868 - protein, 103 aa, Escherichia coli
MTQDYELVVKGVRNFENKVTVTVALQDKERFDGEIFDLDVAMDRVEGAALEFYEAAARRSVRQVFLEVAEKLSEKVESYLQHQYSFKIENPANKHERPHHKYL

SEQ ID NO: 42869 - protein, 345 aa, Escherichia coli
MHGNSEMQKINQTSAMPEKTDVHWSGRFSVAPMLDWTDRHCRYFLRLLSRNTLLYTEMVTTGAIIHGKGDYLAYSEEEHPVALQLGGSDPAALAQCAKLAEARGYDEINLNVGCPSDRVQNGMFGACLMGNAQLVADCVKAMRDVVSIPVTVKTRIGIDDQDSYEFLCDFINTVSGKGECEMFIIHARKAWLSGLSPKENREIPPLDYPRVYQLKRDFPHLTMSINGGIKSLEEAKAHLQHMDGVMVGREAYQNPGILAAVDREIFGSSDTDADPVAVVRAMYPYIERELSQGTYLGHITRHMLGLFQGIPGARQWRRYLSENAHKAGADINVLEHALKLVADKR

SEQ ID NO: 42870 - protein, 131 aa, Escherichia coli
MRHYEIVFMVHPDQSEQVPGMIERYTAAITGAEGKIHRLEDWGRRQLAYPINKLHKAHYVLMNVEAPQEVIDELETTFRFNDAVIRSMVMRTKHAVTEASPMVKAKDERRERRDDFANETADDAEAGDSEE

SEQ ID NO: 42871 - protein, 326 aa, Escherichia coli
MLTLARQQQRQNIRWLLCLSVLMLLALLLSLCAGEQWISPGDWFTPRGELFVWQIRLPRTLAVLLVGAALAISGAVMQALFENPLAEPGLLGVSNGAGVGLIAAVLLGQGQLPNWALGLCAIAGALIITLILLRFARRHLSTSRLLLAGVALGIICSALMTWAIYFSTSVDLRQLMYWMMGGFGGVDWRQSWLMLALIPVLLWICCQSRPMNMLALGEISARQLGLPLWFWRNVLVAATGWMVGVSVALAGAIGFIGLVIPHILRLCGLTDHRVLLPGCALAGASALLLADIVARLALAAAELPIGVVTATLGAPVFIWLLLKAGR

SEQ ID NO: 42872 - protein, 443 aa, Escherichia coli
MSTSDSIVSSQTKQSSWRKSDTTWTLGLFGTAIGAGVLFFPIRAGFGGLIPILLMLVLAYPIAFYCHRALARLCLSGSNPSGNITETVEEHFGKTGGVVITFLYFFAICPLLWIYGVTITNTFMTFWENQLGFAPLNRGFVALFLLLLMAFVIWFGKDLMVKVMSYLVWPFIASLVLISLSLIPYWNSAVIDQVDLGSLSLTGHDGILITVWLGISIMVFSFNFSPIVSSFVVSKREEYEKDFGRDFTERKCSQIISRASMLMVAVVMFFAFSCLFTLSPANMAEAKAQNIPVLSYLANHFASMTGTKTTFAITLEYAASIIALVAIFKSFFGHYLGTLEGLNGLVLKFGYKGDKTKVSLGKLNTISMIFIMGSTWVVAYANPNILDLIEAMGAPIIASLLCLLPMYAIRKAPSLAKYRGRLDNVFVTVIGLLTILNIVYKLF

SEQ ID NO: 42873 - protein, 453 aa, Escherichia coli
MKTLSPAVITLLWRQDAAEFYFSRLSHLPWAMLLHSGYADHPYSRFDIVVAEPICTLTTFGKETVVSESEKRTTTTDDPLQVLQQVLDRADIRPTHNEDLPFQGGALGLFGYDLGRRFESLPEIAEQDIVLPDMAVGIYDWALIVDHQRHTVSLLSHNDVNARRAWLESQQFSPQEDFTLTSDWQSNMTREQYGEKFRQVQEYLHSGDCYQVNLAQRFHATYSGDEWQAFLQLNQANRAPFSAFLRLEQGAILSLSPERFILCDNSEIQTRPIKGTLPRLPDPQEDSKQAVKLANSAKDRAENLMIVDLMRNDIGRVAVAGSVKVPELFVVEPFPAVHHLVSTITAQLPEQLHASDLLRAAFPGGSITGAPKVRAMEIIDELEPQRRNAWCGSIGYLSFCGNMDTSITIRTLTAINGQIFCSAGGGIVADSQEEAEYQETFDKVNRILKQLEK

SEQ ID NO: 42874 - protein, 270 aa, Escherichia coli
MIITQADLREWRIGAVMYRWFLRHFPRGGSYADIHHALIEEGYTDWAESLVEYAWKKWLADENFAHQEVSSMQKLATDPGERPFCSQFARSDDHARIGCCEDNARIATAGYAAQIASMGYSVRIGSVGFNSHIGSSGERARVAVTGNSSRISSAGDSSRIANTGMRVRVCTLGERCHVASNGDLVQIASFGANARIANSGDNVHIIASGENSTVVSTGVVDSIILGPGGSAALAYHDGERVRFAVAIEGENNIRAGVRYRLNEQHQFVEC

SEQ ID NO: 42875 - protein, 667 aa, Escherichia coli
MAKIAAIFQLLDKNVTVSSHRLELLSPARDAAIAREAILHGADAVYIGGPGFGARHNASNSLKDIAELVPFAHRYGAKIFVTLNTILHDDELEPAQRLITDLYQTGVDALIVQDMGILELDIPPIELHASTQCDIRTVEKAKFLSDVGFTQIVLARELNLDQIRAIHQATDATIEFFIHGALCVAYSGQCYISHAQTGRSANRGDCSQACRLPYTLKDDQGRVVSYEKHLLSMKDNDQTANLGALIDAGVRSFKIEGRYKDMSYVKNITAHYRQMLDAIIEERGDLARASSGRTEHFFVPSTEKTFHRGSTDYFVNARKGDIGAFDSPKFIGLPVGEVVKVAKDHLDVAVTEPLANGDGLNVLIKREVVGFRANTVEKTGENQYRVWPNEMPADLHKIRPHHPLNRNLDHNWQQALTKTSSERRVAVDIELGGWQEQLILTLTSEEGVSITHTLDGQFDEANNAEKAMNNLKDGLAKLGQTLYYARDVQINLPGALFVPNSLLNQFRREAADMLDAARLASYQRGSRKPVADPAPVYPQTHLSFLANVYNQKAREFYHRYGVQLIDAAYEAHEEKGEVPVMITKHCLRFAFNLCPKQAKGNIKSWKATPMQLVNGDEVLTLKFDCRPCEMHVIGKIKNHILKMPLPGSVVASVSPDELLKTLPKRKG

SEQ ID NO: 42876 - protein, 660 aa, Escherichia coli
MSKRIALFPALLLALLVIVATALTWMNFSQALPRSQWAQAAWSPDIDVIEQMIFHYSLLPRLAISLLVGAGLGLVGVLFQQVLRNPLAEPTTLGVATGAQLGITVTTLWAIPGAMASQFAAQAGACVVGLIVFGVAWGKRLSPVTLILAGLVVSLYCGAINQLLVIFHHDQLQSMFLWSTGTLTQTDWGGVERLWPQLLGGVMLTLLLLRPLTLMGLDDGVARNLGLALSLARLAALSLAIVISALLVNAVGIIGFIGLFAPLLAKMLGARRLLPRLMLASLIGALILWLSDQIILWLTRVWMEVSTGSVTALIGAPLLLWLLPRLRSISAPDMKVNDRVAAERQHVLAFALAGGVLLLMAVVVALSFGRDAHGWTWASGALLEDLMPWRWPRIMAALFAGVMLAVAGCIIQRLTGNPMASPEVLGISSGAAFGVVLMLFLVPGNAFGWLLPAGSLGAAVTLLIIMIAAGRGGFSPHRMLLAGMALSTAFTMLLMMLQASGDPRMAQVLTWISGSTYNATDAQVWRTGIVMVILLAITPLCRRWLTILPLGGDTARAVGMALTPTRIALLLLAACLTATATMTIGPLSFVGLMAPHIARMMGFRRTMPHIVISALVGGLLLVFADWCGRMVLFPFQIPAGLLSTFIGAPYFIYLLRKQSR

SEQ ID NO: 42877 - protein, 254 aa, Escherichia coli [sequence omitted]

SEQ ID NO: 42878 - protein, 753 aa, Escherichia coli
MSQHNEKNPHQHQSPLHDSSEAKPGMDSLAPEDGSHRPAAEPTPPGAQPTAPGSLKAPDTRNEKLNSLEDVRKGSENYALTTNQGVRIADDQNSLRAGSRGPTLLEDFILREKITHFDHERIPERIVHARGSAAHGYFQPYKSLSDITKADFLSDPNKITPVFVRFSTVQGGAGSADTVRDIRGFATKFYTEEGIFDFVGNNTPIFFIQDAHKFPDFVHAVKPEPHWAIPQGQSAHDTFWDYVSLQPETLHNVMWAMSDRGIPRSYRTMEGFGIHTFRLINAEGKATFVRFHWKPLAGKASLVWDEAQKLTGRDPDFHRRELWEAIEAGDFPEYELGFQLIPEEDEFKFDFDLLDPTKLIPEELVPVQRVGKMVLNRNPDNFFAENEQAAFHPGHIVPGLDFTNDPLLQGRLFSYTDTQISRLGGPNFHEIPINRPTCPYHNFQRDGMHRMGIDTNPANYEPNSINDNWPRETPPGPKRGGFESYQERVEGNKVRERSPSFGEYYSHPRLFWLSQTPFEQRHIVDGFSFELSKVVRPYIRERVVDQLAHIDLTLAQAVAKNLGIELTDDQLNITPPPDVNGLKKDPSLSLYAIPDGDVKGRVVAILLNDEVRSADLLAILKALKAKGVHAKLLYSRMGEVTADDGTVLPIAATFAGAPSLTVDAVIVPCGNIADIADNGDANYYLMEAYKHLKPIALAGDARKFKATIKIADQGEEGIVEADSADGSFMDELLTLMAAHRVWSRIPKIDKIPA

SEQ ID NO: 42879 - protein, 890 aa, Escherichia coli
MNTLPEQYANTALPTLPGQPQNPCVWPRDELTVGGIKAHIDTFQRWLGDAFDNGISAEQLIEARTEFIDQLLQRLWIEAGFSQIADLALVAVGGYGRGELHPLSDVDLLILSRKKLPDDQAQKVGELLTLLWDVKLEVGHSVRTLEECMLEGLSDLTVATNLIESRLLIGDVALFLELQKHIFSEGFWPSDKFYAAKVEEQNQRHQRYHGTSYNLEPDIKSSPGGLRDIHTLQWVARRHFGATSLDEMVGFGFLTSAERAELNECLHILWRIRFALHLVVSRYDNRLLFDRQLSVAQRLNYSGEGNEPVERMMKDYFRVTRRVSELNQMLLQLFDEAILALPADEKPRPIDDEFQLRGTLIDLRDETLFMRQPEAILRMFYTMVHNSAITGIYSTTLRQLRHARRHLQQPLCNIPEARKLFLSILRHPGAVRRGLLPMHRHSVLGAYMPQWSHIVGQMQFDLFHAYTVDEHTIRVMLKLESFASEETRQRHPLCVDVWPRLPSTELIFIAALFHDIAKGRGGDHSILGAQDVVHFAELHGLNSRETQLVAWLVRQHLLMSVTAQRRDIQDPEVIKQFAEEVQTENRLRYLVCLTVADICATNETLWNSWKQSLLRELYFATEKQLRRGMQNTPDMRERVRHHQLQALALLRMDNIDEEALHQIWSRCRANYFVRHSPNQLAWHARHLLQHDLSKPLVLLSPQATRGGTEIFIWSPDRPYLFAAVCAELDRRNLSVHDAQIFTTRDGMAMDTFIVLEPDGNPLSADRHEVIRFGLEQVLTQSSWQPPQPRRQPAKLRHFTVETEVTFLPTHTDRKSFLELIALDQPGLLARVGKIFADLGISLHGARITTIGERVEDLFIIATADRRALNNELQQEVHQRLTEALNPNDKG

SEQ ID NO: 42880 - protein, 130 aa, Escherichia coli
MAENQYYGTGRRKSSAARVFIKPGNGKIVINQRSLEQYFGRETARMVVRQPLELVDMVEKLDLYITVKGGGISGQAGAIRHGITRALMEYDESLRSELRKAGFVTRDARQVERKKVGLRKARRRPQFSKR

SEQ ID NO: 42881 - protein, 142 aa, Escherichia coli [sequence omitted]

SEQ ID NO: 42882 - protein, 426 aa, Escherichia coli
MKHLTEMVRQHKAGKTNGIYAVCSAHPLVLEAAIRYASANQTPLLIEATSNQVDQFGGYTGMTPADFRGFVCQLADSLNFPQDALILGGDHLGPNRWQNLPAAQAMANADDLIKSYVAAGFKKIHLDCSMSCQDDPIPLTDDIVAERAARLAKVAEETCLEHFGEADLEYVIGTEVPVPGGAHETLSELAVTTPDAARATLEAHRHAFEKQGLNAIWPRIIALVVQPGVEFDHTNVIDYQPAKASALSQMVENYETLIFEAHSTDYQTPQSLRQLVIDHFAILKVGPALTFALREALFSLAAIEEELVPAKACSGLRQVLEDVMLDRPEYWQSHYHGDGNARRLARGYSYSDRVRYYWPDSQIDDAFAHLVRNLADSPIPLPLISQYLPLQYVKVRSGELQPTPRELIINHIQDILAQYHTACEGQ

SEQ ID NO: 42883 - protein, 374 aa, Escherichia coli
MIARKRRARTIHSRYPIGIYGSIVMTDIAQLLGKDADNLLQHRCMTIPSDQLYLPGHDYVDRVMIDNNRPPAVLRNMQTLYNTGRLAGTGYLSILPVDQGVEHSAGASFAANPLYFDPKNIVELAIEAGCNCVASTYGVLASVSRRYAHRIPFLVKLNHNETLSYPNTYDQTLYASVEQAFNMGAVAVGATIYFGSEESRRQIEEISAAFERAHELGMVTVLWAYLRNSAFKKDGVDYHVSADLTGQANHLAATIGADIVKQKMAENNGGYKAINYGYTDDRVYSKLTSENPIDLVRYQLANCYMGRAGLINSGGAAGGETDLSDAVRTAVINKRAGGMGLILGRKAFKKSMADGVKLINAVQDVYLDSKITIA

SEQ ID NO: 42884 - protein, 306 aa, Escherichia coli
MELKDYYAIMGVKPTDDLKTIKTAYRRLARKYHPDVSKEPDAEARFKEVAEAWEVLSDEQRRAEYDQMWQHRNDPQFNRQFHHGDGQSFNAEDFDDIFSSIFGQHARQSRQRPATRGHDIEIEVAVFLEETLTEHKRTISYNLPVYNAFGMIEQEIPKTLNVKIPAGVGNGQRIRLKGQGTPGENGGPNGDLWLVIHIAPHPLFDIVGQDLEIVVPVSPWEAALGAKVTVPTLKESILLTIPPGSQAGQRLRVKGKGLVSKKQTGDLYAVLKIVMPPKPDENTAALWQQLADAQSSFDPRKDWGKA

SEQ ID NO: 42885 - protein, 195 aa, Escherichia coli
MVDQAQDTLRPNNRLSDMQATMEQTQAFENRVLERLNAGKTVRSFLITAVELLTEAVNLLVLQVFRKDDYAVKYAVEPLLDGDGPLGDLSVRLKLIYGLGVINRQEYEDAELLMALREELNHDGNEYAFTDDEILGPFGELHCVAALPPPPQFEPADSSLYAMQIQRYQQAVRSTMVLSLTELISKISLKKAFQK

SEQ ID NO: 42886 - protein, 247 aa, Escherichia coli
MQTQVLFEHPLNEKMRTWLRIEFLIQQLTVNLPIVDHAGALHFFRNVSELLDVFERGEVRTELLKELDRQQRKLQTWIGVPGVDQSRIEALIQQLKAAGSVLISAPRIGQFLREDRLIALVRQRLSIPGGCCSFDLPTLHIWLHLPQAQRDSQVETWIASLNPLTQALTMVLDLIRQSAPFRKQTSLNGFYQDNGGDADLLRLNLSLDSQLYPQISGHKSRFAIRFMPLDTENGQVPERLDFELACC

SEQ ID NO: 42887 - protein, 250 aa, Escherichia coli
MSAIEVKNLVKKFHGQTVLHGIDLEVKPGEVVAIIGPSGSGKTTLLRSINLLEQPEAGTITVGDITIDTARSLSQQKSLIRQLRQHVGFVFQNFNLFPHRTVLENIIEGPVIVKGEPKEEATARARELLAKVGLAGKETSYPRRLSGGQQQRVAIARALAMRPEVILFDEPTSALDPELVGEVLNTIRQLAQEKRTMVIVTHEMSFARDVADRAIFMDQGRIVEQGAAKALFADPEQPRTRQFLEKFLLQ

SEQ ID NO: 42888 - protein, 214 aa, Escherichia coli
MSKPAITLWSDAHFFSPYVLSAWVALQEKGLSFHIKTIDLDSGEHLQPTWQGYGQTRRVPLLQIDDFELSESSAIAEYLEDRFAPPTWERIYPLDLENRARARQIQAWLRSDLMPIREERPTDVVFAGAKKAPLTAEGKASAEKLFAMAEHLLVLGQPNLFGEWCIADTDLALMINRLVLHGDEVPERLVDYATFQWQRASVQRFIALSAKQSG

SEQ ID NO: 42889 - protein, 606 aa, Escherichia coli
MQMIVRILLLFIALFTFGVQAQAIKESYAFAVLGEPRYAFNFNHFDYVNPAAPKGGQITLSALGTFDNFNRYALRGNPGARTEQLYDTLFTTSDDEPGSYYPLIAESARYADDYSWVEVAINPRARFHDGSPITARDVEFTFQKFMTEGVPQFRLVYKGTTVKAIAPLTVRIELAKPGKEDMLSLFSLPVFPEKYWKDHKLSDPLATPPLASGPYRVTSWKMGQNIVYSRVKDYWAANLPVNRGRWNFDTIRYDYYLDDNVAFEAFKAGAFDLRMENDAKNWATRYTGKNFDKKYIIKDEQKNESAQDTRWLAFNIQRPVFSDRRVREAITLAFDFEWMNKALFYNAWSRTNSYFQNTEYAARNYPDAAELVLLAPMKKDLPSEVFTQIYQPPVSKGDGYDRDNLLKADKLLNEAGWVLKGQQRVNATTGQPLSFELLLPASSNSQWVLPFQHSLQRLGINMDIRKVDNSQITNRMRSRDYDMMPRVWRAMPWPSSDLQISWSSEYINSTYNAPGVQSPVIDSLINQIIAAQGNKEKLLPLGRALDRVLTWNYYMLPMWYMAEDRLAWWDKFSQPAVRPIYSLGIDTWWYDVNKAAKLPSASKQGE

SEQ ID NO: 42890 - protein, 197 aa, Escherichia coli
MNEIISAAVLLILIMDPLGNLPIFMSVLKHTEPKRRRAIMVRELLIALLVMLVFLFAGEKILAFLSLRAETVSISGGIILFLIAIKMIFPSASGNSSGLPAGEEPFIVPLAIPLVAGPTILATLMLLSHQYPNQMGHLVIALLLAWGGTFVILLQSSLFLRLLGEKGVNALERLMGLILVMMATQMFLDGIRMWMKG

SEQ ID NO: 42891 - protein, 424 aa, Escherichia coli
MTDKRKDGSGKLLYCSFCGKSQHEVRKLIAGPSVYICDECVDLCNDIIREEIKEVAPHRERSALPTPHEIRNHLDDYVIGQEQAKKVLAVAVYNHYKRLRNGDTSNGVELGKSNILLIGPTGSGKTLLAETLARLLDVPFTMADATTLTEAGYVGEDVENIIQKLLQKCDYDVQKAQRGIVYIDEIDKISRKSDNPSITRDVSGEGVQQALLKLIEGTVAAVPPQGGRKHPQQEFLQVDTSKILFICGGAFAGLDKVISHRVETGSGIGFGATVKAKSDKASEGELLAQVEPEDLIKFGLIPEFIGRLPVVATLNELSEEALIQILKEPKNALTKQYQALFNLEGVDLEFRDEALDAIAKKAMARKTGARGLRSIVEAALLDTMYDLPSMEDVEKVVIDESVIDGQSKPLLIYGKPEAQQASGE

SEQ ID NO: 42892 - protein, 784 aa, Escherichia coli
MNPERSERIEIPVLPLRDVVVYPHMVIPLFVGREKSIRCLEAAMDHDKKIMLVAQKEASTDEPGVNDLFTVGTVASILQMLKLPDGTVKVLVEGLQRARISALSDNGEHFSAKAEYLESPTIDEREQEVLVRTAISQFEGYIKLNKKIPPEVLTSLNSIDDPARLADTIAAHMPLKLADKQSVLEMSDVNERLEYLMAMMESEIDLLQVEKRIRNRVKKQMEKSQREYYLNEQMKAIQKELGEMDDAPDENEALKRKIDAAKMPKEAKEKAEAELQKLKMMSPMSAEATVVRGYIDWMVQVPWNARSKVKKDLRQAQEILDTDHYGLERVKDRILEYLAVQSRVNKIKGPILCLVGPPGVGKTSLGQSIAKATGRKYVRMALGGVRDEAEIRGHRRTYIGSMPGKLIQKMAKVGVKNPLFLLDEIDKMSSDMRGDPASALLEVLDPEQNVAFSDHYLEVDYDLSDVMFVATSNSMNIPAPLLDRMEVIRLSGYTEDEKLNIAKRHLLPKQIERNALKKGELTVDDSAIIGIIRYYTREAGVRGLEREISKLCRKAVKQLLLDKSLKHIEINGDNLHDYLGVQRFDYGRADNENRVGQVTGLAWTEVGGDLLTIETACVPGKGKLTYTGSLGEVMQESIQAALTVVRARAEKLGINPDFYEKRDIHVHVPEGATPKDGPSAGIAMCTALVSCLTGNPVRADVAMTGEITLRGQVLPIGGLKEKLLAAHRGGIKTVLIPFENKRDLEEIPDNVIADLDIHPVKRIEEVLTLALQNEPSGMQVVTAK

SEQ ID NO: 42893 - protein, 149 aa, Escherichia coli [sequence omitted]

SEQ ID NO: 42894 - protein, 287 aa, Escherichia coli
MKMISTIQKKETVMVAPIPAKRGRKPAVATAPATGQVQSLTRGLKLLEWIAESNGSVALTELAQQAGLPNSTTHRLLTTMQQQGFVRQVGELGHWAIGAHAFMVGSSFLQSRNLLAIVHPILRNLMEESGETVNMAVLDQSDHEAIIIDQVQCTHLMRMSAPIGGKLPMHASGAGKAFLAQLSEEQVTKLLHRKGLHAYTHATLVSPVHLKEDLAQTRKRGYSFDDEEHALGLRCLAACIFDEHREPFAAISISGPISRITDDRVTEFGAMVIKAAKEVTLAYGGMR

SEQ ID NO: 42895 - protein, 289 aa, Escherichia coli
MRQSMATKLQDGNTPCLAATPSEPRPTVLVFDSGVGGLSVYDEIRHLLPDLHYIYAFDNVAFPYGEKSEAFIVERVVAIVTAVQERYPLALAVVACNTASTVSLPALREKFDFPVVGVVPAIKPAARLTANGIVGLLATRGTVKRSYTHELIARFANECQIEMLGSAEMVELAEAKLHGEDVSLDALKRILRPWLRMKEPPDTVVLGCTHFPLLQEELLQVLPEGTRLVDSGAAIARRTAWLLEHEAPDAKSADANIAFCMAMTPGAEQLLPVLQRYGFETLEKLAVLG

SEQ ID NO: 42896 - protein, 865 aa, Escherichia coli
MLEEYRKHVAERAAEGIAPKPLDANQMAALVELLKNPPAGEEEFLLDLLTNRVPPGVDEAAYVKAGFLAAIAKGEAKSPLLTPEKAIELLGTMQGGYNIHPLIDALDDAKLAPIAAKALSHTLLMFDNFYDVEEKAKAGNEYAKQVMQSWADAEWFLNRPALAEKLTVTVFKVTGETNTDDLSPAPDAWSRPDIPLHALAMLKNAREGIEPDQPGVVGPIKQIEALQQKGFPLAYVGDVVGTGSSRKSATNSVLWFMGDDIPHVPNKRGGGLCLGGKIAPIFFNTMEDAGALPIEVDVSNLNMGDVIDVYPYKGEVRNHETGELLATFELKTDVLIDEVRAGGRIPLIIGRGLTTKAREALGLPHSDVFRQAKDVAESDRGFSLAQKMVGRACGVKGIRPGAYCEPKMTSVGSQDTTGPMTRDELKDLACLGFSADLVMQSFCHTAAYPKPVDVNTHHTLPDFIMNRGGVSLRPGDGVIHSWLNRMLLPDTVGTGGDSHTRFPIGISFPAGSGLVAFAAATGVMPLDMPESVLVRFKGKMQPGITLRDLVHAIPLYAIKQGLLTVEKKGKKNIFSGRILEIEGLPDLKVEQAFELTDASAERSAAGCTIKLNKEPIIEYLNSNIVLLKWMIAEGYGDRRTLERRIQGMEKWLANPELLEADADAEYAAVIDIDLADIKEPILCAPNDPDDARPLSAVQGEKIDEVFIGSCMTNIGHFRAAGKLLDAHKGQLPTRLWVAPPTRMDAAQLTEEGYYSVFGKSGARIEIPGCSLCMGNQARVADGATVVSTSTRNFPNRLGTGANVFLASAELAAVAALIGKLPTPEEYQTYVAQVDKTAVDTYRYLNFNQLSQYTEKADGVIFQTAV

SEQ ID NO: 42897 - protein, 218 aa, Escherichia coli
MKCNVSYHFQGADMNRFVVAEPLWCTGCNTCLAACSDVHKTQGLQQHPRLALAKTSTITAPVVCHHCEEAPCLQVCPVNAISQRDDAIQLNESLCIGCKLCAVVCPFGAISASGSRPVNAHAQYVFQAEGSLKDGEENAPTQHALLRWEPGVQTVAVKCDLCDFLPEGPACVRACPNQALRLITGDSLQRQMKEKQRLAASWFANGGEDPLSLTQEQR

SEQ ID NO: 42898 - protein, 630 aa, Escherichia coli
MAIEIKVPDIGADEVEITEILVKVGDKVEAEQSLITVEGDKASMEVPSPQAGIVKEIKVSVGDKTQTGALIMIFDSADGAADAAPAQAEEKKEAAPAAAPAAAAAKDVNVPDIGSDEVEVTEILVKVGDKVEAEQSLITVEGDKASMEVPAPFAGTVKEIKVNVGDKVSTGSLIMVFEVAGEAGAAAPAAKQEAAPAAAPAPAAGVKEVNVPDIGGDEVEVTEVMVKVGDKVAAEQSLITVEGDKASMEVPAPFAGVVKELKVNVGDKVKTGSLIMIFEVEGAAPAAAPAKQEAAAPAPAAKAEAPAAAPAAKAEGKSEFAENDAYVHATPLIRRLAREFGVNLAKVKGTGRKGRILREDVQAYVKEAIKRAEAAPAATGGGIPGMLPWPKVDFSKFGEIEEVELGRIQKISGANLSRNWVMIPHVTHFDKTDITELEAFRKQQNEEAAKRKLDVKITPVVFIMKAVAAALEQMPRFNSSLSEDGQRLTLKKYINIGVAVDTPNGLVVPVFKDVNKKGIIELSRELMTISKKARDGKLTAGEMQGGCFTISSIGGLGTTHFAPIVNAPEVAILGVSKSAMEPVWNGKEFVPRLMLPISLSFDHRVIDGADGARFITIINNTLSDIRRLVM

SEQ ID NO: 42899 - protein, 617 aa, Escherichia coli
MKMTLPFKPHVLALICSAGLCAASTGLYIKSRTVEAPVEPQSTQLAVSDAAAVTFPATVSAPPVTPAVVKSAFSTAQIDQWVAPVALYPDALLSQVLMASTYPTNVAQAVQWSHDNPLKQGDAAIQAVSDQPWDASVKSLVAFPQLMALMGENPQWVQNLGDAFLAQPQDVMDSVQRLRQLAQQTGSLKSSTEQKVITTTKKAVPVKQTVTAPVIPSNTVLTANPVITEPATTVISIEPANPDVVYIPNYNPTVVYGNWANTAYPPVYLPPPAGEPFVDSFVRGFGYSMGVATTYALFSSIDWDDDDHDHHHHDNDDYHHHDGGHRDGNGWQHNGDNINIDVNNFNRITGEHLTDKNMAWRHNPNYRNGVPYHDQDMAKRFHQTDVNGGMSATQLPAPTRDSQRQAAANQFQQRTHAAPVITRDTQRQAAAQRFNEAEHYGSYDDFHDFSRRQPLTQQQKDAARQRYQSASPEQRQAVRERMQTNPKIQQRREAARERIQSASPEQRQAVREKMQTNPQNQQRRDAARERIQSASPEQRQVFKEKVQQRPLNQQQRDNARQRVQSASPEQRQVFREKVQESRPQRLNDSNHTVRLNNEQRSAVCERLSERGARRLER

SEQ ID NO: 42900 - protein, 134 aa, Escherichia coli
MKSVFTISASLAISLMLCCTAQANDHKLLGAIAMPRNETNDLALKLPVCRIVKRIQLSADHGDLQLSGASVYFKAARSASQSLNIPSEIKEGQTTDWININSDNDNKRCVSKITFSGHTVNSSDMATLKIIGDD

SEQ ID NO: 42901 - protein, 548 aa, Escherichia coli
MSNKPFIYQAPFPMGKDNTEYYLLTSDYVSVADFDGETILKVEPEALTLLAQQAFHDASFMLRPAHQKQVAAILHDPEASENDKYVALQFLRNSEIAAKGVLPTCQDTGTAIIVGKKGQRVWTGGGDEETLSKGVYNTYIEDNLRYSQNAALDMYKEVNTGTNLPAQIDLYAVDGDEYKFLCVAKGGGSANKTYLYQETKALLTPGKLKNFLVEKMRTLGTAACPPYHIAFVIGGTSAETNLKTVKLASAHYYDELPTEGNEHGQAFRDVQLEQELLEEAQKLGLGAQFGGKYFAHDIRVIRLPRHGASCPVGMGVSCSADRNIKAKINREGIWIEKLEHNPGQYIPQELRQAGEGEAVKVDLNRPMKEILAQLSQYPVSTRLSLTGTIIVGRDIAHAKLKELIDAGKELPQYIKDHPIYYAGPAKTPAGYPSGSLGPTTAGRMDSYVDLLQSHGGSMIMLAKGNRSQQVTDACHKHGGFYLGSIGGPAAVLAQQSIKHLECVAYPELGMEAIWKIEVEDFPAFILVDDKGNDFFQQIVNKQCANCTK

SEQ ID NO: 42902 - protein, 292 aa, Escherichia coli
MSFDPTGYTLAHEHLHIDLSGFKNNVDCRLDQYAFICQEMNDLMTRGVRNVIEMTNRYMGRNAQFMLDVMRETGINVVACTGYYQDAFFPEHVATRSVQELAQEMVDEIEQGIDGTELKAGIIAEIGTSEGKITPLEEKVFIAAALAHNQTGRPISTHTSFSTMGLEQLALLQAHGVDLSRVTVGHCDLKDNLDNILKMIDLGAYVQFDTIGKNSYYPDEKRIAMLHALRDRGLLNRVMLSMDITRRSHLKANGGYGYDYLLTTFIPQLRQSGFSQADVDVMLRENPSQFFQ

SEQ ID NO: 42903 - protein, 408 aa, Escherichia coli
MARFVVLVIDSFGVGAMKDVTLVRPQDAGANTCGHILSQLPHLQLPTLETLGLINALGYAPGDMQPSDSATWGVAELQHEGGDTFMGHQEILGTRPLPPLRMPFRDVIDRVEQALVSAGWQVERRGDDLQFLWVNQAVAIGDNLEADLGQVYNITANLSVISFDDAIKIGRIVREQVQVGRVITFGGLLTDSQRILDAAESKEGRFIGINAPRSGAYDNGFQVVHMGYGVDEKVQVPQKLYEAGVPTVLVGKVADIVNNPYGVSWQNLVDSQRIMDITLNEFNTHPTAFICTNIQETDLAGHAEDVARYAERLQVVDRNLARLVEAMQPDDCLVVMADHGNDPTIGHSHHTREVVPVLVYQQGMIATQLGVRTTLSDVGATVCEFFRAPPPQNGRSFLSSLRFAGDTL

SEQ ID NO: 42904 - protein, 148 aa, Escherichia coli
MTPGERSLIQRALKTLDRHLHEPGVAFTSTRAAREWLILNMAGLEREEFRVLYLNNQNQLIAGETLFTGTINRTEVHPREVIKRALYHNAAAVVLAHNHPSGEVTPSKADRLITERLVQALGLVDIRVPDHLIVGGNQVFSFAEHGLL

SEQ ID NO: 42905 - protein, 73 aa, Escherichia coli
MKIITRGEAMRIHQQHPTSRLFPFCTGKYRWHGSAEAYTGREVQDIPGVLAVFAERRKDSFGPYVRLMSVTLN

SEQ ID NO: 42906 - protein, 73 aa, Escherichia coli
MRIITRGEAMRIHQQHPASRLFPFCTGKYRWHGSAEAYTGREVQDIPGVLAVFAERRKDSFGPYVRLMSVTLN

SEQ ID NO: 42907 - protein, 158 aa, Escherichia coli
  MISC_FEATURE (30)..(30): X=any amino acid
  MISC_FEATURE (76)..(76): X=any amino acid
MQQLSFLPGEMTPGERSLILRALQTLDRHXHEPGVAFTSTRAAREWLILNMAGLEREEFRVLYLNNQNQLIAGETXFTGTINRTEVHPREVIKRALYHNAAAVVLAHNHPSGEVTPSKADRLITERLVQALGLVDIRVPDHLIVGGNQVFSFAEHGLL

SEQ ID NO: 42908 - protein, 315 aa, Escherichia coli
MRLRKYNKSLGWLSLFAGTVLLSGCNSALLDPKGQIGLEQRSLILTAFGLMLIVVIPAILMAVGFAWKYRASNKDAKYSPNWSHSNKVEAVVWTVPILIIIFLAVLTWKTTHALEPSKPLAHDEKPITIEVVSMDWKWFFIYPEQGIATVNEIAFPANTPVYFKVTSNSVMNSFFIPRLGSQIYAMAGMQTRLHLIANEPGTYDGISASYSGPGFSGMKFKAIATPDRAAFDQWVAKAKQSPNTMSDMAAFEKLAAPSEYNQVEYFSNVKPDLFADVINKFMAHGKSMDMTQPEGEHSAHEGMEGMDMSHAESAH

SEQ ID NO: 42909 - protein, 454 aa, Escherichia coli
MISLFDMFKVGIGPSSSHTVGPMKAGKQFVDDLVEKGLLDSVTRVAVDVYGSLSLTGKGHHTDIAIIMGLAGNEPATVDIDSIPGFIRDVEERERLLLAQGRHEVDFPRDNGMRFHNGNLPLHENGMQIHAYNGDEVVYSKTYYSIGGGFIVDEEHFGQDAANEVSVPYPFKSATELLAYCNETGYSLSGLAMQNELALHSKKEIDEYFAHVWQTMQACIDRGMNTEGVLPGPLRVPRRASALRRMLVSSDKLSNDPMNVIDWVNMFALAVNEENAAGGRVVTAPTNGACGIVPAVLAYYDHFIESVSPDIYTRYFMAAGAIGALYKMNASISGAEVGCQGEVGVACSMAAAGLAELLGGSPEQVCVAAEIGMEHNLGLTCDPVAGQVQVPCIERNAIASVKAINAARMALRRTSAPRVSLDKVIETMYETGKDMNAKYRETSRGGLAIKVQCD

SEQ ID NO: 42910 - protein, 550 aa, Escherichia coli
MPFRALIDACWKEKYTAARFTRDLIAGITVGIIAIPLAMALAIGSGVAPQYGLYTAAVAGIVIALTGGSRFSVSGPTAAFVVILYPVSQQFGLAGLLVATLLSGIFLILMGLARFGRLIEYIPVSVTLGFTSGIGITIGTMQIKDFLGLQMAHVPEHYLQKVGALFMALPTINVGDAAIGIVTLGILVFWPRLGIRLPGHLPALLAGCAVMGIVNLLGGHVATIGSQFHYVLADGSQGNGIPQLLPQLVLPWDLPNSEFTLTWDSIRTLLPAAFSMAMLGAIESLLCAVVLDGMTGTKHKANSELVGQGLGNIIAPFFGGITATAAIARSAANVRAGATSPISAVIHSILVILALLVLAPLLSWLPLSAMAALLLMVAWNMSEAHKVVDLLRHAPKDDIIVMLLCMSLTVLFDMVIAISVGIVLASLLFMRRIARMTRLAPVVVDVPDDVLVLRVIGPLFFAAAEGLFTDLESRLEGKRIVILKWDAVPVLDAGGLDAFQRFVKRLPEGCELRVCNVEFQPLRTMARAGIQPIPGRLAFFPNRRAAMADL

SEQ ID NO: 42911 - protein, 68 aa, Escherichia coli
MNKEQSADDPSVDLIRVKNMLNSTISMSYPDVVIACIEHKVSLEAFRAIEAALVKHDNNMKDYSLVVD

SEQ ID NO: 42912 - protein, 770 aa, Escherichia coli
MHMLKARNCGWIRLLPLFMLSLPVQAELRCVANAVDIESFFSAATAEDKQQVEQAINSSVNLVPFGLSASNWKVHRGDLVVEGNIESNQKLIVLGNLTVKGNISTFSLSNPWVILGNVTATNIVADSPLLITGSINASGLVFIDSYYDNPSTIKGSINARGIFINDIIAPVVASSTNSEFMVRASDKHDTENVKKALMIINPDAYYWGLINDEDALKEIFKRSNIRMAGNVCNQMKKEALFRPKPSPELVQELQMLDEGKVAAFEGRDIATFDLAVMRTLPRLKGISANLRKQLINSNDEQTIESMARYMPDNEILELTDQQLGYQPVVLGLLDREPLSVEIMTRMSRLPDGVGPLNLALRENLPLDIVMTLAKRDWDMIIQELYKDAWLLPESIIDGYIRSDDSSIRQVGAGGQLTYNQAMQLANDSSNNVVTSLAFKLAEMKHHGQLLRMTPQESDKVAGYLYQKFENDDDLIRVLFLALPDNLQFNFVKRMEKKSPAYFCCRDMQVIHSDAALQRLLTRFNDPEGWSNLAKNQYLSTSMKQKIWQRALSHRKNNPKADSDAYETSADMILSELISHGEVDDQMLLNATALIRSDDWDFLESALISWDNLPAVVLKELQQNTPRNDIWAKFFLRQENSSRAQVDEALRVYYALDPDALAQLDVLAKQPDRIWWSTLAKSNLTFFKFGALNNRHTPPAVLAAEIDPEWWIVAMNNPRFPVDVLKARLKRDPLLALELVNPELDLVRQLALNGKTRAIREQAMRKLDELY

SEQ ID NO: 42913 - protein, 403 aa, Escherichia coli
MLTTLIYRSHIRDDEPVKKIEEMVSIANRRNMQSDVTGILLFNGSHFFQLLEGPEEQVKMIYRAICQDPRHYNIVELLCDYAPARRFGKAGMELFDLRLHERDDVLQAVFDKGTSKFQLTYDDRALQFFRTFVLATEQSTYFEIPAEDSWLFIADGSDKELDSCALSPTINDHFAFHPIVDPLSRRIIAFEAIVQKNEDSPSAIAVGQRKDGEIYTADLKSKALAFTMAHALELGDKMISINLLPMTLVNEPDAVSFLLNEIKANALVPEQIIVEFTESEVISRFDEFAEAIKSLKAAGISVAIDHFGAGFAGLLLLSRFQPDRIKISQELITNVHKSGPRQAIIQAIIKCCTSLEIQVSAMGVATPEEWMWLESAGIEMFQGDLFAKAKLNGIPSIAWPEKK

SEQ ID NO: 42914 - protein, 870 aa, Escherichia coli
MTQQPQAKYRHDYRAPDYQITDIDLTFDLDAQKTVVTAVSQAVRHGASDAPLRLNGEDLKLVSVHINDEPWTAWKEEEGALVISNLPERFTLKIINEISPAANTALEGLYQSGDALCTQCEAEGFRHITYYLDRPDVLARFTTKIIADKIKYPFLLSNGNRVAQGELENGRHWVQWQDPFPKPCYLFALVAGDFDVLRDTFTTRSGREVALELYVDRGNLDRAPWAMTSLKNSMKWDEERFGLEYDLDIYMIVAVDFFNMGAMENKGLNIFNSKYVLARTDTATDKDYLDIERVIGHEYFHNWTGNRVTCRDWFQLSLKEGLTVFRDQEFSSDLGSRAVNRINNVRTMRGLQFAEDASPMAHPIRPDMVIEMNNFYTLTVYEKGAEVIRMIHTLLGEENFQKGMQLYFERHDGSAATCDDFVQAMEDASNVDLSHFRRWYSQSGTPIVTVKDDYNPETEQYTLTISQRTPATPDQAEKQPLHIPFAIELYDNEGKVIPLQKGGHPVNSVLNVTQAEQTFVFDNVYFQPVPALLCEFSAPVKLEYKWSDQQLTFLMRHARNDFSRWDAAQSLLATYIKLNVARHQQGQPLSLPVHVADAFRAVLLDEKIDPALAAEILTLPSVNEMAELFDIIDPIAIAEVREALTRTLATELADELLAIYNANYQSEYRVEHEDIAKRTLRNACLRFLAFGETHLADVLVSKQFHEANNMTDALAALSAAVAAQLPCRDALMQEYDDKWHQNGLVMDKWFILQATSPAANVLETVRGLLQHRSFTMSNPNRIRSLIGAFAGSNPAAFHAEDGSGYLFLVEMLTDLNSRNPQVASRLIEPLIRLKRYDAKRQEKMRAALEQLKGLENLSGDLYEKITKALA

SEQ ID NO: 42915 - protein, 159 aa, Escherichia coli
MTVAYIAIGSNLASPLEQVNAALKALGDIPESHILTVSSFYRTPPLGPQDQPDYLNAAVALETSLAPEELLNHTQRIELQQGRVRKAERWGPRTLDLDIMLFGNEVINTERLTVPHYDMKNRGFMLWPLFEIAPELVFPDGEMLRQILHTRAFDKLNKW

SEQ ID NO: 42916 - protein, 385 aa, Escherichia coli
MTKHARFFLLPSFILISAALIAGCNDKGEEKAHVGEPQVTVHIVKTAPLEVKTELPGRTNAYRIAEVRPQVSGIVLNRNFTEGSDVQAGQSLYQIDPATYQANYDSAKGELAKSEAAAAIAHLTVKRYVPLVGTKYISQQEYDQAIADARQADAAVIAAKATVESARINLAYTKVTAPISGRIGKSTVTEGALVTNGQTTELATVQQLDPIYVDVTQSSNDFMRLKQSVEQGNLHKENATSNVELVMENGQTYPLKGTLQFSDVTVDESTGSITLRAVFPNPQHTLLPGMFVRARIDEGVQPDAILIPQQGVSRTPRGDATVLIVNDKSQVEARPVVASQAIGDKWLISEGLKSGDQVIVSGLQKARPGEQVKATTDTPADTASK

SEQ ID NO: 42917 - protein, 257 aa, Escherichia coli [sequence omitted]

SEQ ID NO: 42918 - protein, 464 aa, Escherichia coli
MPDAKKQGRSNKAMTFFVCFLAALAGLLFGLDIGVIAGALPFIADEFQITSHTQEWVVSSMMFGAAVGAVGSGWLSFKLGRKKSLMIGAILFVAGSLFSAAAPNVEVLILSRVLLGLAVGVASYTAPLYLSEIAPEKIRGSMISMYQLMITIGILGAYLSDTAFSYTGAWRWMLGVIIIPAILLLIGVFFLPDSPRWFAAKRRFVDAERVLLRLRDTSAEAKRELDEIRESLQVKQSGWALFKENSNFRRAVFLGVLLQVMQQFTGMNVIMYYAPKIFELAGYTNTTEQMWGTVIVGLTNVLATFIAIGLVDRWGRKPTLTLGFLVMAAGMGVLGTMMHIGIHSPSAQYFAIAMLLMFIVGFAMSAGPLIWVLCSEIQPLKGRDFGITCSTATNWIANMIVGATFLTMLNTLGNANTFWVYAALNVLFILLTLWLVPETKHVSLEHIERNLMKGRKLREIGAHD

SEQ ID NO: 42919 - protein, 103 aa, Escherichia coli
MQNQRIRIRLKAFDHRLIDQATAEIVETAKRTGAQVRGPIPLPTRKERFTVLISPHVNKDARDQYEIRTHLRLVDIVEPTEKTVDALMRLDLAAGVDVQISLG

SEQ ID NO: 42920 - protein, 330 aa, Escherichia coli
MQSDKVLNLPAGYFGIVLGTIGMGFAWRYASQVWQVSHWLGDGLVILAMIIWGLLTSAFIARLIRFPHSVLAEVRHPVLSSFVSLFPATTMLVAIGFVPWFRPLAVCLFSFGVVVQLAYAAWQTAGLWRGSHPEEATTPGLYLPTVANNFISAMACGALGYTDAGLVFLGAGVFSWLSLEPVILQRLRSSGELPTALRTSLGIQLAPALVACSAWLSVNGGEGDTLAKMLFGYGLLQLLFMLRLMPWYLSQPFNASFWSFSFGVSALATTGLHLGSGSDNGFFHTLAVPLFIFTNFIIAILLIRTFALLMQGKLLVRTERAVLMKAEDKE

SEQ ID NO: 42921 - protein, 149 aa, Escherichia coli
MGIIAQNKISSLGMLFGAIALMMGIIHFSFGPFSAPPPTFESIVADKTAEIKRGLLAGIKGEKITTVEKKEDVDVDKILNQSGIALAIAALLCAFIGGMRKENRWGIRGALVFGGGTLAFHTLLFGIGIVCSILLIFLIFSFLTGGSLV

SEQ ID NO: 42922 - protein, 412 aa, Escherichia coli
MADTRPERRFTRIDRLPPYVFNITAELKMAARRRGEDIIDFSMGNPDGATPPHIVEKLCTVAQRPDTHGYSTSRGIPRLRRAISRWYQDRYDVEIDPESEAIVTIGSKEGLAHLMLATLDHGDTVLVPNPSYPIHIYGAVIAGAQVRSVPLVEGVDFFNELERAIRESYPKPKMMILGFPSNPTAQCVELEFFEKVVALAKRYDVLVVHDLAYADIVYDGWKAPSIMQVPGARDVAVEFFTLSKSYNMAGWRIGFMVGNKTLVSALARIKSYHDYGTFTPLQVAAIAALEGDQQCVRDIAEQYKRRRDVLVKGLHEAGWMVEMPKASMYVWAKIPEPYAAMGSLEFAKKLLNEAKVCVSPGIGFGDYGDTHVRFALIENRDRIRQAIRGIKAMFRADGLLPASSKHIHENAE

SEQ ID NO: 42923 - protein, 71 aa, Escherichia coli
MSNKMTGLVKWFNADKGFGFISPVDGSKDVFVHFSAIQNDNYRTLFEGQKVTFSIESGAKGPAAANVIITD

SEQ ID NO: 42924 - protein, 486 aa, Escherichia coli
MKKLLRLFFPLSLRVRFLLATAAVVLVLSLAYGMVALIGYSVSFDKTTFRLLRGESNLFYTLAKWENNKLHVELPENIDKQSPTMTLIYDENGQLLWAQRDVPWLMKMIQPDWLKSNGFHEIEADVNDTSLLLSGDHSIQQQLQEVREDDDDAEMTHSVAVNVYPATSRMPKLTIVVVDTIPVELKSSYMVWSWFIYVLSANLLLVIPLLWVAAWWSLRPIEALAKEVRELEEHNRELLNPATTRELTSLVRNLNRLLKSERERYDKYRTTLTDLTHSLKTPLAVLQSTLRSLRSEKMSVSDAEPVMLEQISRISQQIGYYLHRASMRGGTLLSRELHPVAPLLDNLTSALNKVYQRKGVNISLDISPEISFVGEQNDFVEVMGNVLDNACKYCLEFVEISARQTDEHLYIVVEDDGPGIPLSKREVIFDRGQRVDTLRPGQGVGLAVAREITEQYEGKIVAGESMLGGARMEVIFGRQHSAPKDE

SEQ ID NO: 42925 - protein, 455 aa, Escherichia coli
MRTQVLLNRLKKHLFFKDVFDAVYLCSQRSTFSRKRRSLPPNEKHESDHESHWVVMFCRSHLPILAPGLPHNQSGFLLTELRKEDVEMLSQIQRFGGAMFTPVLLFPFAGIVVGLAILLQNPMFVGESLTDPNSLFAQIVHIIEEGGWTVFRNMPLIFAVGLPIGLAKQAQGRACLAVMVSFLTWNYFINAMGMTWGSYFGVDFTQDAVAGSGLTMMAGIKTLDTSIIGAIIISGIVTALHNRLFDKKLPVFLGIFQGTSYVVIIAFLVMIPCAWLTLLGWPKVQMGIESLQAFLRSAGALGVWVYTFLERILIPTGLHHFIYGQFIFGPAAVEGGIQMYWAQHLQEFSLSAEPLKSLFPEGGFALHGNSKIFGAVGISLAMYFTAAPENRVKVAGLLIPATLTAMLVGITEPLEFTFLFISPLLFAVHAVLAASMSTVMYLFGVVGNMGGGLID

SEQ ID NO: 42926 - protein, 323 aa, Escherichia coli
MTIAIVIGTHGWAAEQLLKTAEMLLGEQENVGWIDFVPGENAETLIEKYNAQLAKLDTTKGVLFLVDTWGGSPFNAASRIVVDKEHYEVIAGVNIPMLVETLMARDDDPSFDELVALAVETGREGVKALKAKPVEKAAPAPAAAAPKAAPTPAKPMGPNDYMVIGLARIDDRLIHGQVATRWTKETNVSRIIVVSDEVAADTVRKTLLTQVAPPGVTAHVVDVAKMIRVYNNPKYAGERVMLLFTNPTDVERLVEGGVKITSVNVGGMAFRQGKTQVNNAVSVDEKDIEAFKKLNARGIELEVRKVSTDPKLKMMDLISKIDK

SEQ ID NO: 42927 - protein, 136 aa, Escherichia coli [sequence omitted]

SEQ ID NO: 42928 - protein, 1032 aa, Escherichia coli
MGDIMRPIPFEELLTRIFDEYQQQRSIFGIPEQQFYSPVKGKTVSVFGETCATPVGPAAGPHTQLAQNIVTSWLTGGRFIELKTVQILDRLELEKPCIDAEDECFNTEWSTEFTLLKAWDEYLKAWFALHLLEAMFQPSDSGKSFIFNMSVGYNLEGIKQPPMQQFIDNMMDASDHPKFAQYRDTLNKLLQDDAFLARHGLQEKRESLQALPARIPTSMVHGVTLSTMHGCPPHEIEAICRYMLEEKGLNTFVKLNPTLLGYARVREILDVCGFGYIGLKEESFDHDLKLTQALEMLERLMALAKEKSLGFGVKLTNTLGTINNKGALPGEEMYMSGRALFPLSINVAAVLSRAFDGKLPISYSGGASQLTIRDIFDTGIRPITMATDLLKPGGYLRLSACMRELEGSDAWGLDHVDVERLNRLAADALTMEYTQKHWKPEERIEVAEDLPLTDCYVAPCVTACAIKQDIPEYIRLLGEHRYADALELIYQRNALPAITGHICDHQCQYNCTRLDYDSALNIRELKKVALEKGWDEYKQRWHKPAGSGSRHPVAVIGAGPAGLAAGYFLARAGHPVTLFEREANAGGVVKNIIPQFRIPAELIQHDIDFVAAHGVKFEYGCSPDLTIEQLKNQGFHYVLIATGTDKNSGVKLAGDNQNVWKSLPFLREYNKGTALKLGKHVVVVGAGNTAMDCARAALRVPGVEKATIVYRRSLQEMPAWREEYEEALHDGVEFRFLNNPERFDADGTLTLRVMSLGEPDEKGRRRPVETNETVTLLVDSLITAIGEQQDTEALNAMGVPLDKNGWPDVDHNGETRLTDVFMIGDVQRGPSSIVAAVGTARRATDAILSRENIRSHQNDKYWNNVNPAEIYQRKGDISITLVNSDDRDAFVAQEAARCLECNYVCSKCVDVCPNRANVSIAVPGFQNRFQTLHLDAYCNECGNCAQFCPWNGKPYKDKITVFSLAQDFDNSSNPGFLVEDCRVRVRLNNQSWVLNIDSKGQFNNVPPELNDMCRIISHVHQHHHYLLGRVEV

SEQ ID NO: 42929 - protein, 516 aa, Escherichia coli
MPTSHENALQQRCQQIVTSPVLSPEQKRHFLALEAENNLPYPQLPAEARRALDEGVICDMFEGHAPYKPRYVLPDYARFLANGSEWLELEGAKDLDDALSLLTILYHHVPSVTSMPVYLGQLDALLQPYVRILTQDEIDVRIKRFWRYLDRTLPDAFMHANIGPSDSPITRAILRADAELKQVSPNLTFIYDPEITPDDLLLEVAKNICECSKPHIANGPVHDKIFTKGGYGIVSCYNSLPLAGGGSTLVRLNLKAIAERSESLDDFFTRTLPHYCQQQIAIIDARCEFLYQQSHFFENSFLVKEGLINPERFVPMFGMYGLAEAVNLLCEKEGIAARYGKEAAANEVGYRISAQLAEFVANTPVKYGWQKRAMLHAQSGISSDIGTTPGARLPYGDEPDPITHLQTVAPHHAYYYSGISDILTLDETIKRNPQALVQLCLGAFKAGMREFTANVSGNDLVRVTGYMVRLSDLEKYRAEGSRTNTTWLGEEAARNTRILERQPRVISHEQQMRFSQ

SEQ ID NO: 42930 - protein, 81 aa, Escherichia coli
MVQLCLGAFKAGMREFTANVSGNDLVRVTGYMVRLSDLEKYRAEGSRTNTTWLGEEAARNTRILERQPRVISHEQQMRFSQ

SEQ ID NO: 42931 - protein, 229 aa, Escherichia coli
MSQPRPLLSPPETEEQLLAQAQQLSGYTLGELAALVGLVTPENLKRDKGWIGVLLEIWLGASAGSKPEQDFAALGVELKTIPVDSLGRPLETTFVCVAPLTGNSGVTWETSHVRHKLKRVLWIPVEGERSIPLAQRRVGSPLLWSPNEEEDRQLREDWEELMDMIVLGQVERITARHGEYLQIRPKAANAKALTEAIGARGERILTLPRGFYLKKNFTSALLARHFLIQ

SEQ ID NO: 42932 - protein, 269 aa, Escherichia coli [sequence omitted]

SEQ ID NO: 42933 - protein, 157 aa, Escherichia coli
MSQNDIIIRTHYKSPHRLHIDSDIPTPSSEPINQFARQLITLLDTSDLSSMLSYCVTQEFTANCRKISQNCYSTALFTINFATSPIHTENILITLHYKKEIISLLLETTPIKANHLRSILDYIEQEQLTAEDRNHCMKLSKKIHREKNYTPNSKSQW

SEQ ID NO: 42934 - protein, 504 aa, Escherichia coli
MKNEKRKTGIEPKVFFPPLIIVGILCWLTVRDLDAANVVINAVFSYVTNVWGWAFEWYMVVMLFGWFWLVFGPYAKKRLGNEPPEFSTASWIFMMFASCTSAAVLFWGSIEIYYYISTPPFGLEPNSTGAKELGLAYSLFHWGPLPWATYSFLSVAFAYFFFVRKMEVIRPSSTLVPLVGEKHAKGLFGTIVDNFYLVALIFAMGTSLGLATPLVTECMQWLFGIPHTLQLDAIIITCWIILNAICVACGLQKGVRIASDVRSYLSFLMLGWVFIVSGASFIMNYFTDSVGMLLMYLPRMLFYTDPIAKGGFPQGWTVFYWAWWVIYAIQMSIFLARISRGRTVRELCFGMVLGLTASTWILWTVLGSNTLLLIDKNIINIPNLIEQYGVARAIIETWAALPLSTATMWGFFILCFIATVTLVNACSYTLAMSTCREVRDGEEPPLLVRIGWSILVGIIGIVLLALGGLKPIQTAIIAGGCPLFFVNIMVTLSFIKDAKQNWKD

SEQ ID NO: 42935 - protein, 464 aa, Escherichia coli
MPHHQPCPPASSLSAGPRGGVIMLILKNVTAVQLHPAKVQEGVDIAIENDVIVAIGDALTQRYPDASFKEMHGRIVMPGIVCSHNHFYSGLSRGIMANIAPCPDFISTLKNLWWRLDRALDEESLYYSGLICSLEAIKSGCTSVIDHHASPAYIGGSLSTLRDAFLKVGLRAMTCFETTDRNNGIKELQEGVEENIRFARLIDEAKKATSEPYLVEAHIGAHAPFTVPDAGLEMLREAVKATGRGLHIHAAEDLYDVSYSHHWYGKDLLARLAQFDLIDSKTLVAHGLYLSKDDITLLNQRDAFLVHNARSNMNNHVGYNHHLSDIRNLALGTDGIGSDMFEEMKFAFFKHRDAGGPLWPDSFAKALTNGNELMSRNFGAKFGLLEAGYKADLTICDYNSPTPLLADNIAGHIAFGMGSGSVHSVMVNGVMVYEDRQFNFDCDSIYAQARKAAASMWRRMDALA

SEQ ID NO: 42936 - protein, 321 aa, Escherichia coli
MNTVGTPLLWGGFAVVVAIMLAIDLLLQGRRGAHAMTMKQAAAWSLVWVTLSLLFNAAFWWYLVQTEGRAVADPQALAFLTGYLIEKSLAVDNVFVWLMLFSYFSVPAALQRRVLVYGVLGAIVLRTIMIFTGSWLISQFDWILYIFGAFLLFTGVKMALAHEDESGIGDKRWCAGYAVHLRMTDTIDNEHFFVRKNGLLYATPLMLVLILVELSDVIFAVDSIPAIFAVTTDPFIVLTSNLFAILGLRAMYFLLAGVAERFSMLKYGLAVILVFIGIKMLIVDFYHIPIAVSLGVVFGILVMTFIINAWVNYRHDKQRGG

SEQ ID NO: 42937 - protein, 115 aa, Escherichia coli [sequence omitted]

SEQ ID NO: 42938 - protein, 132 aa, Escherichia coli
MSTTHNVPQGDLVLRTLAMPADTNANGDIFGGWLMSQMDIGGAILAKEIAHGRVVTVRVEGMTFLRPVAVGDVVCCYARCVQKGTTSVSINIEVWVKKVASEPIGQRYKATEALFKYVAVDPEGKPRALPVE

SEQ ID NO: 42939 - protein, 179 aa, Escherichia coli
MKQFLDFLPLVVFFAFYKIYDIYAATAALIVATAIVLIYSWVRFRKVEKMALITFVLVVVFGGLTLFFHNDEFIKWKVTVIYALFAGALLVSQWVMKKPLIQRMLGKELTLPQPVWSKLNLAWAVFFILCGLANIYIAFWLPQNIWVNFKVFGLTALTLIFTLLSGIYIYRHMPQEDKS

SEQ ID NO: 42940 - protein, 437 aa, Escherichia coli
MPLVIVAIGVILLLLLMIRFKMNGFIALVLVALAVGLMQGMPLDKVIGSIKAGVADVGSLALIMGFGAMLGKMLADCGGAQRIATTLIAKFGKKHIQWAVVLTGFTVGFALFYEVGFVLMLPLVFTIAASANIPLLYVGVPMAAALSVTHGFLPPHPGPTAIATIFNADMGKTLLYGTILAIPTVILAGPVYARVLKGIDKPIPEGLYSAKTFSEEEMPSFGVSVWTSLVPVVLMAMRAIAEMILPKGHAFLPVAEFLGDPVMATLIAVLIAMFTFGLNRGRSMDQINDTLVSSIKIIAMMLLIIGGGGAFKQVLVDSGVDKYIASMMHETNISPLLMAWSIAAVLRIALGSATVAAITAGGIAAPLIATTGVSPELMVIAVGSGSVIFSHVNDPGFWLFKEYFNLTIGETIKSWSMLETIISVCGLVGCLLLNMVI

SEQ ID NO: 42941 - protein, 328 aa, Escherichia coli
MTQPVLDIQQLHLSFPGFNGDVHALNNVSLQINRGEIVGLVGESGSGKSVTAMLIMRLLPTGSYCVHRGQISLLGEDVLNAREKQLRQWRGARVAMIFQEPMTALNPTRRIGLQMMDVIRHHQPISRREARAKAIDLLEEMQIPDAVEVMSRYPFELSGGMRQRVMIALAFSCEPQLIIADEPTTALDVTVQLQVLRLLKHKARASGTAVLFISHDMAVVSQLCDSVYVMYAGSVIESGVTADVIHHPRHPYTIGLLQCAPEHGVPRQLLPAIPGTVPNLTHLPDGCAFRDRCYAAGAQCENVPALTACGDNNQRCACWYPQQEVISV

SEQ ID NO: 42942 - protein, 322 aa, Escherichia coli
MTMPTNQCPWRMQVHHITQETPDVWTISLICHDYYPYRAGQYALVSVRNSAETLRAYTISSTPGVSEYITLTVRRIDDGVGSQWLTRDVKRGDYLWLSDAMGEFTCDDKAEDKFLLLAAGCGVTPIMSMRRWLAKNRPQADVRVIYNVRTPQDVIFADEWRNYPVTLVAENNVTEGFIAGRLTRELLAGVPDLASRTVMTCGPAPYMDWVEQEVKALGVTRFFKEKFFTPVAEAATSGLKFTKLQPAREFYAPVGTTLLEALESNNVPVVAACRAGVCGCCKTKVVSGEYTVSSTMTLTDAEIAEGYVLACSCHPQGDLVLA

SEQ ID NO: 42943 - protein, 159 aa, Escherichia coli
MFTIKTDDLTHPAVQALVAYHISGMLQQSPPESSHALDVQKLRNPTVTFWSVWEGEQLAGIGALKLLDDKHGELKSMRTAPNYLRRGVASLILRHILQVAQDRCLHRLSLETGTQAGFTACHQLYLKHGFADCEPFADYRLDPHSRFLSLTLCENNELP

SEQ ID NO: 42944 - protein, 103 aa, Escherichia coli [sequence omitted]

SEQ ID NO: 42945 - protein, 130 aa, Escherichia coli
MSMQDPIADMLTRIRNGQAANKAAVTMPSSKLKVAIANVLKEEGFIEDFKVEGDTKPELELTLKYFQGKAVVESIQRVSRPGLRIYKRKDELPKVMAGLGIAVVSTSKGVMTDRAARQAGLGGEIICYVA

SEQ ID NO: 42946 - protein, 746 aa, Escherichia coli
MKVDIDTSDKLYADAWLGFKGTDWKNEINVRDFIQHNYTPYEGDESFLAEATPATTELWEKVMEGIRIENATHAPVDFDTNIATTITAHDAGYINQPLEKIVGLQTDAPLKRALHPFGGINMIKSSFHAYGREMDSEFEYLFTDLRKTHNQGVFDVYSPDMLRCRKSGVLTGLPDGYGRGRIIGDYRRVALYGISYLVRERELQFADLQSRLEKGEDLEATIRLREELAEHRHALLQIQEMAAKYGFDISRPAQNAQEAVQWLYFAYLAAVKSQNGGAMSLGRTASFLDIYIERDFKAGVLNEQQAQELIDHFIMKIRMVRFLRTPEFDSLFSGDPIWATEVIGGMGLDGRTLVTKNSFRYLHTLHTMGPAPEPNLTILWSEELPIAFKKYAAQVSIVTSSLQYENDDLMRTDFNSDDYAIACCVSPMVIGKQMQFFGARANLAKTLLYAINGGVDEKLKIQVGPKTAPLMDDVLDYDKVMDSLDHFMDWLAVQYISALNIIHYMHDKYSYEASLMALHDRDVYRTMACGIAGLSVATDSLSAIKYARVKPIRDENGLAVDFEIDGEYPQYGNNDERVDSIACDLVERFMKKIKALPTYRNAVPTQSILTITSNVVYGQKTGNTPDGRRAGTPFAPGANPMHGRDRKGAVASLTSVAKLPFTYAKDGISYTFSIVPAALGKEDPVRKTNLVGLLDGYFHHEADVEGGQHLNVNVMNREMLLDAIEHPEKYPNLTIRVSGYACASTH

SEQ ID NO: 42947 - protein, 107 aa, Escherichia coli
MRLLILTLSLITLAGCTVTRQAHVSEVDAATGIVRLVYDQAFLQHAHTDRYVSRGIADRACQQEGYTHAVPFGQPVGNCSLFAGSLCLNTEFTLSYQCHHSAFPVFL

SEQ ID NO: 42948 - protein, 341 aa, Escherichia coli
MPSIRLADLAQQLDAELHGDGDIVITGVASMQSAQTGHITFMVNPKYREHLGLCQASAVVMTQDDLPFAKSAALVVKNPYLTYARMAQILDTTPQPAQNIAPSAVIDATAKLGNNVSIGANAVIESGVELGDNVIIGAGCFVGKNSKIGAGSRLWANVTIYHEIQIGQNCLIQSGTVVGADGFGYANDRGNWVKIPQIGRVIIGDRVEIGACTTIDRGALDDTIIGNGVIIDNQCQIAHNVVIGDNTAVAGGVIMAGSLKIGRYCMIGGASVINGHMEICDKVTVTGMGMVMRPITEPGVYSSGIPLQPNKVWRKTAALVMNIDDMSKRLKSLERKVNQQD

SEQ ID NO: 42949 - protein, 151 aa, Escherichia coli
MTTNTHTLQIEEILELLPHRFPFLLVDRVLDFEEGRFLRAVKNVSVNEPFFQGHFPGKPIFPGVLILEAMAQATGILAFKSVGKLEPGELYYFAGIDEARFKRPVVPGDQMIMEVTFEKTRRGLTRFKGVALVDGKVVCEATMMCARSREA

SEQ ID NO: 42950 - protein, 216 aa, Escherichia coli
MNNMNVIIADDHPIVLFGIRKSLEQIEWVNVVGEFEDSTALINNLPKLDAHVLITDLSMPGDKYGDGITLIKYIKRHFPSLSIIVLTMNNNPAILSAVLDLDIEGIVLKQGAPTDLPKALAALQKGKKFTPESVSRLLEKISAGGYGDKRLSPKESEVLRLFAEGFLVTEIAKKLNRSIKTISSQKKSAMMKLGVENDIALLNYLSSVTLSPADKD

SEQ ID NO: 42951 - protein, 255 aa, Escherichia coli
MWIGIISLFPEMFRAITDYGVTGRAVKNGLLSIQSWSPRDFTHDRHRTVDDRPYGGGPGMLMMVQPLRDAIHAAKAAAGEGAKVIYLSPQGRKLDQAGVSELATNQKLILVCGRYEGIDERVIQTEIDEEWSIGDYVLSGGELPAMTLIDSVSRFIPGVLGHEASATEDSFAEGLLDCPHYTRPEVLEGMEVPPVLLSGNHAEIRRWRLKQSLGRTWLRRPELLENLALTEEQARLLAEFKTEHAQQQHKHDGMA

SEQ ID NO: 42952 - protein, 241 aa, Escherichia coli
MATVSMRDMLKAGVHFGHQTRYWNPKMKPFIFGARNKVHIINLEKTVPMFNEALAELNKIASRKGKILFVGTKRAASEAVKDAALSCDQFFVNHRWLGGMLTNWKTVRQSIKRLKDLETQSQDGTFDKLTKKEALMRTRELEKLENSLGGIKDMGGLPDALFVIDADHEHIAIKEANNLGIPVFAIVDTNSDPDGVDFVIPGNDDAIRAVTLYLGAVAATVREGRSQDLASQAEESFVEAE

SEQ ID NO: 42953 - protein, 220 aa, Escherichia coli
MMFWRIFRLELRVAFRHSAEIANPLWFFLIVITLFPLSIGPEPQLLARIAPGIIWVAALLSSLLALERLFRDDLQDGSLEQLMLLPLPLPAVVLAKVMAHWMVTGLPLLILSPLVAMLLGMDVYGWQVMALTLLLGTPTLGFLGAPGVALTVGLKRGGVLLSILVLPLTIPLLIFATAAMDAASMHLPVDGYLAILGALLAGTATLSPFATAAALRISIQ

SEQ ID NO: 42954 - protein, 1407 aa, Escherichia coli [sequence omitted]

SEQ ID NO: 42955 - protein, 339 aa, Escherichia coli
MLQFILRRLGLVIPTFIGITLLTFAFVHMIPGDPVMIMAGERGISPERHAQLLAELGLDKPMWQQYLHYIWGVMHGDLGISMKSRIPVWEEFVPRFQATLELGVCAMIFATAVGIPVGVLAAVKRGSIFDHTAVGLALTGYSMPIFWWGMMLIMLVSVHWNLTPVSGRVSDMVFLDDSNPLTGFMLIDTAIWGEDGNFIDAVAHMILPAIVLGTIPLAVIVRMTRSSMLEVLGEDYIRTARAKGLTRMRVIIVHALRNAMLPVVTVIGLQVGTLLAGAILTETIFSWPGLGRWLIDALQRRDYPVVQGGVLLVATMIILVNLLVDLLYGVVNPRIRHKK

SEQ ID NO: 42956 - protein, 535 aa, Escherichia coli
MRISLKKSGMLKLGLSLVAMTVAASVQAKTLVYCSEGSPEGFNPQLFTSGTTYDASSVPLYNRLVEFKIGTTEVIPGLAEKWEVSEDGKTYTFHLRKGVKWHDNKEFKPTRELNADDVVFSFDRQKNAQNPYHKVSGGSYEYFEGMGLPELISEVKKVDDNTVQFVLTRPEAPFLADLAMDFASILSKEYADAMMKAGTPEKLDLNPIGTGPFQLQQYQKDSRIRYKAFDGYWGTKPQIDTLVFSITPDASVRYAKLQKNECQVMPYPNPADIARMKQDKSINLMEMPGLNVGYLSYNVQKKPLDDVKVRQALTYAVNKDAIIKAVYQGAGVSAKNLIPPTMWGYNDDVQDYTYDPEKAKALLKEAGLEKGFSIDLWAMPVQRPYNPNARRMAEMIQADWAKVGVQAKIVTYEWGEYLKRAKDGEHQTVMMGWTGDNGDPDNFFATLFSCAASEQGSNYSKWCYKPFEDLIQPARATDDHNKRVELYKQAQVVMHDQAPALIIAHSTVFEPVRKEVKGYVVDPLGKHHFENVSIE

SEQ ID NO: 42957 - protein, 624 aa, Escherichia coli
MKGQETRGFQSEVKQLLHLMIHSLYSNKEIFLRELISNASDAADKLRFRALSNPDLYEGDGELRVRVSFDKDKRTLTISDNGVGMTRDEVIDHLGTIAKSGTKSFLESLGSDQAKDSQLIGQFGVGFYSAFIVADKVTVRTRAAGEKPENGVFWESAGEGEYTVADITKEDRGTEITLHLREGEDEFLDDWRVRSIISKYSDHIALPVEIEKREEKDGETVISWEKINKAQALWTRNKSEITDEEYKEFYKHIAHDFNDPLTWSHNRVEGKQEYTSLLYIPSQAPWDMWNRDHKHGLKLYVQRVFIMDDAEQFMPNYLRFVRGLIDSSDLPLNVSREILQDSTVTRNLRNALTKRVLQMLEKLAKDDAEKYQTFWQQFGLVLKEGPAEDFANQEAIAKLLRFASTHTDSSAQTVSLEDYVSRMKEGQEKIYYITADSYAAAKSSPHLELLRKKGIEVLLLSDRIDEWMMNYLTEFDGKPFQSVSKVDESLEKLADEVDESAKEAEKALTPFIDRVKALLGERVKDVRLTHRLTDTPAIVSTDADEMSTQMAKLFAAAGQKVPEVKYIFELNPDHVLVKRAADTEDEAKFSEWVELLLDQALLAERGTLEDPNLFIRRMNQLLVS

SEQ ID NO: 42958 - protein, 394 aa, Escherichia coli [sequence omitted]

SEQ ID NO: 42959 - protein, 267 aa, Escherichia coli
MAIPAFGLGTFRLKDDVVISSVITALELGYRAIDTAQIYDNEAAVGQAIAESGVPRHELYITTKIWIENLSKDKLIPSLKESLQKLRTDYVDLTLIHWPSPNDEVSVEEFMQALLEAKKQGLTREIGISNFTIPLMEKAIAAVGAENIATNQIELSPYLQNRKVVAWAKQHGIHITSYMTLAYGKALKDEVIARIAAKHNATPAQVILAWAMGEGYSVIPSSTKRKNLESNLKAQNLQLDAEDKKAIAALDCNDRLVSPEGLAPEWD

SEQ ID NO: 42960 - protein, 33 aa, Escherichia coli
MRSEQISGSSLNPSCRFSSAYSPVTRQRKDMSR

SEQ ID NO: 42961 - protein, 419 aa, Escherichia coli
MNLTELKNTPVSELITLGENMGLENLARMRKQDIIFAILKQHAKSGEDIFGDGVLEILQDGFGFLRSADSSYLAGPDDIYVSPSQIRRFNLRTGDTISGKIRPPKEGERYFALLKVNEVNFDKPENARNKILFENLTPLHANSRLRMERGNGSTEDLTARVLDLASPIGRGQRGLIVAPPKAGKTMLLQNIAQSIAYNHPDCVLMVLLIDERPEEVTEMQRLVKGEVVASTFDEPASRHVQVAEMVIEKAKRLVEHKKDVIILLDSITRLARAYNTVVPASGKVLTGGVDANALHRPKRFFGAARNVEEGGSLTIIATALIDTGSKMDEVIYEEFKGTGNMELHLSRKIAEKRVFPAIDYNRSGTRKEELLTTQEELQKMWILRKIIHPMGEIDAMEFLINKLAMTKTNDDFFEMMKRS

SEQ ID NO: 42962 - protein, 510 aa, Escherichia coli
MPMSMSSIPSSSQSGKLYGWVERIGNKVPHPFLLFIYLIIVLMVTTAILSAFGVSAKNPTDGTPVVVKNLLSVEGLHWFLPNVIKNFSGFAPLGAILALVLGAGLAERVGLLPALMVKMASHVNARYASYMVLFIAFFSHISSDAALVIMPPMGALIFLAVGRHPVAGLLAAIAGVGCGFTANLLIVTTDVLLSGISTEAAAAFNPQMHVSVIDNWYFMASSVVVLTIVGGLITDKIIEPRLGQWQGNSDEKLQTLTESQRFGLRIAGVVSLLFIAAIALMVIPQNGILRDPINHTVMPSPFIKGIVPLIILFFFVVSLAYGIATRTIRRQADLPHLMIEPMKEMAGFIVMVFPLAQFVAMFNWSNMGKFIAVGLTDILESSGLSGIPAFVGLALLSSFLCMFIASGSAIWSILAPIFVPMFMLLGFHPAFAQILFRIADSSVLPLAPVSPFVPLFLGFLQRYKPDAKLGTYYSLVLPYPLIFLVVWLLMLLAWYLVGLPIGPGIYPRLS

SEQ ID NO: 42963 - protein, 230 aa, Escherichia coli
MVIPENGILRDPINHTVMPSPFIKGIVPLIILFFFVVSLAYGIATRTIRRQADLPHLMIEPMKEMAGFIVMVFPLAQFVAMFNWSNMGKFIAVGLTDILESSGLSGIPAFVGLALLSSFLCMFIASGSAIWSILAPIFVPMFMLLGFHPAFAQILFRIADSSVLPLAPVSPFVPLFLGFLQRYKPDAKLGTYYSLVLPYPLIFLVVWLLMLLAWYLVGLPIGPGIYPRLS

SEQ ID NO: 42964 - protein, 1073 aa, Escherichia coli [sequence omitted]

SEQ ID NO: 42965 - protein, 860 aa, Escherichia coli [sequence omitted]

SEQ ID NO: 42966 - protein, 474 aa, Escherichia coli [sequence omitted]

SEQ ID NO: 42967 - protein, 876 aa, Escherichia coli
MSKSTAEIRQAFLDFFHSKGHQVVASSSLVPHNDPTLLFTNAGMNQFKDVFLGLDKRNYSRATTSQRCVRAGGKHNDLENVGYTARHHTFFEMLGNFSFGDYFKHDAIQFAWELLTSEKWFALPKERLWVTVYESDDEAYEIWEKEVGIPRERIIRIGDNKGAPYASDNFWQMGDTGPCGPCTEIFYDHGDHIWGGPPGSPEEDGDRYIEIWNIVFMQFNRQADGTMEPLPKPSVDTGMGLERIAAVLQHVNSNYDIDLFRTLIQAVAKVTGATDLSNKSLRVIADHIRSCAFLIADGVMPSNENRGYVLRRIIRRAVRHGNMLGAKETFFYKLVGPLIDVMGSAGEDLKRQQAQVEQVLKTEEEQFARTLERGLALLDEELAKLSGDTLDGETAFRLYDTYGFPVDLTADVCRERNIKVDEAGFEAAMEEQRRRAREASGFGADYNAMIRVDSASEFKGYDHLELNGKVTALFVDGKAVDAINAGQEAVVVLDQTPFYAESGGQVGDKGELKGANFSFAVEDTQKYGQAIGHIGKLAAGSLKVGDAVQADVDEARRARIRLNHSATHLMHAALRQVLGTHVSQKGSLVNDKVLRFDFSHNEAMKPEEIRAVEDLVNTQIRRNLPIETNIMDLEAAKAKGAMALFGEKYDERVRVLSMGDFSTELCGGTHASRTGDIGLFRIISESGTAAGVRRIEAVTGEGAIATVHADSDRLSEVAHLLKGDSNNLADKVRSVLERTRQLEKELQQLKEQAAAQESANLSSKAIDVNGVKLLVSELSGVEPKMLRTMVDDLKNQLGSTIIVLATVVEGKVSLIAGVSKDVTDRVKAGELIGMVAQQVGGKGGGRPDMAQAGGTDAAALPAALASVKGWVSAKLQ

SEQ ID NO: 42968 - protein, 689 aa, Escherichia coli
MSEKTFLVEIGTEELPPKALRSLAESFAANFTAELDNAGLAHGTVQWFAAPRRLALKVANLAEAQPDREIEKRGPAIAQAFDAEGKPSKAAEGWARGCGITVDQAERLTTDKGEWLLYRAHVKGESTEALLPNMVATSLAKLPIPKLMRWGASDVHFVRPVHTVTLLLGDKVIPATILGIQSDRVIRGHRFMGEPEFTIDNADQYPEILRERGKVIADYEERKAKIKADAEEAARKIGGNADLSESLLEEVASLVEWPVVLTAKFEEKFLAVPAEALVYTMKGDQKYFPVYANDGKLLPNFIFVANIESKDPQQIISGNEKVVRPRLADAEFFFNTDRKKRLEDNLPRLQTVLFQQQLGTLRDKTDRIQALAGWIAEQIGADVNHATRAGLLSKCDLMTNMVFEFTDTQGVMGMHYARHDGEAEDVAVALNEQYQPRFAGDDLPSNPVACALAIADKMDTLAGIFGIGQHPKGDKDPFALRRAALGVLRIIVEKNLNLDLQTLTEEAVRLYGDKLTNANVVDDVIDFMLGRFRAWYQDEGYTVDTIQAVLARRPTRPADFDARMKAVSHFRTLDAAAALAAANKRVSNILAKSDEVLSDRVNASTLKEPEEIKLAMQVVVLRDKLEPYFTEGRYQDALVELAELREPVDAFFDKVMVMVDDKELRINRLTMLEKLRELFLRVADISLLQ

SEQ ID NO: 42969 - protein, 262 aa, Escherichia coli
MGFLSGKRILVTGVASKLSIAYGIAQAMHREGAELAFTYQNDKLKGRVEEFAAQLGSDIVLQCDVAEDASIDTMFAELGKVWPKFDGFVHSIGFAPGDQLDGDYVNAVTREGFKIAHDISSYSFVAMAKACRSMLNPGSALLTLSYLGAERAIPNYNVMGLAKASLEANVRYMANAMGPEGVRVNAISAGPIRTLAASGIKDFRKMLAHCEAVTPIRRTVTIEDVGNSAAFLCSDLSAGISGEVVHVDGGFSIAAMNELELK

SEQ ID NO: 42970 - protein, 78 aa, Escherichia coli [sequence omitted]

SEQ ID NO: 42971 - protein, 318 aa, Escherichia coli
MRLAPLYRNALLLTGLLLSGIAAVQAADWPRQITDSRGTHTLESQPQRIVSTSVTLTGSLLAIDAPVIASGATTPNNRVADDQGFLRQWSKVAKERKLQRLYIGEPSAEAVAAQMPDLILISATGGDSALALYDQLSTIAPTLIINYDDKSWQSLLTQLGEITGHEKQAAERIAQFDKQLAAAKEQIKLPPQPVTAIVYTAAAHSANLWTPESAQGQMLEQLGFTLAKLPAGLNASQSQGKRHDIIQLGGENLAAGLNGESLFLFAGDQKDADAIYANPLLAHLPAVQNKQVYALGTETFRLDYYSAMQVLDRLKALF

SEQ ID NO: 42972 - protein, 429 aa, Escherichia coli
MKKQRNLRSMAAQAVEQVVEQGQSLSNILPPLQQKVSDKDKALLQELCFGVLRTLSQLDWLINKLMARPMTGKQRTVHYLIMVGLYQLLYTRIPPHAALAETVEGAIAIKRPQLKGLINGVLRQFQRQQEELLAEFNASDARYLHPSWLLKRLQKAYPEQWQSIVEANNQRPPMWLRINRTHHSRDSWLALLDEAGMKGFPHADYPDAVRLETPAPVHALPGFEDGWVTVQDASAQGCMTWLAPQNGEHILDLCAAPGGKTTHILEVAPEAQVVAVDIDEQRLSRVYDNLKRLGMKATVKQGDGRYPSQWCGEQQFDRILLDAPCSATGVIRRHPDIKWLRRDRDIPELAQLQSEILDAIWPHLKTGGTLVYATCSVLPEENSLQIKAFLQRTADAELCETGTPEQPGKQNLPGAEEGDGFFYAKLIKK

SEQ ID NO: 42973 - protein, 383 aa, Escherichia coli
MFEPMELTNDAVIKVIGVGGGGGNAVEHMVRERIEGVEFFAVNTDAQALRKTAVGQTIQIGSGITKGLGAGANPEVGRNAADEDRDALRAALEGADMVFIAAGMGGGTGTGAAPVVAEVAKDLGILTVAVVTKPFNFEGKKRMAFAEQGITELSKHVDSLITIPNDKLLKVLGRGISLLDAFGAANDVLKGAVQGIAELITRPGLMNVDFADVRTVMSEMGYAMMGSGVASGEDRAEEAAEMAISSPLLEDIDLSGARGVLVNITAGFDLRLDEFETVGNTIRAFASDNATVVIGTSLDPDMNDELRVTVVATGIGMDKRPEITLVTNKQVQQPVMDRYQQHGMAPLTQEQKPVAKVVNDNAPQTAKEPDYLDIPAFLRKQAD

SEQ ID NO: 42974 - protein, 951 aa, Escherichia coli
MEKTYNPQDIEQPLYEHWEKQGYFKPNGDESQESFCIMIPPPNVTGSLHMGHAFQQTIMDTMIRYQRMQGKNTLWQVGTDHAGIATQMVVERKIAAEEGKTRHDYGREAFIDKIWEWKAESGGTITRQMRRLGNSVDWERERFTMDEGLSNAVKEVFVRLYKEDLIYRGKRLVNWDPKLRTAISDLEVENRESKGSMWHIRYPLADGAKTADGKDYLVVATTRPETLLGDTGVAVNPEDPRYKDLIGKYVILPLVNRRIPIVGDEHADMEKGTGCVKITPAHDFNDYEVGKRHALPMINILTFDGDIRESAQVFDTKGNESDVYSSEIPAEFQKLERFAARKAVVAAVDALGLLEEIKPHDLTVPYGDRGGVVIEPMLTDQWYVRADVLAKPAVEAVENGDIQFVPKQYENMYFSWMRDIQDWCISRQLWWGHRIPAWYDEAGNVYVGRNEDEVRKENNLGADVVLRQDEDVLDTWFSSALWTFSTLGWPENTDALRQFHPTSVMVSGFDIIFFWIARMIMMTMHFIKDENGKPQVPFHTVYMTGLIRDDEGQKMSKSKGNVIDPLDMVDGISLPELLEKRTGNMMQPQLADKIRKRTEKQFPNGIEPHGTDALRFTLAALASTGRDINWDMKRLEGYRNFCNKLWNASRFVLMNTEGQDCGFNGGEMTLSLADRWILAEFNQTIKAYREALDSFRFDIAAGILYEFTWNQFCDWYLELTKPVMNGGTEAELRGTRHTLVTVLEGLLRLAHPIIPFITETIWQRVKVLCGITADTIMLQPFPQYDASQVDEAALADTEWLKQAIVAVRNIRAEMNIAPGKPLELLLRGCSADAERRVNENRGFLQTLARLESITVLPADDKGPVSVTKIIDGAELLIPMAGLINKEDELARLAKEVAKIEGEISRIENKLANEGFVARAPEAVIAKEREKLEGYAEAKAKLIEQQAVIAAL

SEQ ID NO: 42975 - protein, 147 aa, Escherichia coli
MKNATFYLLDNDTTVDGLSAVEQLVCEIAAERWRSGKRVLIACEDEKQAYRLDEALWARPAESFVPHNLAGEGPRGGAPVEIAWPQKRSSSRRDILISLRTSFADFATAFTEVVDFVPYEDSLKQLARERYKAYRVAGFNLNTATWK

SEQ ID NO: 42976 - protein, 224 aa, Escherichia coli
MKVKNNSQLLMPREKMLKFGISALTDVELLALFLRTGTRGKDVLTLAKEMLENFGSLYGLLTSEYEQFSGVHGIGVAKFAQLKGIAELARRYYNVRMREESPLLSPEMTREFLQSQLTGEEREIFMVIFLDSQHRVITHRRLFSGTLNHVEVHPREIIREAIKINASALILAHNHPSGCAEPSKADKLITERIIKSCQFMDLRVLDHIVIGRGEYVSFAERGWI

SEQ ID NO: 42977 - protein, 214 aa, Escherichia coli
MRIILLGAPGAGKGTQAQFIMEKYGIPQISTGDMLRAAVKSGSELGKQAKDIMDAGKLVTDELVIALVKERIAQEDCRNGFLLDGFPRTIPQADAMKEAGINVDYVLEFDVPDELIVDRIVGRRVHAPSGRVYHVKFNPPKVEGKDDVTGEELTTRKDDQEETVRKRLVEYHQMTAPLIGYYSKEAEAGNTKYAKVDGTKPVAEVRADLEKILG

SEQ ID NO: 42978 - protein, 280 aa, Escherichia coli
MHSLQRKVLRTICPDQKGLIARITNICYKHELNIVQNNEFVDHRTGRFFMRTELEGIFNDSTLLADLDSALPEGSVRELNPAGRRRIVILVTKEAHCLGDLLMKANYGGLDVEIAAVIGNHDTLRSLVERFDIPFELVSHEGLTRNEHDQKMADAIDAYQPDYVVLAKYMRVLTPEFVARFPNKIINIHHSFLPAFIGARPYHQAYERGVKIIGATAHYVNDNLDEGPIIMQDVIHVDHTYTAEDMMRAGRDVEKNVLSRALYKVLAQRVFVYGNRTIIL

SEQ ID NO: 42979 - protein, 152 aa, Escherichia coli
MSQLCPCGSAVEYSLCCHPYVSGEKVAPDPEHLMRSRYCAFVMQDADYLIKTWHPSCGAAALRAELMAGFAHTEWLGLTVFEHCWQDADNIGFVSFVARFTEGGKTGAIIERSRFLKENGQWYYIDGTRPQFGRNDPCPCGSGKKFKKCCGQ

SEQ ID NO: 42980 - protein, 1259 aa, Escherichia coli
MSLWKKISLGVVIVILLLLGSVAFLVGTTSGLHLVFKAADRWVPGLDIGKVTGGWRDLTLSDVRYEQPGVAVKAGNLHLAVGLECLWNSSVCINDLALKDIQVNIDSKKMPPSEQVEEEEDSGPLDLSTPYPITLTRVALDNVNIKIDDTTVSVMDFTSGLNWQEKTLTLKPTSLKGLLIALPKVAEVAQEEVVEPKIENPQPDEKPLGETLKDLFSRPVLPEMTDVHLPLNLNIEEFKGEQLRVTGDTDITVSTMLLKVSSIDGNTKLDALDIDSSQGIVNASGTAQLSDNWPVDITLNSTLNVEPLKGEKVKLKMGGALREQLEIGVNLSGPVDMDLRAQTRLAEAGLPLNVEVNSKQLYWPFTGEKQYQADDLKLKLTGKMTDYTLSMRTAVKGQEIPPATITLDAKGNEQQVNLDKLTVAALEGKTELKALLDWQQAISWRGELTLNGINTAKEFPDWPSKLNGLIKTRGSLYGGTWQMDVPELKLTGNVKQNKVNVDGTLKGNSYMQWMIPGLHLELGPNSAEVKGELGVKDLNLDATINAPGLDNALPGLGGTAKGLVKVRGTVEAPQLLADITARGLRWQELSVAQVRVEGDIKSTDQIAGKLDVRVEQISQPDVNINLVTLNAKGSEKQHELQLRIQGEPVSGQLNLAGSFDRKEERWKGTLSNTRFQTPVGPWSLTRDIALDYRNKEQKISIGPHCWLNPNAELCVPQTIDAGAEGRAVVNLNRFDLAMLKPFMPETTQASGIFTGKADVAWDTTKEGLPQGSITLSGRNVQVTQTVNDAALPVAFQTLNLTAELRNNRAELGWTIRLTNNGQFDGQVQVTDPQGRRNLGGNVNIRNFNLAMINPIFTRGEKAAGMVSANLRLGGDVQSPQLFGQLQVTGVDIDGNFMPFDMQPSQLAVNFNGMRSTLAGTVRTQQGEIYLNGDADWSQIENWRARVTAKGSKVRITVPPMVRMDVSPDVVFEATPNLFTLDGRVDVPWARIVVHDLPESAVGVSSDVVMLNDNLQPEEPKTASIPINSNLIVHVGNNVRIDAFGLKARLTGDLNVVQDKQGLGLNGQINIPEGRFHAYGQDLIVRKGELLFSGPPDQPYLNIEAIRNPDATEDDVIAGVRVTGLADEPKAEIFSDPAMSQQAALSYLLRGQGLESDQSDSAAMTSMLIGLGVAQSGQIVGKIGETFGVSNLALDTQGVGDSSQVVVSGYVLPGLQVKYGVGIFDSIATLTLRYRLMPKLYLEAVSGVDQALDLLYQFEF

SEQ ID NO: 42981 - protein, 283 aa, Escherichia coli
MAEITASLVKELRERTGAGMMDCKKALTEANGDIELAIENMRKSGAIKAAKKAGNVAADGVIKTKIDGNYGIILEVNCQTDFVAKDAGFQAFADKVLDAAVAGKITDVEVLKAQFEEERVALVAKIGENINIRRVAALEGDVLGSYQHGARIGVLVAAKGADEELVKHIAMHVAASKPEFIKPEDVSAEVVEKEYQVQLDIAMQSGKPKEIAEKMVEGRMKKFTGEVSLTGQPFVMEPSKTVGQLLKEHNAEVTGFIRFEVGEGIEKVETDFAAEVAAMSKQS

SEQ ID NO: 42982 - protein, 140 aa, Escherichia coli
MLKTISPLISPELLKVLAEMGHGDEIIFSDAHFPAHSMGPQVIRADGLLVSDLLQAIIPLFELDSYAPPLVMMAAVEGDTLDPEVERRYRNALSLQAPCPDIIRINRFAFYERAQKAFAIVITGERAKYGNILLKKGVTP

SEQ ID NO: 42983 - protein, 613 aa, Escherichia coli
MEQNPQSQLKLLVTRGKEQGYLTYAEVNDHLPEDIVDSDQIEDIIQMINDMGIQVMEEAPDADDLMLAENTADEDAAEAAAQVLSSVESEIGRTTDPVRMYMREMGTVELLTREGEIDIAKRIEDGINQVQCSVAEYPEAITYLLEQYDRVEAEEARLSDLITGFVDPNAEEDLAPTATHVGSELSQEDLDDDEDEDEEDGDDDSADDDNSIDPELAREKFAELRAQYVVTRDTIKAKGRSHATAQEEILKLSEVFKQFRLVPKQFDYLVNSMRVMMDRVRTQERLIMKLCVEQCKMPKKNFITLFTGNETSDTWFNAAIAMNKPWSEKLHDVSEEVHRALQKLQQIEEETGLTIEQVKDINRRMSIGEAKARRAKKEMVEANLRLVISIAKKYTNRGLQFLDLIQEGNIGLMKAVDKFEYRRGYKFSTYATWWIRQAITRSIADQARTIRIPVHMIETINKLNRISRQMLQEMGREPTPEELAERMLMPEDKIRKVLKIAKEPISMETPIGDDEDSHLGDFIEDTTLELPLDSATTESLRAATHDVLAGLTAREAKVLRMRFGIDMNTDYTLEEVGKQFDVTRERIRQIEAKALRKLRHPSRSEVLRSFLDD

SEQ ID NO: 42984 - protein, 642 aa, Escherichia coli
MPVITLPDGSQRHYDHAVSPMDVALDIGPGLAKACIAGRVNGELVDACDLIENDAQLSIITAKDEEGLEIIRHSCAHLLGHAIKQLWPHTKMAIGPVIDNGFYYDVDLDRTLTQEDVEALEKRMHELAEKNYDVIKKKVSWHEARETFANRGESYKVSILDENIAHDDKPGLYFHEEYVDMCRGPHVPNMRFCHHFKLMKTAGAYWRGDSNNKMLQRIYGTAWADKKALNAYLQRLEEAAKRDHRKIGKQLDLYHMQEEAPGMVFWHNDGWTIFRELEVFVRSKLKEYQYQEVKGPFMMDRVLWEKTGHWDNYKDAMFTTSSENREYCIKPMNCPGHVQIFNQGLKSYRDLPLRMAEFGSCHRNEPSGSLHGLMRVRGFTQDDAHIFCTEEQIRDEVNGCIRLVYDMYSTFGFEKIVVKLSTRPEKRIGSDEMWDRAEADLAVALEENNIPFEYQLGEGAFYGPKIEFTLYDCLDRAWQCGTVQLDFSLPSRLSASYVGEDNERKVPVMIHRAILGSMERFIGILTEEFAGFFPTWLAPVQVVIMNITDSQSEYVNELTQKLSNAGIRVKADLRNEKIGFKIREHTLRRVPYMLVCGDKEVESGKVAVRTRRGKDLGSMDVNEVIEKLQQEIRSRSLKQLEE

SEQ ID NO: 42985 - protein, 393 aa, Escherichia coli
MTNSNRIKLTWISFLSYALTGALVIVTGMVMGNIADYFNLPVSSMSNTFTFLNAGILISIFLNAWLMEIVPLKTQLRFGFLLMVLAVAGLMFSHSLALFSAAMFILGVVSGITMSIGTFLVTQMYEGRQRGSRLLFTDSFFSMAGMIFPMIAAFLLARSIEWYWVYACIGLVYVAIFILTFGCEFPALGKHAPKTDAPVEKEKWGIGVLFLSVAALCYILGQLGFISWVPEYAKGLGMSLNDAGTLVSNFWMSYMVGMWAFSFILRFFDLQRILTVLAGLAAILMYVFNTGTPAHMAWSILALGFFSSAIYTTIITLGSQQTKVPSPKLVNFVLTCGTIGTMLTFVVTGPIVEHSGPQAALLTANGLYAVVFVMCFLLGFVSRHRQHNTLTSH

SEQ ID NO: 42986 - protein, 238 aa, Escherichia coli
MNEFFPLASAAGMTVGLAVCALIVGLALAMFFAVWESAKWRPVAWAGSALVTILRGLPEILVVLFIYFGSSQLLLTLSDGFTINLGFVQIPVQMDIENFDVSPFLCGVIALSLLYAAYASQTLRGALKAVPVGQWESGQALGLSKSAIFFRLVMPQMWRHALPGLGNQWLVLLKDTALVSLISVNDLMLQTKSIATRTQEPFTWYIVAAAIYLVITLLSQYILKRIDLRATRFERRPS

SEQ ID NO: 42987 - protein, 185 aa, Escherichia coli
MVMMSKQLTAQAPVDPIVLGKMGSSYGIRGWLRVFSSTEDAESIFDYQPWFIQKAGQWQQVQLESWKHHNQDMIIKLKGVDDRDAANLLTNCEIVVDSSQLPQLEEGDYYWKDLMGCQVVTTEGYDLGKVVDMMETGSNDVLVIKANLKDAFGIKERLVPFLDGQVIKKVDLTTRSIEVDWDPGF

SEQ ID NO: 42988 - protein, 518 aa, Escherichia coli
MLVRTRHLVGLISGVLILSVLLPVGLSIWLAHQQVETSFIEELDTYSSRVAIRANKVATQGKDALQELERWQGAACSEAHLMEMRRVSYSYRYIQEVAYIDNNVPQCSSLEHESPPDTFPEPGKISKDGYRVWLTSHNDLGIIRYMVAMGTAHYVVMIDPASFIDVIPYSSWQIDAAIIGNAHNVVITSSDEIAQGIITRLQKTPGEHIENNGIIYDILPLPEMNISIITWASTKMLQKGWHRQVFIWLPLGLVIGLLAAMFVLRILRRIQSPHHRLQDAIENRDICVHYQPIVSLANGKIVGAEALARWPQTDGSWLSPDSFIPLAQQTGLSEPLTLLIIRSVFEDMGDWLRQHPQQHISINLESPVLTSEKIPQLLRDMINHYQVNPRQIALELTEREFADPKTSAPIISRYREAGHEIYLDDFGTGYSSLSYLQDLDVDILKIDKSFVDALEYKNVTPHIIEMAKTLKLKMVAEGIETSKQEEWLRQHGVHYGQGWLYSKALPKEDFLRWAEQHL

SEQ ID NO: 42989 - protein, 59 aa, Escherichia coli [sequence omitted]

SEQ ID NO: 42990 - protein, 212 aa, Escherichia coli
MKKLTVAALAVTTLLSGSAFAHEAGEFFMRAGSATVRPTEGAGGTLGSLGGFSVTNNTQLGLTFTYMATDNIGVELLAATPFRHKIGTRATGDIATVHHLPPTLMAQWYFGDASSKFRPYVGAGINYTTFFDNGFNDHGKEAGLSDLSLKDSWGAAGQVGVDYLINRDWLVNMSVWYMDIDTTANYKLGGAQQHDSVRLDPWVFMFSAGYRF

SEQ ID NO: 42991 - protein, 326 aa, Escherichia coli
MAFTPFPPRQPTASARLPLTLMTLDDWALATITGADSEKYMQGQVTADVSQMAEDQHLLAAHCDAKGKMWSNLRLFRDGDGFAWIERRSVREPQLTELKKYAVFSKVTIAPDDERVLLGVAGFQARAALANLFSELPSKEKQVVKEGATTLLWFEHPAERFLIVTDEATANMLTDKLRGEAELNNSQQWLALNIEAGFPVIDAANSGQFIPQATNLQALGGISFKKGCYTGQEMVARAKFRGANKRALWLLAGSASRLPEAGEDLELKMGENWRRTGTVLAAVKLEDGQVVVQVVMNNDMEPDSIFRVRDDANTLHIEPLPYSLEE

SEQ ID NO: 42992 - protein, 277 aa, Escherichia coli
MEYQHWLREAISQLQASESPRRDAEILLEHVTGRGRTFILAFGETQLTDEQCQQLDALLTRRRDGEPIAHLTGVREFWSLPLFVSPATLIPRPDTECLVEQALARLPEQPCRILDLGTGTGAIALALASERPDCEIIAVDRMPDAVSLAQRNAQHLAIKNIHILQSDWFSALAGQQFAMIVSNPPYIDEQDPHLQQGDVRFEPLTALVAADSGMADIVHIIEQSRNALVSGGFLLLEHGWQQGEAVRQAFILAGYHDVETCRDYGDNERVTLGRYYQ

SEQ ID NO: 42993 - protein, 130 aa, Escherichia coli
MTSFSTLLSVHLISIALSVGLLTLRFWLRYQKHPQAFARWTRIVPPVVDTLLLLSGIALMAKAHILPFSGQAQWLTEKLFGVIIYIVLGFIALDYRRMHSQQARIIAFPLALVVLYIIIKLATTKVPLLG

SEQ ID NO: 42994 - protein, 142 aa, Escherichia coli
MAKKVQAYVKLQVAAGMANPSPPVGPALGQQGVNIMEFCKAFNAKTDSIEKGLPIPVVITVYADRSFTFVTKTPPAAVLLKKAAGIKSGSGKPNKDKVGKISRAQLQEIAQTKAADMTGADIEAMTRSIEGTARSMGLVVED

SEQ ID NO: 42995 - protein, 234 aa, Escherichia coli
MAKLTKRMRVIREKVDATKQYDINEAIALLKELATAKFVESVDVAVNLGIDARKSDQNVRGATVLPHGTGRSVRVAVFTQGANAEAAKAAGAELVGMEDLADQIKKGEMNFDVVIASPDAMRVVGQLGQVLGPRGLMPNPKVGTVTPNVAEAVKNAKAGQVRYRNDKNGIIHTTIGKVDFDADKLKENLEALLVALKKAKPTQAKGVYIKKVSISTTMGAGVAVDQAGLSASVN

SEQ ID NO: 42996 - protein, 304 aa, Escherichia coli
MSWIERIKSNITPTRKASIPEGVWTKCDSCGQVLYRAELERNLEVCPKCDHHMRMTARNRLHSLLDEGSLVELGSELEPKDVLKFRDSKKYKDRLASAQKETGEKDALVVMKGTLYGMPVVAAAFEFAFMGGSMGSVVGARFVRAVEQALEDNCPLICFSASGGARMQEALMSLMQMAKTSAALAKMQERGLPYISVLTDPTMGGVSASFAMLGDLNIAEPKALIGFAGPRVIEQTVREKLPPGFQRSEFLIEKGAIDMIVRRPEMRLKLASILAKLMNLPAPNPEAPREGVVVPPVPDQEPEA

SEQ ID NO: 42997 - protein, 317 aa, Escherichia coli
MNPLLTDSRRQALRSASHWYAVLSGERVSPQQEARWQQWYEQDQDNQWAWQQVENLRNQLGGVPGDVASRALHDTRLTRRHVMKGLLLLLGAGGGWQLWQSETGEGLRADYRTAKGTVSRQQLEDGSLLTLNTQSAADVRFDAHQRTVRLWYGEIAITTAKDALQRPFRVLTRQGQLTALGTEFTVRQQDNFTQLDVQQHAVEVLLASAPAQKRIVNAGESLQFSASEFGAVKPLDDESTSWTKDILSFSDKPLGEVIATLTRYRNGVLRCDPAVAGLRLSGTFPLKNTDAILNVIAQTLPVKIQSITRYWINISPL

SEQ ID NO: 42998 - protein, 165 aa, Escherichia coli
MNQIFMVIFLVLSGFIVGNVWSDRGWQKKWAERDAAALSQEVNAQFAARIIEQGRTIARDEAVKDAQQKSAEISARAAYLSDSVNQLRAEAKKYAIRLDAAKHTADLAAAVRGKTTKTAEGMLTNMLGDIAAEAQLYAEIADERYIAGVTCQQIYESLRDKKHQM

SEQ ID NO: 42999 - protein, 151 aa, Escherichia coli
MGQRNVSLMEKKMKKGTVLNSDISSVISRLGHTDTLVVCDAGLPIPKSTTRIDMALTQGVPSFMQVLGVVTNEMQVEAAIIAEEIKHHNPQLHETLLTHLEQLQKHQGNTIEIRYTTHEQFKQQTAESQAVIRSGECSPYANIILCAGVTF

SEQ ID NO: 43000 - protein, 91 aa, Escherichia coli
MASVSISCPSCSATDGVVRNGKSTAGHQRYLCSHCRKTWQLQFTYTASQPGTHQKIIDMAMNGVGCRATARIMGVGLNTIFRHLKNSGRSR

SEQ ID NO: 43001 - protein, 91 aa, Escherichia coli
MASVSISCPSCSATDGVVRNGKSTAGHQRYLCSHCRKTWQLQFTYTASQPGTHQKIIDMAMNGVGCRATARIMGVGLNTILRHLKNSGRSR

SEQ ID NO: 43002 - protein, 91 aa, Escherichia coli
MASISIRCPSCSATEGVVRNGKSTAGHQRYLCSPCRKTWQLQFTYTASQPGKHQKIIDMAMNGVGCRASARIMGVGLNTVLRHLKNSGRSR

SEQ ID NO: 43003 - protein, 138 aa, Escherichia coli
MMTKTQINKLIKMMNDLDYPFEAPLKESFIESIIQIEFNSNSTNCLEKLCNEVSILFKNQPDYLTFLRAMDGFEVNGLRLFSLSIPEPSVKNLFAVNEFYRNNDDFINPDLQERLVIGDYSISIFTYDIKGDAANLLI

SEQ ID NO: 43004 - protein, 250 aa, Escherichia coli
MSDLLCSAKLGAMTLALLLSATSLSALASVTPDRTRLIFNESDKSISVTLRNNDPKLPYLAQSWIEDEKGNKITSPLTVLPPVQRIDSMMNGQVKVQGMPDINKLPADRESMFYFNVREIPPKSNKPNTLQIALQTRIKLFWRPKALEKVSMKSPWQHKVTLTRSGQAFTVNNPTPYYVIISNASAQKNGNPAAGFSPLVIEPKTTVPLNVKMDSVPVLTYVNDFGARMPLFFQCNGNSCQVDEEQSRKG

SEQ ID NO: 43005 - protein, 298 aa, Escherichia coli
MPWGDNSTVSYNGNYGSGTDSSQVGYFSRVDDATHYQLNIGTSDKHTSVDGYYSHDGSLAQVDLSANYHEGQYTSAGLSLQGGATLTTHGGALHRTQNMGGTRLLIDADGVADVPVEGNGAAVYTNMFGKAVVSDVNNYYRNQAYIDLNKLPENAEATQSVVQATLTEGAIGYRKFAVISGQKAMAVLRLQDGSHPPFGAEVKNDNEQTVGLVDDDGSVYLAGVKPGEHMSVFWSGVAHCDINLPDPLPADLFNGLLLPCQHKGNVAPVVPDDIKPVIQEQTQQVTPTDPPVSVSANQ

SEQ ID NO: 43006 - protein, 566 aa, Escherichia coli
MHPTGPHLGPDVLFRESNMKVTLTFNEQRRAAYRQQGLWGDASLADYWQQTARAMPDKIAVVDNHGASYTYSALDHAASCLANWMLAKGIESGDRIAFQLPGWCEFTVIYLACLKIGAVSVPLLPSWREAELVWVLNKCQAKMFFAPTLFKQTRPVDLILPLQNQLPQLQQIVGVDKLAPATSSLSLSQIIADNTSLTTAITTHGDELAAVLFTSGTEGLPKGVMLTHNNILASERAYCARLNLTWQDVFMMPAPLGHATGFLHGVTAPFLIGARSVLLDIFTPDACLALLEQQRCTCMLGATPFVYDLLNVLEKQPADLSALRFFLCGGTTIPKKVARECQQRGIKLLSVYGSTESSPHAVVNLDDPLSRFMHTDGYAAAGVEIKVVDDARKTLPPGCEGEEASRGPNVFMGYFDEPELTARALDEEGWYYSGDLCRMDEAGYIKITGRKKDIIVRGGENISSREVEDILLQHPKIHDACVVAMSDERLGERSCAYVVLKAPHHSLSLEEVVAFFSRKRVAKYKYPEHIVVIEKLPRTTSGKIQKFLLRKDIMRRLTQDVCEEIE

SEQ ID NO: 43007 - protein, 75 aa, Escherichia coli
MQYTPDTAWKITGFSREISPAYRQKLLSLGMLPGSSFNVVRVAPLGDPIHIETRRVSLVLRKKDLALLEVEAVSC

SEQ ID NO: 43008 - protein, 720 aa, Escherichia coli
MDVSYLLDSLNDKQREAVAAPRSNLLVLAGAGSGKTRVLVHRIAWLMSVENCSPYSIMAVTFTNKAAAEMRHRIGQLMGTSQGGMWVGTFHGLAHRLLRAHHMDANLPQDFQILDSEDQLRLLKRLIKAMNLDEKQWPPRQAMWYINSQKDEGLRPHHIQSYGNPVEQTWQKVYQAYQEACDRAGLVDFAELLLRAHELWLNKPHILQHYRERFTNILVDEFQDTNNIQYAWIRLLAGDTGKVMIVGDDDQSIYGWRGAQVENIQRFLNDFPGAETIRLEQNYRSTSNILSAANALIENNNGRLGKKLWTDGADGEPISLYCAFNELDEARFVVNRIKTWQDNGGALAECAILYRSNAQSRVLEEALLQASMPYRIYGGMRFFERQEIKDALSYLRLIANRNDDAAFERVVNTPTRGIGDRTLDVVRQTSRDRQLTLWQACRELLQEKALAGRAASALQRFMELIDALAQETADMPLHVQTDRVIKDSGLRTMYEQEKGEKGQTRIENLEELVTATRQFSYNEEDEDLMPLQAFLSHAALEAGEGQADTWQDAVQLMTLHSAKGLEFPQVFIVGMEEGMFPSQMSLDEGGRLEEERRLAYVGVTRAMQKLTLTYAETRRLYGKEVYHRPSRFIGELPEECVEEVRLRATVSRPVSHQRMGTPMVENDSGYKLGQRVRHAKFGEGTIVNMEGSGEHSRLQVAFQGQGIKWLVAAYARLESV

SEQ ID NO: 43009 - protein, 561 aa, Escherichia coli
MITIPITLRMLIAKYLCLLKPFWLRKNNKTSVLLIIIILAMILGVVKIQVWLNDWNNDFFNALSQKETDKLWQLVLWFPALLGIFVLISVNKTWLIKLLTIRWREWLTDYYLNRWFADKNYYFTQIYGEHKNTDNPDQRIAEDILLLISKTLSLSFGFIQSLSMLITFTVILWESAGTLSFTVGGTEWNIQGYMVYTVVLIVIGGTLFTHKVGKRIRPLNVEKQRSEATFRTNLVQHNKQAELIALSNAESLQRQELSDNFHTIKENWHRLMNRQRWLDYWQNIYSRSLSVLPYFLLLPQFISGQINLGGLMKSRQAFMLVSNNLSWFIYKYDELAELAAVIDRLYEFHQLTEQRPTNKPKNCQHAVQVADASIRTPDNKIILENLNFHVSPGKWLLLKGYSGAGKTTLLKTLSHCWPWFKGDISSPADSWYVSQTPLIKTGLLKEIICKALPLPVDDKSLSEVLHQVGLGKLAARIHDHDRWGDILSSGEKQRIALARLILRRPKWIFLDETTSHLEEQEAIRLLRLVREKLPTSGVIMVTHQPGVWNLADDICDISAVL

SEQ ID NO: 43010 - protein, 329 aa, Escherichia coli [sequence omitted]

SEQ ID NO: 43011 - protein, 88 aa, Escherichia coli
MLEDTTIHNAITDKALASYFRSSGNLLEEESAVLGQAVTNLMLSGDNVNNKNIILSLIHSLETTSDILKADVIRKTLEIVLRYTADDM

SEQ ID NO: 43012 - protein, 335 aa, Escherichia coli
MPLSKTGDLTMSETASWQPSASIPNLLKRAAIMAEIRRFFADRGVLEVETPCMSQATVTDIHLVPFETRFVGPGHSQGMNLWLMTSPEYHMKRLLVAGCGPVFQLCRSFRNEEMGRYHNPEFTMLEWYRPHYDMYRLMNEVDDLLQQVLDCPAAESLSYQQAFLRYLEIDPLSADKTQLREVAAKLDLSNVADTEEDRDTLLQLLFTFGVEPNIGKEKPTFVYHFPASQASLAQISTEDHRVAERFEVYYKGIELANGFHELTDAREQQQRFEQDNRKRAARGLPQHPIDQNLIEALKVGMPDCSGVALGVDRLVMLALGAETLAEVIAFSVDRA

SEQ ID NO: 43013 - protein, 434 aa, Escherichia coli
MKFPGKRKSKHYFPVNARDPLLQQFQPENETSAAWVVGIDQTLVDIEAKVDDEFIERYGLSAGHSLVIEDDVAEALYQELKQKNLITHQFAGGTIGNTMHNYSVLADDRSVLLGVMCSNIEIGSYAYRYLCNTSSRTDLNYLQGVDGPIGRCFTLIGESGERTFAISPGHMNQLRAESIPEDVIAGASALVLTSYLVRCKPGEPMPEATMKAIEYAKKYNVPVVLTLGTKFVIAENPQWWQQFLKDHVSILAMNEDEAEALTGESDPLLASDKALDWVDLVLCTAGPIGLYMAGFTEDEAKRKTQHPLLPGAIAEFNQYEFSRAMRHKDCQNPLRVYSHIAPYMGGPEKIMNTNGAGDGALAALLHDITANSYHRSNVPNSSKHKFTWLTYSSLAQVCKYANRVSYQVLNQHSPRLTRGLPEREDSLEESYWDR

SEQ ID NO: 43014 - protein, 406 aa, Escherichia coli
MTPGGQAQIGNVDLVKQLNSAAVYRLIDQYGPISRIQIAEQSQLAPASVTKITRQLIERGLIKEVDQQASTGGRRAISIVTETRNFHAIGVRLGRHDATITLFDLSSKVLAEEHYPLPERTQQTLEHALLNAIAQFIDSYQRKLRELIAISVILPGLVDPDSGKIHYMPHIQVENWGLVEALEERFKVTCFVGHDIRSLALAEHYFGASQDCEDSILVRVHRGTGAGIISNGRIFIGRNGNVGEIGHIQVEPLGERCHCGNFGCLETIAANAAIEQRVLNLLKQGYQSRVPLDDCTIKTICKAANKGDSLASEVIEYVGRHLGKTIAIAINLFNPQKIVIAGEITEADKVLLPAIESCINTQALKAFRTNLPVVRSELDHRSAIGAFALVKRAMLNGILLQHLLEN

SEQ ID NO: 43015 - protein, 1120 aa, Escherichia coli
MTMFQYYKRSRHFVFSAFIAFVFVLLCQNTAFARASSNGDLPTKADLQAQLDSLNKQKDLSAQDKLVQQDLTDTLATLDKIDRIKEETVQLRQKVAEAPEKMRQATAALTALSDVDNDEETRKILSTLSLRQLETRVAQALDDLQNAQNDLASYNSQLVSLQTQPERVQNAMYNASQQLQQIRSRLDGTDVGETALRPSQKVLMQAQQALLNAEIDQQRKSLEGNTVLQDTLQKQRDYVTANSARLEHQLQLLQEAVNSKRLTLTEKTAQEAVSPDEAARIQANPLVKQELEINQQLSQRLITATENGNQLMQQNIKVKNWLERALQSERNIKEQIAVLKGSLLLSRILYQQQQTLPSADELENMTNRIADLRLEQFEVNQQRDALFQSDAFVNKLEEGHTNEVNSEVHDALLQVVDMRRELLDQLNKQLGNQLMMAINLQINQQQLMSVSKNLKSILTQQIFWVNSNRPMDWDWIKAFPQSLKDEFKSMKITVNWQKAWPAVFIAFLAGLPLLLIAGLIHWRLGWLKAYQQKLASAVGSLRNDSQLNTPKAILIDLIRALPVCLIILAVGLILLTMQLNISELLWSFSKKLAIFWLVFGLCWKVLEKNGVAVRHFGMPEQQTSHWRRQIVRISLALLPIHFWSVVAELSPLHLMDDVLGQAMIFFNLLLIAFLVWPMCRESWRDKESHTMRLVTITVLSIIPIALMVLTATGYFYTTLRLAGRWIETVYLVIIWNLLYQTVLRGLSVAARRIAWRRALARRQNLVKEGAEGAEPPEEPTIALEQVNQQTLRITMLLMFALFGVMFWAIWSDLITVFSYLDSITLWHYNGTEAGAAVVKNVTMGSLLFAIIASMVAWALIRNLPGLLEVLVLSRLNMRQGASYAITTILNYIIIAVGAMTVFGSLGVSWDKLQWLAAALSVGLGFGLQEIFGNFVSGLIILFERPVRIGDTVTIGSFSGTVSKIRIRATTITDFDRKEVIIPNKAFVTERLINWSLTDTTTRLVIRLGVAYGSDLEKVRKVLLKAATEHPRVMHEPMPEVFFTAFGASTLDHELRLYVRELRDRSRTVDELNRTIDQLCRENDINIAFNQLEVHLHNEKGDEVTEVKRDYKGDDPTPAVG

SEQ ID NO: 43016 - protein, 331 aa, Escherichia coli
MQPKIYWIDNLRGIACLMVVMIHTTTWYVTNAHSVSPVTWDIANVLNSASRVSVPLFFMISGYLFFGERSAQPRHFLRIGLCLIFYSAIALLYIALFTSINMELALKNLLQKPVFYHLWFFFAIAVIYLVSPLIQVKNVGGKMLLVLMAVIGIIANPNTVPQKIDGFEWLPINLYINGDTFYYILYGMLGRAIGMMDTQHKALSWVSAALFATGVFIISRGTLYELQWRGNFADTWYLYCGPMVFICAIALLTLVKNTLDTRTIRGLGLISRHSLGIYGFHALIIHALRTRGIELKNWPILDIIWIFCATLAASLLLSMLVQRIDRNRLVS

SEQ ID NO: 43017 - protein, 277 aa, Escherichia coli
MLAMPSAISVAVLPDSPHAREMATKAHNSGHEVLIHLPMAPLSKQPLEKNTLRPEMSSDEIERIIRSAVNNVPYAVGINNHMGSKMTSNLFGMQKVMQALERYNLYFLDSVTIGNTQAMRAAQGTGVKVIKRKVFLDDSQNEADIRVQFNRAIDLARRNGSTIAIGHPHPATVRVLQQMVYNLPPDITLVKASSLLNEPQVDTSTPPKNAVPDAPRNPFRGVKLCKPKKPIEPVYANRFFEVLSESISQSTLIVYFQHQWQGWGKQPEAAKFNASAN

SEQ ID NO: 43018 - protein, 317 aa, Escherichia coli
MRAKLLGIVLTTPIAISSFASTETLSFTPDNINADISLGTLSGKTKERVYLAEEGGRKVSQLDWKFNNAAIIKGAINWDLMPQISIGAAGWTTLGSRGGNMVDQDWMDSSNPGTWTDESRHPDTQLNYANEFDLNIKGWLLNEPNYRLGLMAGYQESRYSFTARGGSYIYSSEEGFRDDIGSFPNGERAIGYKQRFKMPYIGLTGSYRYEDFELGGTFKYSGWVESSDNDEHYDPGKRITYRSKVKDQNYYSVAVNAGYYVTPNAKVYVEGAWNRVTNKKGNTSLYDHNNNTSDYSKNGAGIENYNFITTAGLKYTF

SEQ ID NO: 43019 - protein, 233 aa, Escherichia coli
MTTLSCKVTSVEAITDTVYRVRIVPDAAFSFRAGQYLMVVMDERDKRPFSMASTPDEKGFIELHIGASEINLYAKAVMDRILKDHQIVVDIPHGEAWLRDDEERPMILIAGGTGFSYARSILLTALARNPNRDITIYWGGREEQHLYDLCELEALSLKHPGLQVVPVVEQPEAGWRGRTGTVLTAVLQDHGTLAEHDIYIAGRFEMAKIARDLFCSERNAREDRLFGDAFAFI

SEQ ID NO: 43020 - protein, 206 aa, Escherichia coli
MARYLGPKLKLSRREGTDLFLKSGVRAIDTKCKIEQAPGQHGARKPRLSDYGVQLREKQKVRRIYGVLERQFRNYYKEAARLKGNTGENLLALLEGRLDNVVYRMGFGATRAEARQLVSHKAIMVNGRVVNIASYQVSPNDVVSIREKAKKQSRVKAALELAEQREKPTWLEVDAGKMEGTFKRKPERSDLSADINEHLIVELYSK

SEQ ID NO: 43021 - protein, 136 aa, Escherichia coli
MSQLVYFSSSSENTQRFIERLGLPAVRIPLNERERIQVDEPYILIVPSYGGGGTAGAVPRQVIRFLNDEHNRALLRGVIASGNRNFGEAYGRAGDVIARKCGVPWLYRFELMGTQSDIENVRKGVTEFWQRQPQNA

SEQ ID NO: 43022 - protein, 178 aa, Escherichia coli
MASRGVNKVILVGNLGQDPEVRYMPNGGAVANITLATSESWRDKATGEMKEQTEWHRVVLFGKLAEVASEYLRKGSQVYIEGQLRTRKWTDQSGQDRYTTEVVVNVGGTMQMLGGRQGGGAPAGGNIGGGQPQGGWGQPQQPQGGNQFSGGAQSRPQQSAPAAPSNEPPMDFDDDIPF

SEQ ID NO: 43023 - protein, 420 aa, Escherichia coli
MIKATDRKLVVGLEIGTAKVAALVGEVLPDGMVNIIGVGSCPSRGMDKGGVNDLESVVKCVQRAIDQAELMADCQISSVYLALSGKHISCQNEIGMVPISEEEVTQEDVENVVHTAKSVRVRDEHRVLHVIPQEYAIDYQEGIKNPVGLSGVRMQAKVHLITCHNDMAKNIVKAVERCGLKVDQLIFAGLASSYSVLTEDERELGVCVVDIGGGTMDIAVYTGGALRHTKVIPYAGNVVTSDIAYAFGTPPSDAEAIKVRHGCALGSIVGKDESVEVPSVGGRPPRSLQRQTLAEVIEPRYTELLNLVNEEILQLQEKLRQQGVKHHLAAGIVLTGGAAQIEGLAACAQRVFHTQVRIGAPLNITGLTDYAQEPYYSTAVGLLHYGKESHLNGEAEVEKRVTASVGSWIKRLNSWLRKEF

SEQ ID NO: 43024 - protein, 858 aa, Escherichia coli
MKLNGKFPVKFVKYFLILAVCCILLGAGSIYGLYRYIEPQLPDVATLKDVRLQIPMQIYSADGELIAQYGEKRRIPVTLDQIPPEMVKAFIATEDSRFYEHHGVDPVGIFRAASVALFSGHASQGASTITQQLARNFFLSPERTLMRKIKEVFLAIRIEQLLTKDEILELYLNKIYLGYRAYGVGAAAQVYFGKTVDQLTLNEMAVIAGLPKAPSTFNPLYSMDRAVARRNVVLSRMLDEGYITQQQFDQTRTEAINANYHAPEIAFSAPYLSEMVRQEMYNRYGESAYEDGYRIYTTITRKVQQAAQQAVRNNVLDYDMRHGYRGPANVLWKVGESAWDNNKITDTLKALPTYGPLLPAAVTSANPQQATAMLADGSTVALSMEGVRWARPYRSDTQQGPTPRKVTDVLQTGQQIWVRQVGDAWWLAQVPEVNSALVSINPQNGAVMALVGGFDFNQSKFNRATQALRQVGSNIKPFLYTAAMDKGLTLASMLNDVPISRWDASAGSDWQPKNSPPQYAGPIRLRQGLGQSKNVVMVRAMRAMGVDYAAEYLQRFGFPAQNIVHTESLALGSASFTPMQVARGYAVMANGGFLVDPWFISKIENDQGGVIFEAKPKVACPECDIPVIYGDTQKSNVLENNDVEDVAISREQQNVSVPMPQLEQANQALVAKTGAQEYAPHVINTPLAFLIKSALNTNIFGEPGWQGTGWRAGRDLQRRDIGGKTGTTNSSKDAWFSGYGPGVVTSVWIGFDDHRRNLGHTTASGAIKDQISGYEGGAKSAQPAWDAYMKAVLEGVPEQPLTPPPGIVTVNIDRSTGQLANGGNSREEYFIEGTQPTQQAVHEVGTTIIDNGEAQELF

SEQ ID NO: 43025 - protein, 161 aa, Escherichia coli
MRKLTALFVASTLALGAANLAHAADTTTAAPADAKPMMHHKGKFGPHQDMMFKDLNLTDAQKQQIREIMKGQRDQMKRPPLEERRAMHDIIASDTFDKVKAEAQIAKMEEQRKANMLAHMETQNKIYNILTPEQKKQFNANFEKRLTERPAAKGKMPATAE

SEQ ID NO: 43026 - protein, 450 aa, Escherichia coli
MLKSPLFWKMTSLFGAVLLLLIPIMLIRQVIVERADYRSDVEDAIRQSTSGPQKLVGPLIAIPVTELYTVQEEDKTVERKRSFIHFWLPESLMVDGNQNVEERKIGIYTGQVWHSDLTLKADFDVSRLSELNAPNITLGKPFIVISVGDARGIGVVKAPEVNGTALTIEPGTGLEQGGQGVHIPLPEGDWRKQNLKLNMALNLSGTGDLSVVPGGRNSEMTLTSNWPHPSFLGDFLPAKREVSESGFQAHWQSSWFANNLGERFASGNDTGWENFPAFSVAVTTPADQYQLTDRATKYAILLIALTFMAFFVFETLTAQRLHPMQYLLVGLSLVMFYLLLLALSEHTGFTVAWIIASLIGAIMNGIYLQAVLKGWCNSMLFTLALLLLDGVMWGLLNSADSALLLGTSVLVVALAGMMFVTRNIDWYAFSLPKMKASKEVTTDDELRIWK

SEQ ID NO: 43027 - protein, 890 aa, Escherichia coli
MTDVTIKTLAAERQTSVERLVQQFADAGIRKSADDSVSAQEKQTLIDHLNQKNSGPDKLTLQRKTRSTLNIPGTGGKSKSVQIEVRKKRTFVKRDPQEAERLAAEEQAQREAEEQARREAEESAKREAQQKAEREAAEQAKREAAEQAKREAAEKDKVSNQQDDMTKNAQAEKARREQEAAELKRKAEEEARRKLEEEARRVAEEARRMAEENKWTDNAEPTEDSSDYHVTTSQHARQAEDESDREVEGGRGRGRNAKAARPKKGNKHAESKADREEARAAVRGGKGGKRKGSSLQQGFQKPAQAVNRDVVIGETITVGELANKMAVKGSQVIKAMMKLGAMATINQVIDQETAQLVAEEMGHKVILRRENELEEAVMSDRDTGAAAEPRAPVVTIMGHVDHGKTSLLDYIRSTKVASGEAGGITQHIGAYHVETENGMITFLDTPGHAAFTSMRARGAQATDIVVLVVAADDGVMPQTIEAIQHAKAAQVPVVVAVNKIDKPEADPDRVKNELSQYGILPEEWGGESQFVHVSAKAGTGIDELLDAILLQAEVLELKAVRKGMASGAVIESFLDKGRGPVATVLVREGTLHKGDIVLCGFEYGRVRAMRNELGQEVLEAGPSIPVEILGLSGVPAAGDEVTVVRDEKKAREVALYRQGKFREVKLARQQKSKLENMFANMTEGEVHEVNIVLKADVQGSVEAISDSLLKLSTDEVKVKIIGSGVGGITETDATLAAASNAILVGFNVRADASARKVIEAESLDLRYYSVIYNLIDEVKAAMSGMLSPELKQQIIGLAEVRDVFKSPKFGAIAGCMVTEGVVKRHNPIRVLRDNVVIYEGELESLRRFKDDVNEVRNGMECGIGVKNYNDVRTGDVIEVFEIIEIQRTIA

SEQ ID NO: 43028 - protein, 292 aa, Escherichia coli
MPERVLNFRALFLHGLYKMDKPKAYCRLFLPSFLLLSACTVDISQPDPSATAVDAEAKTWAVKFQHQSSFTEQSIKEITAPDLKPGDLLFSSSLGVTSFGIRVFSTSSVSHVAIFLGDNNVAEATGAGVQIVSLKKAMKHSDKLFVLRVPDLTPQQATDITAFANKIKDSGYNYRGIVEFIPFMVTRQMCSLNPFSEDFRQQCVSGLAKAQLSSVGEGDKKSWFCSEFVTDAFAKAGHPLTLAQSGWISPADLMHMRIGDVSAFKPETQLQYVGHLKPGIYIKAGRFVGLTR

SEQ ID NO: 43029 - protein, 572 aa, Escherichia coli
MRTSQYLLSTLKETPADAEVISHQLMLRAGMIRKLASGLYTWLPTGVRVLKKVENIVREEMNNAGAIEVSMPVVQPADLWQESGRWEQYGPELLRFVDRGERPFVLGPTHEEVITDLIRNELSSYKQLPLNFYQIQTKFRDEVRPRFGVMRSREFLMKDAYSFHTSQESLQETYDAMYAAYSKIFSRMGLDFRAVQADTGSIGGSASHEFQVLAQSGEDDVVFSDTSDYAANIELAEAIAPKEPRAAATQEMTLVDTPNAKTIAELVEQFNLPIEKTVKTLLVKAVEGSSFPQVALLVRGDHELNEVKAEKLPQVASPLTFATEEEIRAVVKAGPGSLGPVNMPIPVVIDRTVAAMSDFAAGANIDGKHYFGINWDRDVATPEVADIRNVVAGDPSPDGQGRLLIKRGIEVGHIFQLGTKYSEALKASVQGEDGRNQILTMGCYGIGVTRVVAAAIEQNYDERGIVWPDAIAPFQVAILPMNMHKSFRVQELAEKLYSELRAQGIEVLLDDRKERPGVMFADMELIGIPHTIVLGDRNLDNDDIEYKYRRNGEKQLIKTGDIVEYLVKQIKG

SEQ ID NO: 43030 - protein, 463 aa, Escherichia coli
MSHSSAPERATGAVITDWRPEDPAFWQQRGQRIASRNLWISVPCLLLAFCVWMLFSAVAVNLPKVGFNFTTDQLFMLTALPSVSGALLRVPYSFMVPIFGGRRWTAFSTGILIIPCVWLGFAVQDTSTPYSVFIIISLLCGFAGANFASSMANISFFFPKQKQGGALGLNGGLGNMGVSVMQLVAPLVVSLSIFAVFGSQGVKQPDGTELYLANASWIWVPFLAIFTIAAWFGMNDLATSKASIKEQLPVLKRGHLWIMSLLYLATFGSFIGFSAGFAMLSKTQFPDVQILQYAFFGPFIGALARSAGGALSDRLGGTRVTLVNFILMAIFSGLLFLTLPTDGQGGSFMAFFAVFLALFLTAGLGSGSTFQMISVIFRKLTMDRVKAEGGSDERAMREAATDTAAALGFISAIGAIGGFFIPKAFGSSLALTGSPVGAMKVFLIFYIACVVITWAVYGRHSKK

SEQ ID NO: 43031 - protein, 241 aa, Escherichia coli
MATNAKPVYKRILLKLSGEALQGTEGFGIDASILDRMAQEIKELVELGIQVGVVIGGGNLFRGAGLAKAGMNRVVGDHMGMLATVMNGLAMRDALHRAYVNARLMSAIPLNGVCDSYSWAEAISLLRNNRVVILSAGTGNPFFTTDSAACLRGIEIEADVVLKATKVDGVFTADPAKDPTATMYEQLTYSEVLEKELKVMDLAAFTLARDHKLPIRVFNMNKPGALRRVVMGEKEGTLITE

SEQ ID NO: 43032 - protein, 310 aa, Escherichia coli
MRNGMMNNKVSFTNSNNPTISLSAVIYFPPKFDETRQYQAIVLSHPGGGVKEQTAGTYAKKLAEKGFVTIAYDASYQGESGGEPRQLENPYIRTEDISAVIDYLTTLSYVDNTRIGAMGICAGAGYTANAAIQDRRIKAIGTVSAVNIGSIFRNGWENNVKSIDALPYVEAGSNARTSDISSGEYAIMPLAPMKESDAPNEELRQAWEYYHTPRAQYPTAPGYATLRSLNQIITYDAYHMAEVYLTQPTQIVAGSQAGSKWMSDDLYDRASSQDKRYHIVEGANHMDLYDGKAYVAEAISVLAPFFEETL

SEQ ID NO: 43033 - protein, 361 aa, Escherichia coli
MESGHRFDAQTLHSFIQAVFRQMGSEEQEAKLVADHLIAANLAGHDSHGIGMIPSYVRSWSQGHLQINHHAKTVKEAGAAVTLDGDRAFGQVAAHEAMALGIEKAHQHGIAAVALHNSHHIGRIGYWAEQCAAAGFVSIHFVSVVGIPMVAPFHGRDSRFGTNPFCVVFPRKDNFPLLLDYATSAIAFGKTRVAWHKGVPVPPGCLIDVNGVPTTNPAVMQESPLGSLLTFAEHKGYALAAMCEILGGALSGGKTTHQETLQTSPDAILNCMTTIIINPELFGAPDCNAQTEAFAEWVKASPHDDDKPILLPGEWEVNTRRERQKQGIPLDAGSWQAICDAARQIGMPEETLQAFCQQLAS

SEQ ID NO: 43034 - protein, 1247 aa, Escherichia coli
MSKFLDRFRYFKQKGETFADGHGQLLNTNRDWEDGYRQRWQHDKIVRSTHGVNCTGSCSWKIYVKNGLVTWETQQTDYPRTRPDLPNHEPRGCPRGASYSWYLYSANRLKYPMMRKRLMKMWREAKALHSDPVEAWASIIEDADKAKSFKQARGRGGFVRSSWQEVNELIAASNVYTIKNYGPDRVAGFSPIPAMSMVSYASGARYLSLIGGTCLSFYDWYCDLPPASPQTWGEQTDVPESADWYNSSYIIAWGSNVPQTRTPDAHFFTEVRYKGTKTVAVTPDYAEIAKLCDLWLAPKQGTDAAMALAMGHVMLREFHLDNPSQYFTDYVRRYTDMPMLVMLEERDGYYAAGRMLRAADLVDALGQENNPEWKTVAFNTNGEMVAPNGSIGFRWGEKGKWNLEQRDGKTGEETELQLSLLGSQDEIAEVGFPYFGGDGTEHFNKVELENVLLHKLPVKRLQLADGSTALVTTVYDLTLANYGLERGLNDVNCATSYDDVKAYTPAWAEQITGVSRSQIIRIAREFADNADKTHGRSMIIVGAGLNHWYHLDMNYRGLINMLIFCGCVGQSGGGWAHYVGQEKLRPQTGWQPLAFALDWQRPARHMNSTSYFYNHSSQWRYETVTAEELLSPMADKSRYTGHLIDFNVRAERMGWLPSAPQLGTNPLTIAGEAEKAGMNPVDYTVKSLKEGSIRFAAEQPENGKNHPRNLFIWRSNLLGSSGKGHEFMLKYLLGTEHGIQGKDLGQQGGVKPEEVDWQDNGLEGKLDLVVTLDFRLSSTCLYSDIILPTATWYEKDDMNTSDMHPFIHPLSAAVDPAWEAKSDWEIYKAIAKKFSEVCVGHLGKETDIVTLPIQHDSAAELAQPLDVKDWKKGECDLIPGKTAPHIMVVERDYPATYERFTSIGPLMEKIGNGGKGIAWNTQSEMDLLRKLNYTKAEGPAKGQPMLNTAIDAAEMILTLAPETNGQVAVKAWAALSEFTGRDHTHLALNKEDEKIRFRDIQAQPRKIISSPTWSGLEDEHVSYNAGYTNVHELIPWRTLSGRQQLYQDHQWMRDFGESLLVYRPPIDTRSVKEVIGQKSNGNQEKALNFLTPHQKWGIHSTYSDNLLMLTLGRGGPVVWLSEADAKDLGIADNDWIEVFNSNGALTARAVVSQRVPAGMTMMYHAQERIVNLPGSEITQQRGGIHNSVTRITPKPTHMIGGYAHLAYGFNYYGTVGSNRDEFVVVRKMKNIDWLDGEGNDQVQESVK

SEQ ID NO: 43035 - protein, 395 aa, Escherichia coli
MNLSLRRSTSALLASSLLLTIGRGATLPFMTIYLSRQYSLSVDLIGYAMTIALTIGVVFSLGFGILADKFDKKRYMLLAITAFASGFIAITLVNNVTLVVLFFALINCAYSVFATVLKAWFADNLSSTSKTKIFSINYTMLNIGWTIGPPLGTLLVMQSINLPFWLAAICSAFPMLFIQIWVKRSEKIIATETGSVWSPKVLLQDKALLWFTCSGFLASFVSGAFASCISQYVMVIADGDFAEKVVAVVLPVNAAMVVTLQYSVGRRLNPANIRALMTAGTLCFVIGLVGFIFSGNSLLLWGMSAAVFTVGEIIYAPGEYMLIDHIAPPEMKASYFSAQSLGWLGAAINPLVSGVVLTSLPPSSLFVILALVIIAAWVLMLKGIRARPWGQPALC

SEQ ID NO: 43036 - protein, 255 aa, Escherichia coli [sequence omitted]

SEQ ID NO: 43037 - protein, 318 aa, Escherichia coli
MKIALVIFITLALAGCALLSLHMGVIPVPWRALLTDWQAGHEHYYVLMEYRLPRLLLALFVGAALAVAGVLIQGIVRNPLASPDILGVNHAASLASVGALLLMPSLPVMVLPLLAFAGGMAGLILLKMLAKTHQPMKLALTGVALSACWASLTDYLMLSRPQDVNNALLWLTGSLWGRDWSFVKIAIPLMILFLPLSLSFCRDLDLLALGDARATTLGVSVPHTRFWALLLAVAMTSTGVAACGPISFIGLVVPHMMRSITGGRHRRLLPVSALTGALLLVVADLLARIIHPPLELPVGVLTAIIGAPWFVWLLVRMR

SEQ ID NO: 43038 - protein, 214 aa, Escherichia coli
MMQPSIKPADEHSAGDIIARIGSLTRMLRDSLRELGLDQAIAEAAEAIPDARDRLYYVVQMTAQAAERALNSVEASQPHQDQMEKSAKALTQRWDDWFADPIDLADARELVTDTRQFLADVPAHTSFTNAQLLEIMMAQDFQDLTGQVIKRMMDVIQEIERQLLMVLLENIPEQESRPKRENQSLLNGPQVDTSKAGVVASQDQVDDLLDSLGF

SEQ ID NO: 43039 - protein, 129 aa, Escherichia coli
MADKELKFLVVDDFSTMRRIVRNLLKELGFNNVEEAEDGVDALNKLQAGGYGFVISDWNMPNMDGLELLKTIRADGAMSALPVLMVTAEAKKENIIAAAQAGASGYVVKPFTAATLEEKLNKIFEKLGM

SEQ ID NO: 43040 - protein, 890 aa, Escherichia coli
MRQKETTATTRFSLLPGSITRFFLLLIIVLLVTMGVMVQSAVNAWLKDKSYQIVDITHAIQKRVDNWRYVTWQIYDNIAATTSPSSGEGLQETRLKQDVYYLEKPRRKTEALIFGSHDNSTLEMTQRMSTYLDTLWGAENVPWSMYYLNGQDNSLVLISTLPLKDLTSGFKESTVSDIVDSRRAEMLQQANALDERESFSNMRRLAWQNGHYFTLRTTFNQPGHLATVVAFDLPINDLIPPGMPLDSFRLEPDATATGNNDNEKEGTDSVSIHFNSTKIEISSALNSTDMRLVWQVPYGTLLLDTLQNILLPLLLNIGLLALALFGYTTFRHFSSRSTENVPSTAVNNELRILRAINEEIVSLLPLGLLVHDQESNRTVISNKIADHLLPHLNLQNITTMAEQHQGIIQATINNELYEIRMFRSQVAPRTQIFIIRDQDREVLVNKKLKQAQRLYEKNQQGRMIFMKNIGDALKEPAQSLAESAAKLNAPESKQLANQADVLVRLVDEIQLANMLADDSWKSETVLFSVQDLIDEVVPSVLPAIKRKGLQLLINNHLKAHDMRRGDRDALRRILLLLMQYAVTSTQLGKITLEVDQDESSEDRLTFRILDTGEGVSIHEMDNLHFPFINQTQNDRYGKADPLAFWLSDQLARKLGGHLNIKTRDGLGTRYSVHIKMLAADPEVEEEEERLLDDVCVMVDVTSAEIRNIVTRQLENWGATCITPDERLISQDYDIFLTDNPSNLTASGLLLSDDESGVREIGPGQLCVNFNMSNAMQEAVLQLIEVQLAQEEVTESPLGGDENAQLHASGYYALFVDTVPDDVKRLYTEAATSDFAALAQTAHRLKGVFAMLNLVPGKQLCETLEHLIREKDVPGIEKYISDIDSYVKSLL

SEQ ID NO: 43041 - protein, 642 aa, Escherichia coli
MRDMSGAFNNDGRGISPLIATSWERCNKLMKRETWNVPHQAQGVTFASIYRRKKAMLTLGQAALEDAWEYMAPRECALFILDETACILSRNGDPQTLQQLSALGFNDGTYCAEGIIGTCALSLAAISGQAVKTMADQHFKQVLWNWAFCATPLFDSKGRLTGTIALACPVEQTTAADLPLTLAIAREVGNLLLTDSLLAETNRHLNQLNALLESMDDGVISWDEQGNLQFINAQAARVLRLDATASQGRAITELLTLPAVLQQAIKQAHPLKHVEATFESQHQFIDAVITLKPIIETQGTSFILLLHPVEQMRQLMTSQLGKVSHTFAHMPQDDPQTRRLIHFGRQAARSSFPVLLCGEEGVGKALLSQAIHNESERAAGPYIAVNCELYGDAALAEEFIGGDRTDNENGRLSRLELAHGGTLFLEKIEYLAVELQSALLQVIKQGVITRLDARRLIPIDVKVIATTTADLAMLVEQNRFSRQLYYALHAFEITIPPLRMRRGSIPALVNNKLRSLEKRFSTRLKIDDDALARLVSCAWPGNDFELYSVIENLALSSDNGRIRVSDLPEHLFTEQATDDVSATRLSTSLSFAEVEKEAIINAAQVTGGRIQEMSALLGIGRTTLWRKMKQHGIDAGQFKRRV

SEQ ID NO: 43042 - protein, 391 aa, Escherichia coli
MTNQPTEIAIVGGGMVGGALALGLAQHGFAVTVIEHAEPAPFVADSQPDVRISAISAASVSLLKGLGVWDAVQAMRCHPYRRLETWEWETAHVVFDAAELKLPLLGYMVENTVLQQALWQALEAHPKVTLRVPGSLIALHRHDDLQELELKGGEVIRAKLVIGADGANSQVRQMAGIGVHAWQYAQSCMLISVQCENDPGDSTWQQFTPDGPRAFLPLFDNWASLVWYDSPARIRQLQNMNMAQLQAEIAKHFPSRLGYVTPLAAGAFPLTRRHALQYVQPGLALVGDAAHTIHPLAGQGVNLGYRDVDALIDVLVNARSYGEAWASYPVLKRYQMRRMADNFIMQSGMDLFYAGFSNNLPPLRFMRNLGLMAAERAGVLKRQALKYALGL

SEQ ID NO: 43043 - protein, 752 aa, Escherichia coli
MRVDAIAKVTGRARYTDDYVMAGMCYAKYVRSPIAHGYAVSINDEQARSLPGVLAIFTWEDVPDIPFATAGHAWTLDENKRDTADRALLTRHVRHHGDAVAIVVARDELTAEKAAQLVSIEWQELPVITTPEAALAEDAAPIHNGGNLLKQSTMSTGNVQQTIDAADYQVQGHYQTPVIQHCHMESVTSLAWMEDDSRITIVSSTQIPHIVRRVVGQALDIPWSCVRVIKPFVGGGFGNKQDVLEEPMAAFLTSKLGGIPVKVSLSREECFLATRTRHAFTIDGQMGVNRDGTLKGYSLDVLSNTGAYASHGHSIASAGGNKVAYLYPRCAYAYSSKTCYTNLPSAGAMRGYGAPQVVFAVESMLDDAATALGIDPVEIRLRNAAREGDANPLTGKRIYSAGLPECLEKGRKIFEWEKRRAECQNQQGNLRRGVGVACFSYTSNTWPVGVEIAGARLLMNQDGTINVQSGATEIGQGADTVFSQMVAETVGVPVSDVRVISTQDTDVTPFDPGAFASRQSYVAAPALRSAALLLKEKIIAHAAVMLHQSAMNLTLIKGHIVLVERPEEPLMSLKDLAMDAFYHPERGGQLSAESSIKTTTNPPAFGCTFVDLTVDIALCKVTINRILNVHDSGHILNPLLAEGQVHGGMGMGIGWALFEEMIIDAKSGVVRNPNLLDYKMPTMPDLPQLESAFVEINEPQSAYGHKSLGEPPIIPVAAAIRNAVKMATGVAINTLPLTPKRLYEEFHLAGLI

SEQ ID NO: 43044 - protein, 838 aa, Escherichia coli
MPQRHHQGHKRTPKQLALIIKRCLPMVLTGSGMLCTTANAEEYYFDPIMLETTKSGMQTTDLSRFSKKYAQLPGTYQVDIWLNKKKVSQKKITFTANAEQLLQPQFTVEQLRELGIKVDEIPALAEKDDDSVINSLEQIIPGTAAEFDFNHQQLNLSIPQIALYRDARGYVSPSRWDDGIPTLFTNYSFTGSDNRYRQGNRSQRQYLNMQNGANFGPWRLRNYSTWTRNDQTSSWNTISSYLQRDIKALKSQLLLGESATSGSIFSSYTFTGVQLASDDNMLPNSQRGFAPTVRGIANSSAIVTIRQNGYVIYQSNVSAGAFEINDLYPSSNSGDLEVTIEESDGTQRRFIQPYSSLPMMQRPGHLKYSATAGRYRADANSDSKEPEFAEATAIYGLNNTFTLYGGLLGSEDYYALGIGIGGTLGALGALSMDINRADTQFDNQHSFHGYQWRTQYIKDIPETNTNIAVSYYRYTNDGYFSFNEANTRNWDYNSRQKSEIQFNISQTIFDGVSLYASGSQQDYWGNNDKNRNISVGVSGQQWGVGYSLNYQYSRYTDQNNDRALSLNLSIPLERWLPRSRVSYQMTSQKDRPTQHEMRLDGSLLDDGRLSYSLEQSLDDDNNHNSSLNASYRSPYGTFSAGYSYGNDSSQYNYGVTGGVVIHPHGVTLSQYLGNAFALIDANGASGVRIQNYPGIATDPFGYAVVPYLTTYQENRLSVDTTQLPDNVDLEQTTQFVVPNRGAMVAARFNANIGYRVLVTVSDRNGKPLPFGALASNDDTGQQSIVDEGGILYLSGISSKSQSWTVRWGNQADQQCQFAFSTPDSEPTTSVLQGTAQCH

SEQ ID NO: 43045 - protein, 538 aa, Escherichia coli
MFRRNLITSAILLMAPLAFSAQSLAESLTVEQRLELLEKALRETQSELKKYKDEEKKKYTPATVNRSVSTNDQGYAANPFPTSSAAKPDAVLVKNEEKNASETGSIYSSMTLKDFSKFVKDEIGFSYNGYYRSGWGTASHGSPKSWAIGSLGRFGNEYSGWFDLQLKQRVYNENGKRVDAVVMMDGNVGQQYSTGWFGDNAGGENYMQFSDMYVTTKGFLPFAPEADFWVGKHGAPKIEIQMLDWKTQRTDAAAGVGLENWKVGPGKIDIALVREDVDDYDRSLQNKQQINTNTIDLRYKDIPLWDKATLMVSGRYVTANESASEKDNQDNNGYYDWKDTWMFGTSLTQKFDKGGFNEFSFLVANNSIASNFGRYAGASPFTTFNGRYYGDHTGGTAVRLTSQGEAYIGDHFIVANAIVYSFGNDIYSYETGAHSDFESIRAVVRPAYIWDQYNQTGVELGYFTQQNKDANSNKFNESGYKTTLFHTFKVNTSMLTSRPEIRFYATYIKALENELDGFTFEDNKDDQFAVGAQAEIWW

SEQ ID NO: 43046 - protein, 308 aa, Escherichia coli
MSLIKVPCMQITNMHCSGQTVSLAAGDYHATIVTVGAGLAELTFQGCHLVIPHKPEEMPLAHLGKVLIPWPNRIANGCYRYQGQEYQLPINEHSSKAAIHGLLAWRDWQISELTATSVTLTAFLPPSYGYPFMLASQVVYSLNAHTGLSVEIASQNIGTVAAPYGVGIHPYLTCNLTSVDEYLFQLPANQVYAVDEHANPTTLHHVDELDLNFTQAKKIAATKIDHTFKTANDLWEMTITHPQQALSVSLCSDQLWVQVYSGEKLQRQGLAVEPMSCPPNAFNSGIDLLLLESGKPHRLFFNIYGQRK

SEQ ID NO: 43047 - protein, 317 aa, Escherichia coli
MTDKLTSLRQYTTVVADTGDIAAMKLYQPQDATTNPSLILNAAQIPEYRKLIDDAVAWAKQQSNDRAQQIVDATDKLAVNIGLEILKLVPGRISTEVDARLSYDTEASIAKAKRLIKLYNDAGISNDRILIKLASTWQGIRAAEQLEKEGINCNLTLLFSFAQARACAEAGVFLISPFVGRILDWYKANTDKKEYAPAEDPGVVSVSEIYQYYKEHGYETVVMGASFRNIGEILELAGCDRLTIAPALLKELAESEGAIERKLSYTGEVKARPARITESEFLWQHNQDPMAVDKLAEGIRKFAIDQEKLEKMIGDLL

SEQ ID NO: 43048 - protein, 195 aa, Escherichia coli
MNTLRIGLVSISDRASSGVYQDKGIPALEEWLTSALTTPFELETRLIPDEQAIIEQTLCELVDEMSCHLVLTTGGTGPARRDVTPDATLAVADREMPGFGEQMRQISLHFVPTAILSRQVGVIRKQALILNLPGQPKSIKETLEGVKDAEGNVVVHGIFASVPYCIQLLEGPYVETAPEVVAAFRPKSARRDVSE

SEQ ID NO: 43049 - protein, 132 aa, Escherichia coli
MQTQIKVRGYHLDVYQHVNNARYLEFLEEARWDGLENSDSFQWMTAHNIAFVVVNININYRRPAVLSDLLTITSQLQQLNGKSGILSQVITLEPEGQVVADALITFVCIDLKTQKALALEGELREKLEQMVK

SEQ ID NO: 43050 - protein, 244 aa, Escherichia coli
MNFEGKIALVTGASRGIGRAIAETLAARGAKVIGTATSENGAQAISDYLGANGKGLMLNVTDPASIESVLEKIRAEFGEVDILVNNAGITRDNLLMRMKDEEWNDIIETNLSSVFRLSKAVMRAMMKKRHGRIITIGSVVGTMGNGGQANYAAAKAGLIGFSKSLAREVASRGITVNVVAPGFIETDMTRALSDDQRAGILAQVPAGRLGGAQEIANAVAFLASDEAAYITGETLHVNGGMYMV

SEQ ID NO: 43051 - protein, 144 aa, Escherichia coli
MTMRNFDLSPLMRQWIGFDKLANALQNAGESQSFPPYNIEKSDDNHYRITLALAGFRQEDLEIQLEGTRLSVKGTPEQPKEEKKWLHQGLMNQPFSLSFTLAENMEVSGATFVNGLLHIDLIRNEPEPIAAQRIAISERPALNS

SEQ ID NO: 43052 - protein, 425 aa, Escherichia coli
MKTTAKLSFMMFVEWFIWGAWFVPLWLWLSKSGFSAGEIGWSYACTAIAAILSPILVGSITDRFFSAQKVLAVLMFAGALLMYFAAQQTTFAGFFPLLLAYSLTYMPTIALTNSIAFANVPDVERDFPRIRVMGTIGWIASGLACGFLPQILGYADISPTNIPLLITAGSSALLGVFAFFLPDTPPKSTGKMDIKVMLGLDALILLRDKNFLVFFFCSFLFAMPLAFYYIFANGYLTEVGMKNATGWMTLGQFSEIFFMLALPFFTKRFGIKKVLLLGLVTAAIRYGFFIYGSADEYFTYALLFLGILLHGVSYDFYYVTAYIYVDKKAPVHMRTAAQGLITLCCQGFGSLLGYRLGGVMMEKMFAYQEPVNGLTFNWSGMWTFGAVMIAIIAVLFMIFFRESDNEITAIKVDDRDIALTQGEVK

SEQ ID NO: 43053 - protein, 338 aa, Escherichia coli
MFVIWSHGTGFIMSHQLTFADSEFSSKRRQTRKEIFLSRMEQILPWQNMVEVIEPFYPKAGNGRRPYPLETMLRIHCMQHWYNLSDGAMEDALYEIASMRLFARLSLDSALPDRTTIMNFRHLLEQHQLARQLFKTINRWLAEAGVMMTQGTLVDATIIEAPSSTKNKEQQRDPEMHQTKKGNQWHFGMKAHIGVDAKSGLTHSLVTTAANEHDLNQLGNLLHGEEQFVSADAGYQGAPQREELAEVDVDWLIAERPGKVRTLKQHPRKNKTAINIEYMKASIRAKVEHPFRIIKRQFGFVKARYKGLLKNDNQLAMLFTLANLFRADQMIRQWERSH

SEQ ID NO: 43054 - protein, 338 aa, Escherichia coli
MFVIWSHRTGFIMSHQLTFADSEFSSKRRQTRKEIFLSRMEQILPWQNMVEVIEPFYPKAGNGRRPYPLETMLRIHCMQHWYNLSDGAMEDALYEIASMRLFARLSLDSALPDRTTIMNFRHLLEQHQLARQLFKTINRWLAEAGVMMTQGTLVDATIIEAPSSTKNKEQQRDPEMHQTKKGNQWHFGMKAHIGVDAKSGLTHSLVTTAANEHDLNQLGNLLHGEEQFVSADAGYQGAPQREELAEVDVDWLIAERPGKVRTLKQHPRKNKTAINIEYMKASIRARVEHPFRIIKRQFGFVKARYKGLLKNDNQLAMLFTLANLFRADQMIRQWERSH

SEQ ID NO: 43055 - protein, 275 aa, Escherichia coli
MESLLTLPLAGEARVRILQITDTHLFAQKHEALLGVNTWESYQAVLEAIRPHQHEFDLIVATGDLAQDQSSAAYQHFAEGIASFRAPCVWLPGNHDFQPAMYSALQDAGISPAKRVFIGEQWQILLLDSQVFGVPHGELSEFQLEWLERKLADAPERHTLLLLHHHPLPAGCSWLDQHSLRNAGELDTVLAKFPHVKYLLCGHIHQELDLDWNGRRLLATPSTCVQFKPHCSNFTLDTIAPGWRTLELHADGTLTTEVHRLADTRFQPDTASEGY

SEQ ID NO: 43056 - protein, 140 aa, Escherichia coli
MKRYTPDFPEMMRLCEMNFSQLRRLLPRNDAPGETVSYQVANAQYRLTIVESTRYTTLVTIEQTAPAISYWSLPSMTVRLYHDAMVAEVCSSQQIFRFKARYDYPNKKLHQRDEKHQINQFLADWLRYCLAHGAMAIPVY

SEQ ID NO: 43057 - protein, 137 aa, Escherichia coli
MKIYCCLNTVGFFMDGCGVIPPDSKEITAEHWQSLLKSQAEGGVIDFSVFPPSIKEVIRTHDDEVADANFQKQMLISDATDFINSRQWQGKAALGRLKEDELKQYNLWLDYLEALELVDTSSAPDIEWPTPPAVQAR

SEQ ID NO: 43058 - protein, 558 aa, Escherichia coli
MHHATPLITTIVGGLVLAFILGMLANKLRISPLVGYLLAGVLAGPFTPGFVADTKLAPELAELGVILLMFGVGLHFSLKDLMAVKAIAIPGAIAQIAVATLLGMALSAVLGWSLMTGIVFGLCLSTASTVVLLRALEERQLIDSQRGQIAIGWLIVEDLVMVLTLVLLPAVAGMMEQGDVGFATLAVDMGITIGKVIAFIAIMMLVGRRLVPWIMARSAATGSRELFTLSVLALALGVAFGAVELFDVSFALGAFFAGMVLNESELSHRAAHDTLPLRDAFAVLFFVSVGMLFDPLILIQQPLAVLATLAIILFGKSLAAFFLVRLFGHSQRTALTIAASLAQIGEFAFILAGLGMALNLLPQAGQNLVLAGAILSIMLNPVLFALLEKYLAKTETLEEQTLEEAIEEEKQIPVDICNHALLVGYGRVGSLLGEKLLASDIPLVVIETSRTRVDELRERGVRAVLGNAANEEIMQLAHLECAKWLILTIPNGYEAGEIVASARAKNPDIEIIARAHYDDEVAYITERGANQVVMGEREIARTMLELLETPPAGEVVTG

SEQ ID NO: 43059 - protein, 1397 aa, Escherichia coli
MSGKPAARQGDMTQYGGSIVQGSAGVRIGAPTGVACSVCPGGVTSGHPVNPLLGAKVLPGETDIALPGPLPFILSRTYSSYRTKTPAPVGSLGPGWKMPADIRLQLRDNTLILSDNGGRSLYFEHLFPGEDGYSRSESLWLVRGGVAKLDEGHRLAALWQALPEELRLSPHRYLATNSPQGPWWLLGWCERVPEADEVLPAPLPPYRVLTGLVDRFGRTQTFHREAAGEFSGEITGVTDGAGRHFRLVLTTQAQRAEEARQQAISGGTEPSAFPDTLPGYTEYGRDNGIRLSAVWLTHDPEYPENLPAAPLVRYGWTPRGELAAVYDRSNTQVRSFTYDDKYRGRMVAHRHTGRPEICYRYDSDGRVTEQLNPAGLSYTYQYEKDRITITDSLNRREVLHTQGEGGLKRVVKKEHADGSVTQSQFDAVGRLRAQTDAAGRTTEYSPDVVTGLITRITTPDGRASAFYYNHHSQLTSATGPDGLEIRREYDEWGRLIQETAPDGDITRYRYDNPHSDLPCATEDATGSRKTMTWSRYGQLLSFTDCSGYVTRYDHDRFGQVTAVHREEGLSQYRAYDSRGQLIAVKDTQGHETRYEYNAAGDLTTVIAPDGSRNGTQYDAWGKAICTTQGGLTRSMEYDAAGRVIRLTSENGSHTTFRYDVLDRLIQETGFDGRTQRYHHDLTGKLIRSEDEGLVTHWHYDEADRLTHRTVNGETAERWQYDERGWLTDISHISEGHRVTVHYGYDSKGRLASEHLTVHHPQTNELLWQHETRHAYNAQGLANRCIPDSLPAVEWLTYGSGWLSGMKLGDTPLVEYTRDRLHRETLRSFGRYELTTAYTPAGQLQSQHLNSLLSDRDYTWNDNGELIRISSPRQTRSYSYSTTGRLTGVHTTAANLDIRIPYTTDPAGNRLPDPELHPDSALSMWPDNRIARDAHYLYRYDRHGRLTEKTDLIPEGVIRTDDERTHRYHYDSQHRLVHYTRTQYAEPLVESRYLYDPLGRRVAKRVWRRERDLTGWMSLSRKPQVTWYGWDGDRLTTIQNDRTRIQTIYQPGSFTPLIRVETATGELAKTQRRSLADTLQQSGGEDGGSVVFPPVLVQMLDRLESEILADRVSEESRRWLASCGLTVAQMQSQMDPVYTPARKIHLYHCDHRGLPLALISTEGTTAWYAEYDEWGNLLNEENPHQLQQLIRLPGQQYDEESGLYYNRHRYYDPLQGRYITQDPIGLKGGWNFYQYPLNPISNIDPLGLETLKCIKPLHSMGGTGERSGPDIWGNPFYHQYLCVPDGKGDYTCGGQDQRGESKGDGLWGPGKASNDTKEAAGRCDLVETDNSCVENCLKGKFKEVRPRYSVLPDIFTPINLGLFKNCQDWSNDSLETCKMKCSGNNIGRFIRFVFTGVM

SEQ ID NO: 43060 - protein, 1411 aa, Escherichia coli
MSGKPAARQGDMTQYGGSIVQGSAGVRIGAPTGVACSVCPGGVTSGHPVNPLLGAKVLPGETDIALPGPLPFILSRTYSSYRTKTPAPVGSLGPGWKMPADIRLQLRDNTLILSDNGGRSLYFEHLFPGEDGYSRSESLWLVRGGVAKLDEGHRLAALWQALPEELRLSPHRYLATNSPQGPWWLLGWCERVPEADEVLPAPLPPYRVLTGLVDRFGRTQTFHREAAGEFSGEITGVTDGAWRHFRLVLTTQAQRAEEARQQAISGGTEPSAFPDTLPGYTEYGRDNGIRLSAVWLTHDPEYPENLPAAPLVRYGWTPRGELAVVYDRSGKQVRSFTYDDKYRGRMVAHRHTGRPEIRYRYDSDGRVTEQLNPAGLSYTYQYEKDRITITDSLDRREVLHTQGEAGLKRVVKKEHADGSVTQSQFDAVGRLRAQTDAAGRTTEYSPDVVTGLITRITTPDGRASAFYYNHHNQLTSATGPDGLELRREYDELGRLIQETAPDGDITRYRYDNPHSDLPCATEDATGSRKTMTWSRYGQLLSFTDCSGYVTRYDHDRFGQMTAVHREEGLSQYRAYDSRGQLIAVKDTQGHETRYEYNIAGDLTAVIAPDGSRNGTQYDAWGKAVRTTQGGLTRSMEYDAAGRVIRLTSENGSHTTFRYDVLDRLIQETGFDGRTQRYHHDLTGKLIRSEDEGLVTHWHYDEADRLTHRTVKGETAERWQYDERGWLTDISHISEGHRVAVHYRYDEKGRLTGERQTVHHPQTEALLWQHETRHAYNAQGLANRCIPDSLPAVEWLTYGSGYLAGMKLGDTPLVEYTRDRLHRETLRSFGRYELTTAYTPAGQLQSQHLNSLLSDRDYTWNDNGELIRISSPRQTRSYSYSTTGRLTGVHTTAANLDIRIPYATDPAGNRLPDPELHPDSTLSMWPDNRIARDAHYLYRYDRHGRLTEKTDLIPEGVIRTDDERTHRYHYDSQHRLVHYTRTQYEEPLVESRYLYDPLGRRVAKRVWRRERDLTGWMSLSRKPQVTWYGWDGDRLTTIQNDRSRIQTIYQPGSFTPLIRVETATGELAKTQRRSLADALQQSGGEDGGSVVFPPVLVQMLDRLESEILADRVSEESRRWLASCGLTVEQMKNQMDPVYTPARKIHLYHCDHRGLPLALISTEGATAWCAEYDEWGNLLNEENPHQLQQLIRLPGQQYDEESGLYYNRHRYYDPLQGRYITQDPIGLKGGWNLYGYQLNPISDIDPLGLSMWEDAKSGACTNGLCGTLSAMIGPDKFDSIDSTAYDALNKINSQSICEDKEFAGLICKDNSGRYFSTAPNRGERKGSYPFNSPCPNGTEKVSAYHTHGADSHGEYWDEIFSGKDEKIVKSKDNNIKSFYLGTPSGNFKAIDNHGKEITNRKGLPNVCRVHGNM

SEQ ID NO: 43061 - protein, 985 aa, Escherichia coli
  MISC_FEATURE (278)..(278): X=any amino acid
MVKKEHADGSVTQSQFDAVGRLRAQTDAAGRTTEYSPDVVTGLITRITTPDGRASAFYYNHHSQLTSATGPDGLEIRREYDEWGRLIQETAPDGDITRYRYDNPHSDLPCATEDATGSRKTMTWSRYGQLLSFTDCSGYVTRYDHDRFGQMTAVHREEGLSQYRAYDSRGQLIAVKDTQGHETRYEYNAAGDLTTVIAPDGSRNGTQYDAWGKAICTTQGGLTRSMEYDAAGRVIRLTSENGSHTTFRYDVLDRLIQETGFDGRTQRYHHHLTGKLIXSEDEGLVTHWHYDEADRLTHRTVKGETAERWQYDERGWLTDISHISEGHRVTVHYGYDEKGRLTGERQTVHHPQTEALLWQHETRHAYNAQGLANRCIPDSLPAVEWLTYGSGWLAGMKLGDTPLVDFTRDRLHRKTLRRFGRYELTTAYTPAGQLQSQHLNSLQYDRDYTWNDNGELIRISSPRQTRSYSYSDSGRLTGVHTTAANLDIRIPYATDPAGNRLPDPELHPDSTLSMWPDNRIARDAHYLYRYDRHGRLTEKTDLIPEGVIRTDDERTHRYHYDSQHRLVHYTRTQYEEPLVESRYLYDPLGRRVAKRVWRRERDLTGWMSLSRKPQVTWYGWDGDRLTTIQNDRTRIQTIYQPGSFTPLIRVETATGELAKTQRRSLADALQQSGGEDGGSVVFPPVLVQMLDRLESEILADRVSEESRRWLASCGLTVAQMQSQMDPVYTPARKIHLYHCDHRGLPLALISKEGATEWCAEYDEWGNLLNEENPHQLQQLIRLPGQQYDEESGLYYNRHRYYDPLQGRYITQDPIGLKGGWNLYTYPLSPVNGMDPLGLYEFKSKNIDDIGIFALAMCNGESINENKEYGGLICKKQGEYFPMNPISSNDNDSVDLRNIKCPEGSERVGDYHTHGFYSDDKGNKVTKENDVYDSLNFSSKDLTNSYMNGMGKKECSSYLGTPNNTYLKYNPKAKGNGVTIIRQGSN

SEQ ID NO: 43062 - protein, 127 aa, Escherichia coli
MEGSRMKYRIALAVSLFALSAGSYATTLCQEKEQNILKEISYAEKHQNQNRIDGLNKALSEVRANCSDSQLRADHQKKIAKQKDEVAERQQDLAEAKQKGDADKIAKRERKLAEAQEELKKLEARDY

SEQ ID NO: 43063 - protein, 71 aa, Escherichia coli
MPVIKVRENEPFDVALRRFKRSCEKAGVLAEVRRREFYEKPTTERKRAKASAVKRHAKKLARENARRTRLY

SEQ ID NO: 43064 - protein, 1295 aa, Escherichia coli
MMEILRGSPALSAFRINKLLARFQAARLPVHNIYAEYVHFADLNAPLNDDEHAQLERLLKYGPALASHAPQGKLLLVTPRPGTISPWSSKATDIAHNCGLQQVNRLERGVAYYIEAGTLTNEQWQQVTAELHDRMMETVFFALDDAEQLFAHHQPTPVTSVDLLGQGRQALIDANLRLGLALAEDEIDYLQDAFTKLGRNPNDIELYMFAQANSEHCRHKIFNADWVIDGEQQPKSLFKMIKNTFETTPDHVLSAYKDNAAVMEGSEVGRYFADHETGRYDFHQEPAHILMKVETHNHPTAISPWPGAATGSGGEIRDEGATGRGAKPKAGLVGFSVSNLRIPGFEQPWEEDFGKPERIVTALDIMTEGPLGGAAFNNEFGRPALNGYFRTYEEKVNSHNGEELRGYHKPIMLAGGIGNIRADHVQKGEINVGAKLVVLGGPAMNIGLGGGAASSMASGQSDADLDFASVQRDNPEMERRCQEVIDRCWQLGDANPILFIHDVGAGGLSNAMPELVSDGGRGGKFELREILSDEPGMSPLEIWCNESQERYVLAVAADQLPLFDELCKRERAPYAVIGEATEELHLSLHDRHFDNQPIDLPLDVLLGKTPKMTRDVQTLKAKGDALAREGITIADAVKRVLHLPTVAEKTFLVTIGDRSVTGMVARDQMVGPWQVPVANCAVTTASLDSYYGEAMAIGERAPVALLDFAASARLAVGEALTNIAATQIGDIKRIKLSANWMAAAGHPGEDAGLYEAVKAVGEELCPALGLTIPVGKDSMSMKTRWQEGNEEREMTSPLSLVISAFARVEDVRHTITPQLSTEDNALLLIDLGKGNNALGATALAQVFRQLGDKPADVRDVAQLKGFYDAIQALVAQRKLLAYHDRSDGGLLVTLAEMAFAGHCGIDADIATLGDDRLAALFNEELGAVIQVRAADREAVESVLAQHGLADCVHYVGQAVSGDRFVITANGQTVFSESRTTLRVWWAETTWQMQRLRDNPECADQEHQAKSNDADPGLNVKLSFDINEDVAAPYIATGARPKVAVLREQGVNSHVEMAAAFHRAGFDAIDVHMSDLLTGRTGLEDFHALVACGGFSYGDVLGAGEGWAKSILFNDRVRDEFATFFHRPQTLALGVCNGCQMMSNLRELIPGSELWPRFVRNTSDRFEARFSLVEVTQSPSLLLQGMVGSQMPIAVSHGEGRVEVRDAAHLAALESKGLVALRYVDNFGKVTETYPANPNGSPNGITAVTTESGRVTIMMPHPERVFRTVSNSWHPENWGEDGPWMRIFRNARKQLG

SEQ ID NO: 43065 - protein, 240 aa, Escherichia coli
MGHKPLYRQIADRIREQIARGELKPGDALPTESALQTEFGVSRVTVRQALRQLVEQQILESIQGSGTYVKEERVNYDIFQLTSFDEKLSDRHVDTHSEVLIFEVIPADDFLQQQLQITPQDRVWHVKRVRYRKQKPMALEETWMPLALFPDLTWQVMENSKYHFIEEVKKMVIDRSEQEIIPLMPTEEMSRLLNISQTKPILEKVSRGYLVDGRVFEYSRNAFNTDDYKFTLIAQRKSSR

SEQ ID NO: 43066 - protein, 726 aa, Escherichia coli
MSTSDDIHNTTATGKCPFHQGGHDQSAGAGTTTRDWWPNQLRVDLLNQHSNRSNPLGEDFDYRKEFSKLDYYGLKKDLKALLTESQPWWPADWGSYAGLFIRMAWHGAGTYRSIDGRGGAGRGQQRFAPLNSWPDNVSLDKARRLLWPIKQKYGQKISWADLFILAGNVALENSGFRTFGFGAGREDVWEPDLDVNWGDEKAWLTHRHPEALAKAPLGATEMGLIYVNPEGPDHSGEPLSAAAAIRATFGNMGMNDEETVALIAGGHTLGKTHGAGPTSNVGPDPEAAPIEEQGLGWASTYGSGVGADAITSGLEVVWTQTPTQWSNYFFENLFKYEWVQTRSPAGAIQFEAVDAPEIIPDPFDPSKKRKPTMLVTDLTLRFDPEFEKISRRFLNDPQAFNEAFARAWFKLTHRDMGPKSRYIGPEVPKEDLIWQDPLPQPIYNPTEQDIIDLKFAIADSGLSVSELVSVAWASASTFRGGDKRGGANGARLALMPQRDWDVNAAAVRALPVLEKIQKESGKASLADIIVLAGVVGVEKAASAAGLSIHVPFAPGRVDARQDQTDIEMFELLEPIADGFRNYRARLDVSTTESLLIDKAQQLTLTAPEMTALVGGMRVLGANFDGSKNGVFTDRVGVLSNDFFVNLLDMRYEWKATDESKELFEGRDRETGEVKFTASRADLVFGSNSVLRAVAEVYASSDAHEKFVKDFVAAWVKVMNLDRFDLL

SEQ ID NO: 43067 - protein, 278 aa, Escherichia coli
MEMLEEHRCFEGWQQRWRHDSSTLNCPMTFSIFLPPPRDHTPPPVLYWLSGLTCNDENFTTKAGAQRVAAELGIVLVMPDTSPRGEKVANDDGYDLGQGAGFYLNATQPPWATHYRMYDYLRDELPALVQSQFNVSDRCAISGHSMGGHGALIMALKNPGKYTSVSAFAPIVNPCSVPWGIKAFSSYLGEDKNAWLEWDSCALMYASNAQDAIPTLIDQGDNDQFLADQLQPAVLAEAARQKAWPMTLRIQPGYDHSYYFIASFIEDHLRFHAQYLLK

SEQ ID NO: 43068 - protein, 1538 aa, Escherichia coli
MADNPDPSSLLPDVFSPATRDWFLRAFKQPTAVQPQTWHVAARSEHALVIAPTGSGKTLAAFLYALDRLFREGGEDTREAHKRKTSRILYISPIKALGTDVQRNLQIPLKGIADERRRRGETEVNLRVGIRTGDTPAQERSKLTRNPPDILITTPESLYLMLTSRARETLRGVETVIIDEVHAVAGSKRGAHLALSLERLDALLHTSAQRIGLSATVRSASDVAAFLGGDRPVTVVNPPAMRHPQIRIVVPVANMDDVSSVASGTGEDSHAGREGSIWPYIETGILDEVLRHRSTIVFTNSRGLAEKLTARLNELYAARLQRSPSIAVDAAHFESTSGATSNRVQSSDVFIARSHHGSVSKEQRAITEQALKSGELRCVVATSSLELGIDMGAVDLVIQVATPLSVASGLQRIGRAGHQVGGVSKGLFFPRTRRDLVDSAVIVECMFAGRLENLTPPHNPLDVLAQQTVAAAAMDALQVDEWYSRVRRAAPWKDLPRRVFDATLDMLSGRYPSGDFSAFRPKLVWNRETGILTARPGAQLLAVTSGGTIPDRGMYSVLLPEGEEKAGSRRVGELDEEMVYESRVNDIITLGATSWRIQQITRDQVIVTPAPGRSARLPFWRGEGNGRPAELGEMIGDFLHLLADGAFFSGTIPPWLAEENTIANIQGLIEEQRNATGIVPGSRHLVLERCRDEIGDWRIILHSPYGRRVHEPWAVAIAGRIHALWGADASVVASDDGIVARIPDTDGKLPDAAIFLFEPEKLLQIVREAVGSSALFAARFRECAARALLMPGRTPGHRTPLWQQRLRASQLLEIAQGYPDFPVILETLRECLQDVYDLPALERLMRRLNGGEIQISDVTTTTPSPFATSLLFGYVAEFMYQSDAPLAERRASVLSLDSELLRNLLGQVDPGELLDPQVIRQVEEELQRLAPGRRAKGEEGLFDLLRELGPMTVEDLAQRHTGSSEEVASYLENLLAVKRIFPAMISGQERLACMDDAARLRDALGVRLPESLPEIYLHRVSYPLRDLFLRYLRAHALVTAEQLAHEFSLGIAIVEEQLQQLREQGLVMNLQQDIWVSDEVFRRLRLRSLQAAREATRPVAATTYARLLLERQGVLPATDGSPALFASTSPGVYEGVDGVMRVIEQLAGVGLPASLWESQILPARVRDYSSEMLDELLATGAVIWSGQKKLGEDDGLVALHLQEYAAESFTPAEADQANRSALQQAIVAVLADGGAWFAQQISQRIRDKIGESVDLSALQEALWALVWQGVITSDIWAPLRALTRSSSNARTSTRRSHRARRGRPVYAQPVSPRVSYNTPNLAGRWSLLQVEPLNDTERMLALAENMLDRYGIISRQAVIAENIPGGFPSMQTLCRSMEDSGRIMRGRFVEGLGGAQFAERLTIDRLRDLATQATQTRHYTPVALSANDPANVWGNLLPWPAHPATLVPTRRAGALVVVSGGKLLLYLAQGGKKMLVWQEKEELLAPEVFHALTTALRREPRLRFTLTEVNDLPVRQTPMFTLLREAGFSSSPQGLDWG

SEQ ID NO: 43069 - protein, 286 aa, Escherichia coli
MRKVTSLSRGKLPFFFFALRKLELTMSIESLNAFSMDFFSLKGKTAIVTGGNSGLGQAFAMALAKAGANIFIPSFVKDNGETKEMIEKQGVEVDFMQVGITAEGAPQKIIAACCERFGTVDILVNNAGICKLNKVLDFGRADWDPMIDVNLTAAFELSYEAAKIMIPQKSGKIINICSLFSYLGGQWSPAYSATKHALAGFTKAYCDELGQYNIQVNGIAPGYYATDITLATRSNPETNQRVLDHIPANRWGDTQDLMGAAVFLASPASNYVNGHLLVVDGGYLVR

SEQ ID NO: 43070 - protein, 207 aa, Escherichia coli
MSTIIMDLCSYTRLGLTGYLLSRGVKKREINDIETVDDLAIACDSQRPSVVFINEDCFIHDASNSQRIKLIINQHPNTLFIVFMAIANVHFDEYLLVRKNLLISSKSIKPESLDDILGDILKKETTITSFLNMPTLSLSRTESSMLRMWMAGQGTIQISDQMNIKAKTVSSHKGNIKRKIKTHNKQVIYHVVRLTDNVTNGIFVNMR

SEQ ID NO: 43071 - protein, 152 aa, Escherichia coli
MTTQTQHDLAPANQPEFELTVTPVPDEQRIDFWPQYFGAIPQWLLLEPHIFAWMDRFCEGYSGGIWSFYTLSNGGAFMSPEPDNDETWRLFNCLNGNDAQMSAEAAGIAVCLIAYSHHACRTECDAMTAHYYRLREYAMQHPEAHAILRIID

SEQ ID NO: 43072 - protein, 418 aa, Escherichia coli
MGSNIHGISCTANNYLKQAWNDIKNEYEKNQTYSITLFENTLVCFMRLYNELRRKVNEEDTPCLECESLEKEFEEMQNDNDLSLFMRILRTNDTQIYSGVSGGITYTIQYVRDIDIVRVSLPGRASESITDFKGYYWYNFMEYIENINACDDVFSEYCFDDENISVQPERINTPGISDLDSDIDLSGISFIQRETNQALGLKYAPVDGDGYCLLRAILVLKQHDYSWALVSYKMQKEVYNEFIKMVDKKTIEALVDTAFYNLREDVKTLFGVDLQSDNQIQGQSSLMSWSFLFFKKQFIDSCLNNEKCILHLPEFIFNDNKNLLALDTDTSDRIKAVKNFLVVLSDSICSLFIVNSNVASISLGNESFSTDEDLEYGYLMNTGNHYDVYLPPELFAQAYKLNNKEMNAQLDYLNRYAI

SEQ ID NO: 43073 - protein, 116 aa, Escherichia coli
MNDKKCILHLPEFIFNDNKARLVLDTDPEKRINEVKNFLTALSDSICSLFIVNSNVASISLGNESFSTDEDLEYGYLINTGNHYDVYLPPELFAQAYELNNKERNAQIGFLTRYAI

SEQ ID NO: 43074 - protein, 516 aa, Escherichia coli
MKRSISFRPTLLALVLATNFPVAHAAVPKDMLVIGKAADPQTLDPAVTIDNNDWTVTYPSYQRLVQYKTDGDKGSTDVEGDLASSWKASDDQKEWTFTLKDNAKFADGTPVTAEAVKLSFERLLKIGQGPAEAFPKDLKIDAPDEHTVKFTLSQPFAPFLYTLANDGASIINPAVLKEHAADDARGFLAQNTAGSGPFMLKSWQKGQQLVLVPNPHYPGNKPNFKRVSVKIIGESASRRLQLSRGDIDIADALPVDQLNALKQENKVNVAEYPSLRVTYLYLNNSKAPLNQADLRRAISWSTDYQGMVNGILSGNGKQMRGPIPEGMWGYDATAMQYNHDETKAKAEWDKVTSKPTSLTFLYSDNDPNWEPIALATQSSLNKLGIIVKLEKLANATMRDRVGKGDYDIAIGNWSPDFADPYMFMNYWFESDKKGLPGNRSFYENSEVDKLLRNALATTDQTQRTRDYQQAQKIVIDDAAYVYLFQKNYQLAMNKEVKGFVFNPMLEQVFNINTMSK

SEQ ID NO: 43075 - protein, 193 aa, Escherichia coli
MSDTTELVDLAVIFPDLEIELKYACADNITGKAIYQQARCLLHKDAITALAKSISIAQLSGLQLVIYDAYRPQQAQAMLWQACPDPQYVVDVTVGSNHSRGTAIDLTLRDEHGNILDMGAGFDEMHERSHAYHPSVPPAAQRNRLLLNAIMTGGGFVGISSEWWHFELPQAASYPLLADQFSCFISPGTQHVS

SEQ ID NO: 43076 - protein, 349 aa, Escherichia coli
MRTLFSQQQWIDMKVLVTGATSGLGRNAVEFLCQKGISVRATGRNEAMGKLLEKMGAEFVPADLTELVSSQAKVMLAGIDTLWHCSSFTSPWGTQQAFDLANVRATRRLGEWAVAWGVRNFIHISSPSLYFDYHHHRDIKEDFRPHRFANEFARSKAASEEVINMLSQANPQTRFTILRPQSLFGPHDKVFIPRLAHMMHHYGSILLPHGGSALVDMTYYENAVHAMWLASQEACDKLPSGRVYNITNGEHRTLRSIVQKLIDELNIDCRIRSVPYPMLDMIARSMERLGRKSAKEPPLTHYGVSKLNFDFTLDITRAQEELGYQPVITLDEGIEKTAAWLRDHGKLPR

SEQ ID NO: 43077 - protein, 148 aa, Escherichia coli
MRRDYMSVYDYPVPTTPWLNTAPGLFIDDYTSTASSTVSSLSRTLIYDYEQNPDSGNNVVALAAKAGYSTWWISNQGKLGEHDTRISVIASDAEHATFLKKGSFASRKTDDKLLLQETERALADTSSPKIIFLHMMGSHPNPCDSLNS

SEQ ID NO: 43078 - protein, 149 aa, Escherichia coli
MQEEPGDCHQPHNPARTGSEPTENTTGESKVNRPVFPVYHFLVSAAILVFVVIFWRTHHRDHRNWLALRLFVLCSVNRWPLRMVKGTVVGTTDTLREMQRYEQLSSTGLTTGKSSREHRYMIRLLLSLVRVCAGIICQCMTIPYQPHRG

SEQ ID NO: 43079 - protein, 353 aa, Escherichia coli
MHLRHLFSSRLRGSLLLGSLLVVSSFSTQAAEEMLRKAVGKGAYEMAYSQQENALWLATSQSRKLDKGGVVYRLDPVTLEVTQAIHNDLKPFGATINNTTQTLWFGNTVNSAVTAIDAKTGEVKGRLVLDDRKRTEEVRPLQPRELVADDATNTVYISGIGKESVIWVVDGGNIKLKTAIQNTGKMSTGLALDSEGKRLYTTNADGELITIDTADNKILSRKKLLDDGKEHFFINISLDTARQRAFITDSKAAEVLVVDTRNGNILAKVAAPESLAVLFNPARNEAYVTHRQAGKVSVIDAKSYKVVKTFDTPTHPNSLALSADGKTLYVSVKQKSTKQQEATQPDDVIRIAL

SEQ ID NO: 43080 - protein, 429 aa, Escherichia coli
METTQTSTIASKDSRSAWRKTDTMWMLGLYGTAIGAGVLFLPINAGVGGMIPLIIMAILAFPMTFFAHRGLTRFVLSGKNPGEDITEVVEEHFGIGAGKLITLLYFFAIYPILLVYSVAITNTVESFMSHQLGMTPPPRAILSLILIVGMMTIVRFGEQMIVKAMSILVFPFVGVLMLLALYLIPQWNGAALETLSLDTASATGNGLWMTLWLAIPVMVFSFNHSPIISSFAVAKREEYGDMAEQKCSKILAFAHIMMVLTVMFFVFSCVLSLTPADLAAAKEQNISILSYLANHFNAPVIAWMAPIIAIIAITKSFLGHYLGAREGFNGMVIKSLRGKGKSIEINKLNRITALFMLVTTWIVATLNPSILGMIETLGGPIIAMILFLMPMYAIQKVPAMRKYSGHISNVFVVVMGLIAISAIFYSLFS

SEQ ID NO: 43081 - protein, 455 aa, Escherichia coli
MISVFDIFKIGIGPSSSHTVGPMKAGKQFTDDLIARNLLKDVTRVVVDVYGSLSLTGKGHHTDIAIIMGLAGNLPDTVDIDSIPSFIQDVNTHGRLMLANGQHEVEFPVDQCMNFHADNLSLHENGMRITALAGDKVVYSQTYYSIGGGFIVDEEHFGQQDSAPVEVPYPYSSAADLQKHCQETGLSLSGLMMKNELALHSKEELEQHLANVWEVMRGGIERGISTEGVLPGKLRVPRRAAALRRMLVSQDKTTTDPMAVVDWINMFALAVNEENAAGGRVVTAPTNGACGIIPAVLAYYDKFIREVNANSLARYLLVASAIGSLYKMNASISGAEVGCQGEVGVACSMAAAGLAELLGASPAQVCIAAEIAMEHNLGLTCDPVAGQVQVPCIERNAIAAVKAVNAARMALRRTSEPRVCLDKVIETMYETGKDMNAKYRETSRGGLAMKIVACD

SEQ ID NO: 43082 - protein, 298 aa, Escherichia coli
MTDLHTDVERYLRYLSVERQLSPITLLNYQRQLEAIINFASENGLQSWQQCDVTMVRNFAVRSRRKGLGAASLALRLSALRSFFDWLVSQNELKANPAKGVSAPKAPRHLPKNIDVDDMNRLLDIDINDPLAVRDRAMLEVMYGAGLRLSELVGLDIKHLDLESGEVWVMGKGSKERRLPIGRNAVAWIEHWLDLRDLFGSEDDALFLSKLGKRISARNVQKRFAEWGIKQGLNNHVHPHKLRHSFATHMLESSGDLRGVQELLGHANLSTTQIYTHLDFQHLASVYDAAHPRAKRGK

SEQ ID NO: 43083 - protein, 238 aa, Escherichia coli
MRFYRPLGRISALTFDLDDTLYDNRPVILRTEREALTFVQNYHPALRSFQNEDLQRLRQAVREAEPEIYHDVTRWRFRSIEQAMLDAGLSAEEASAGAHAAMINFAKWRSRIDVPQQTHDTLKQLAKKWPLVAITNGNAQPELFGLGDYFEFVLRAGPHGRSKPFSDMYFLAAEKLNVPIGEILHVGDDLTTDVGGAIRSGMQACWIRPENGDLMQTWDSRLLPHLEISRLASLTSLI

SEQ ID NO: 43084 - protein, 457 aa, Escherichia coli
MESKNKLKRGLSTRHIRFMALGSAIGTGLFYGSADAIKMAGPSVLLAYIIGGIAAYIIMRALGEMSVHNPAASSFSRYAQENLGPLAGYITGWTYCFEILIVAIADVTAFGIYMGVWFPTVPHWIWVLSVVLIICAVNLMSVKVFGELEFWFSFFKVATIIIMIVAGFGIIIWGIGNGGQPTGIHNLWSNGGFFSNGWLGMVMSLQMVMFAYGGIEIIGITAGEAKDPEKSIPRAINSVPMRILVFYVGTLFVIMSIYPWNQVGTAGSPFVLTFQHMGITFAASILNFVVLTASLSAINSDVFGVGRMLHGMAEQGSAPKIFSKTSRRGIPWVTVLVMTTALLFAVYLNYIMPENVFLVIASLATFATVWVWIMILLSQIAFRRRLPPEEVKALKFKVPGGVATTIGGLIFLLFIIGLIGYHPDTRISLYVGFAWIVVLLIGWMFKRRHDRQLAENQ

SEQ ID NO: 43085 - protein, 605 aa, Escherichia coli
MMLNAWHLPVPPFVKQSKDQLLITLWLTGEDPPQRIMLRTEHDNEEMSVPMHKQRSQPQPGVTAWRAAIDLSSGQPRRRYSFKLLWHDRQRWFTPQGFSRMPPARLEQFAVDVPDIGPQWAADQIFYQIFPDRFARSLPREAEQDHVYYHHAAGQEIILRDWDEPVTAQAGGSTFYGGDLDGISEKLPYLKKLGVTALYLNPVFKAPSVHKYDTEDYRHVDPQFGGDGALLRLRHNTQQLGMRLVLDGVFNHSGDSHAWFDRHNRGTGGACHNPESPWRDWYSFSDDGTALDWLGYASLPKLDYQSESLVNEIYRGEDSIVRHWLKAPWNMDGWRLDVVHMLGEAGGARNNMQHVAGITEAAKETQPEAYIVGEHFGDARQWLQADVEDAAMNYRGFTFPLWGFLANTDISYDPQQIDAQTCMAWMDNYRAGLSHQQQLRMFNQLDSHDTARFKTLLGRDIARLPLAVVWLFTWPGVPCIYYGDEVGLDGKNDPFCRKPFPWQVEKQDTALFALYQRMIALRKKSQALRHGGCQVLYAEDNVVVFVRVLNQQRVLVAINRGEACEVVLPASPFLNAVQWQCKEGHGQLTDGILALPAISATVWMN

SEQ ID NO: 43086 - protein, 334 aa, Escherichia coli
MSGFYHKHFLKLLDFTPAELNSLLQLAAKLKADKKSGKEEAKLTGKNIALIFEKDSTRTRCSFEVAAYDQGARVTYLGPSGSQIGHKESIKDTARVLGRMYDGIQYRGYGQEIVETLAEYASVPVWNGLTNEFHPTQLLADLLTMQEHLPGKAFNEMTLVYAGDARNNMGNSMLEAAALTGLDLRLVAPQACWPEAALVTECRALAQQNGGNITLTEDVAKGVEGADFIYTDVWVSMGEAKEKWAERIALLREYQVNSKMMQLTGNPEVKFLHCLPAFHDDQTTLGKKMAEEFGLHGGMEVTDEVFESAASIVFDQAENRMHTIKAVMVATLSK

SEQ ID NO: 43087 - protein, 89 aa, Escherichia coli
MSLSTEATAKIVSEFGRDANDTGSTEVQVALLTAQINHLQGHFAEHKKDHHSRRGLLRMVSQRRKLLDYLKRKDVARYTQLIERLGLRR

SEQ ID NO: 43088 - protein, 309 aa, Escherichia coli
MSIRIIPQDELGSSEKRTADMIPPLLFPRLKNLYNRRAERLRELAENNPLGDYLRFAALIAHAQEVVLYDHPLEMDLTARIKEASAQGKPPLDIHVLPRDKHWQKLLMALIAELKPEMSGPALAVIENLEKASTQELEDMASALFASDFSSVSSDKAPFIWAALSLYWAQMANLIPGKARAEYGEQRQYCPVCGSMPVSSMVQIGTTQGLRYLHCNLCETEWHVVRVKCSNCEQSGKLHYWSLDDEQAAIKAESCDDCDTYLKILYQEKDPKIEAVADDLASLVLDARMEQEGYARSSINPFLFPGEGE

SEQ ID NO: 43089 - protein, 211 aa, Escherichia coli
MKRRDTIVRYTAPERINHWITAFCFILAAVSGLGFLFPSFNWLMQIMGTPQLARILHPFVGVVMFASFIIMFFRYWHHNLINRDDIFWAKNIRKIVVNEEVGDTGRYNFGQKCVFWAAIIFLVLLLVSGVIIWRPYFAPAFSIPVIRFALMLHSFAAVALIVVIMVHIYAALWVKGTITAMVEGWVTSAWAKKHHPRWYREVRKTTEKKAE

SEQ ID NO: 43090 - protein, 302 aa, Escherichia coli
MRMNMSDFATFFAVARNQSFRAAGDELGLSSSAISHSIKTLEQRLKIRLFNRTTRSVSLTEAGSNLYERLRPAFDEIQIMLDEMNDFRLTPTGTLKINAARVAARIFLMSLLVGFTREYPDIKVELTTDDSLVDIVQQGFDAGVRLSCIVEKDMISVAIGPPVKLCVAATPEYFARYGKPRHPHDLLNHQCVVFRYPSGKPFHWQFAKELEIAVAGNIILDDVDAELEAVLMGAGIGYLLYEQIKEYLDTGRLECVLEDWSTERPGFQIYYPNRQYMSCGLRAFLDYVKTGQICQSQRHRPQ

SEQ ID NO: 43091 - protein, 786 aa, Escherichia coli
MSATCLISLPPFHPKGRHTRFLSFKIAPPPASILIFLLYFLTGGVMRWILFILFCLLGAPAHAVSIPGVTTTTTTDSTTEPAPEPDIEQKKAAYGALADVLDNDTSRKELIDQLRTVAATPPAEPVPKIVPPTLVEEQTVLQKVTEVSRHYGEALSARFGQLYRNITGSPHKPFNPQTFSNALTHFSMLAVLVFGFYWLIRLCALPLYRKMGQWARQKNRERSNWLQLPAMIIGAFIIDLLLLALTLFVGQVLSDNLNAGSRTIAFQQSLFLNAFALIEFFKAVLRLIFCPNVAELRPFTIQDESARYWSRRLSWLSSLIGYGLIVAVPIISNQVNVQIGALANVIIMLCMTVWALYLIFRNKKEITQHLLNFAEHSLAFFSLFIRAFALVWHWLASAYFIVLFFFSLFDPGNSLKFMMGATVRSLAIIGIAAFVSGMFSRWLAKTITLSPHTQRNYPELQKRLNGWLSAALKTARILTVCVAVMLLLSAWGLFDFWNWLQNGAGQKTVDILIRIALILFFSAVGWTVLASLIENRLASDIHGRPLPSARTRTLLTLFRNALAVIISTITIMIVLSEIGVNIAPLLAGAGALGLAISFGSQTLVKDIITGVFIQFENGMNTGDLVTIGPLTGTVERMSIRSVGVRQDTGAYHIIPWSSITTFANFVRGIGSVVANYDVDRHEDADKANQALKDAVAELMENEEIRGLIIGEPNFAGIVGLSNTAFTLRVSFTTLPLKQWTVRFALDSQVKKHFDLAGVRAPVQTYQVLPAPGATPAEPLPPGEPTL

SEQ ID NO: 43092 - protein, 156 aa, Escherichia coli
MDIRKIKKLIELVEESGISELEISEGEESVRISRAAPAASFPVMQQAYAAPMMQQPAQSNAAAPATVPSMEAPAAAEISGHIVRSPMVGTFYRTPSPDAKAFIEVGQKVNVGDTLCIVEAMKMMNQIEADKSGTVKAILVESGQPVEFDEPLVVIE

SEQ ID NO: 43093 - protein, 367 aa, Escherichia coli
MVGKVSGFSFPPQLSGLSLSMLKKFRGMFSNDLSIDLGTANTLIYVKGQGIVLNEPSVVAIRQDRAGSPKSVAAVGHDAKQMLGRTPGNIAAIRPMKDGVIADFFVTEKMLQHFIKQVHSNSFMRPSPRVLVCVPVGATQVERRAIRESAQGAGAREVFLIEEPMAAAIGAGLPVSEATGSMVVDIGGGTTEVAVISLNGVVYSSSVRIGGDRFDEAIINYVRRNYGSLIGEATAERIKHEIGSAYPGDEVREIEVRGRNLAEGVPRGFTLNSNEILEALQEPLTGIVSAVMVALEQCPPELASDISERGMVLTGGGALLRNLDRLLMEETGIPVVVAEDPLTCVARGGGKALEMIDMHGGDLFSEE

SEQ ID NO: 43094 - protein, 105 aa, Escherichia coli
MAEWSGEYISPYAEHGKKSEQVKKITVSIPLKVLKILTDERTRRQVNNLRHATNSELLCEAFLHAFTGQPLPDDADLRKERSDEIPEAAKEIMREMGINPETWEY

SEQ ID NO: 43095 - protein, 54 aa, Escherichia coli
MHQKQKLTDAGLKLMATAKMPDALRLSGLRHLCNILNLRAFVGRIRRSRRIRHE

SEQ ID NO: 43096 - protein, 196 aa, Escherichia coli
MQSERIYLVWAHPRHDSLTAHIADAIHQRAMERKIQVTELDLYRRNFNPVMTPEDEPDWKNMDKRYSPEVHQLYSELLEHDTLVVVFPLWWYSFPAMLKGYIDRVWNNGLAYGDGHKLPFNKVRWVALVGGDKESFVQMGWEKNISDYLKNMCSYLGIEDADVTFLCNTVVFDGEELHASYYQSLLSQVRDMVDAL

SEQ ID NO: 43097 - protein, 283 aa, Escherichia coli
MMKLIPRSSDISPGIDGICPGPFPPNGFTVLTDAAYGNGDCFGLYWPIGQEHKLPIVCETYHDEWRIVPAFSSIKKFEEWLEVNDDDPHENGISIEDQDFAANLFRVARKCLSTGRLDDALPLLQRATEQLPEVSEYWLALAIQYRRCKKTEAAAQAALNAYLGNWAFGVPDNKVIHLLSQAADVPNFQDDPVIQCIKEQGLDLSFGGTKENNNYPLMQMCVDTYFAQRKPLQALTLLHNYAWIMSSETTAFQERYDFNIDEWRAKFRQLCLEYFGDSRTQFT

SEQ ID NO: 43098 - protein, 382 aa, Escherichia coli
MSDESDDKTEAPTPHRLEKAREEGQIPRSRELTSLLILLVGVSVIWFGGVSLARRLSGMLSAGLHFDHSIINDPNLILGQIILLIREAMLALLPLISGVVLVALISPVMLGGLVFSGKSLQPKFSKLNPLPGIKRMFSAQTGAELLKAILKTILVGSVTGFFLWHHWPQMMRLMAESPITAMGNAMDLVGLCALLVVLGVIPMVGFDVFFQIFSHLKKLRMSRQDIRDEFKQSEGDPHVKGRIRQMQRAAARRRMMADVPKADVIVNNPTHYSVALQYDENKMSAPKVVAKGAGLVALRIREIGAENNVPTLEAPPLARALYRHAEIGQQIPGQLYAAVAEVLAWVWQLKRWRLAGGQRPVQPTHLPVPEALDFINEKPTHE

SEQ ID NO: 43099 - protein, 303 aa, Escherichia coli
MQKFDTRTFQGLILTLQDYWARQGCTIVQPLDMEVGAGTSHPMTCLRELGPEPMAAAYVQPSRRPTDGRYGENPNRLQHYYQFQVVIKPSPDNIQELYLGSLKELGMDPTIHDIRFVEDNWENPTLGAWGLGWEVWLNGMEVTQFTYFQQVGGLECKPVTGEITYGLERLAMYIQGVDSVYDLVWSDGPLGKTTYGDVFHQNEVEQSTYNFEYADVDFLFTCFEQYEKEAQQLLALENPLPLPAYERILKAAHSFNLLDARKAISVTERQRYILRIRTLTKAVAEAYYASREALGFPMCNKDK

SEQ ID NO: 43100 - protein, 714 aa, Escherichia coli
MEMTSAFTLNVRLDNIAVITIDVPGEKMNTLKAEFASQVRAIIKQLRENKELRGVVFVSAKPDNFIAGADINMIGNCKTAQEAEALARQGQQLMAEIHALPIQVIAAIHGACLGGGLELALACHGRVCTDDPKTVLGLPEVQLGLLPGSGGTQRLPRLIGVSTALEMILTGKQLRAKQALKLGLVDDVVPHSILLEAAVELAKKERPSSRPLPVRERILAGPLGRALLFKMVGKKTEHKTQGNYPATERILEVVETGLAQGTSSGYDAEARAFGELAMTPQSQALRSIFFASTDVKKDPGSDAPPAPLNSVGILGGGLMGGGIAYVTACKAGIPVRIKDINPQGINHALKYSWDQLEGKVRRRHLKASERDKQLALISGTTDYRGFAHRDLIIEAVFENLELKQQMVAEVEQNCAAHTIFASNTSSLPIGDIAAHATRPEQVIGLHFFSPVEKMPLVEIIPHAGTSAQTIATTVKLAKKQGKTPIVVRDKAGFYVNRILAPYINEAIRMLTQGERVEHIDAALVKFGFPVGPIQLLDEVGIDTGTKIIPVLEAAYGERFSAPANVVSSILNDDRKGRKNGRGFYLYGQKGRKSKKQVDPAIYPLIGTQGQGRISAPQVAERCVMLMLNEAVRCVDEQVIRSVRDGDIGAVFGIGFPPFLGGPFRYIDSLGAGEVVAIMQRLATQYGSRFTPCERLVEMGARGESFWKTTATDLQ

SEQ ID NO: 43101 - protein, 485 aa, Escherichia coli
MAKNYAALARSVIAALGGVDNISAVTHCMTRLRFVIKDDALIDSPTLKTIPGVLGVVRSDNQCQVIIGNTVSQAFQEVVSLLPGDMQPAQPVGKPKLTLRRIGAGILDALIGTMSPLIPAIIGGSMVKLLAMILEMSGVLTKGSPTLTILNVIGDGAFFFLPLMVAHLPRIKFKTNMSLAIAIAGVLVHPSFIELMAKAAQGEHVEFALIPVTAVKYTYTVIPALVMTWCLSYIERWVDSITPAVTKNFLKPMLIVLIAAPLAILLIGPIGIWIGSAISALVYTIHGYLGWLSVAIMGALWPLLVMTGMHRVFTPTIIQTIAETGKEGMVMPSEIGANLSLGGSSLAVAWKTKNPELRQTALAAAASAIMAGISEPALYGVAIRLKRPLIASLISGFICGAVAGMAGLASHSMAAPGLFTSVQFFDPANPMSIVWVFAVMALAVVLSFILTLLLGFEDIPVEEAAAQARKYQSVQPTVAKEVSLN

SEQ ID NO: 43102 - protein, 449 aa, Escherichia coli
MLDKIVIANRGEIALRILRACKELGIKTVAVHSSADRDLKHVLLADETVCIGPAPSVKSYLNIPAIISAAEITGAVAIHPGYGFLSENANFAEQVERSGFIFIGPKAETIRLMGDKVSAIAAMKKAGVPCVPGSDGPLGDDMDKNRAIAKRIGYPVIIKASGGGGGRGMRVVRGDAELAQSISMTRAEAKAAFSNDMVYMEKYLENPRHVEIQVLADGQGNAIYLAERDCSMQRRHQKVVEEAPAPGITPELRRYIGERCAKACVDIGYRGAGTFEFLFENGEFYFIEMNTRIQVEHPVTEMITGVDLIKEQLRIAAGQPLSIKQEEVHVRGHAVECRINAEDPNTFLPSPGKITRFHAPGGFGVRWESHIYAGYTVPPYYDSMIGKLICYGENRDVAIARMKNALQELIIDGIKTNVDLQIRIMNDENFQHGGTNIHYLEKKLGLQEK

SEQ ID NO: 43103 - protein, 542 aa, Escherichia coli
MIAVVKLLPTGEDFASHVYPCYTSHRKETIMTNNPPSAQIKPGEYGFPLKLKARYDNFIGGEWVAPADGEYYQNLTPVTGQLLCEVASSGKRDIDLALDAAHKVKDKWAHTSVQDRAAILFKIADRMEQNLELLATAETWDNGKPIRETSAADVPLAIDHFRYFASCIRAQEGGISEVDSETVAYHFHEPLGVVGQIIPWNFPLLMASWKMAPALAAGNCVVLKPARLTPLSVLLLMEIVGDLLPPGVVNVVNGAGGVIGEYLATSKRIAKVAFTGSTEVGQQIMQYATQNIIPVTLELGGKSPNIFFADVMDEEDAFFDKALEGFALFAFNQGEVCTCPSRALVQESIYERFMERAIRRVESIRSGNPLDSVTQMGAQVSHGQLETILNYIDIGKKEGADVLTGGRRKLLEGELKDGYYLEPTILFGQNNMRVFQEEIFGPVLAVTTFKTMEEALELANDTQYGLGAGVWSRNGNLAYKMGRGIQAGRVWTNCYHAYPAHAAFGGYKQSGIGRETHKMMLEHYQQTKCLLVSYSDKPLGLF

SEQ ID NO: 43104 - protein, 646 aa, Escherichia coli
MRLTTKFSAFVTLLTGLTIFVTLLGCSLSFYNAIQYKFSHRVQAVATAIDTHLVSNDFSVLRPQITELMMSADIVRVDLLHGDKQVYTLARNGSYRPVGSSDLFRELSVPLIKHPGMSLRLVYQDPMGNYFHSLMTTAPLTGAIGFIIVMLFLAVRWLQRQLAGQELLETRATRILNGERGSNVLGTIYEWPPRTSSALDTLLREIQNAREQHSRLDTLIRSYAAQDVKTGLNNRLFFDNQLATLLEDQEKVGTHGIVMMIRLPDFNMLSDTWGHSQVEEQFFTLTNLLSTFMMRYPGALLARYHRSDFAALLPHRTLKEAESIAGQLIKAVDTLPNNKMLDRDDMIHIGICAWRSGQDTEQVMEHAESATRNAGLQGGNSWAIYDDSLPEKGRGNVRWRTLIEQMLSRGGPRLYQKPAVTREGQVHHRELMCRIFDGNEEVSSAEYMPMVLQFGLSEEYDRLQISRLIPLLRYWPEENLAIQVTVESLIRPRFQRWLRDTLMQCEKSQRKRIIIELAEADVGQHISRLQPVIRLVNALGVRVAVNQAGLTLVSTSWIKELNVELLKLHPGLVRNIEKRTENQLLVQSLVEACSGTSTQVYATGVRSRSEWQTLIQRGVTGGQGDFFASSQPLDTNVKKYSQRYSV

SEQ ID NO: 43105 - protein, 301 aa, Escherichia coli
MNPAVDNEFQQWLSQINQVCGNFTGRLLTERYTGVLDTHFAKGLKLSTVTTSGVNLSRTWQEVKGSDDAWFYTVFQLSGQAIMEQDERQVQIGAGDITLLDASRPCSLYWQESSKQISLLLPRTLLEQYFPHQKPICAERLDADLPMVQLSHRLLQESMNNPALSETESEAALQAMVCLLRPVLHQRESVQPRRERQFQKVVTLIDDNIREEILRPEWIAGETGMSVRSLYRMFADKGLVVAQYIRNRRLDFCADAIRHAADDEKLAGIGFHWGFSDQSHFSTVFKQRFGMTPGEYRRKFR

SEQ ID NO: 43106 - protein, 233 aa, Escherichia coli
MKKCVIKIYIAPPEKINFLCYYVYLYLFQWNDNVNINYPAEYEIGDIVFTCIGAALFGQISAASNCWSNHVGIIIGHNGEDFLVAESRVPLSTITTLSRFIKRSSNQRYAIKRLDAGLTERQKQRIVEQVPSRLRKLYHTGFKYESSRQFCSKFVFDIYKEALCIPVGEIETFGELLNSNPNAKLTFWKFWFLGSIPWERKTVTPASLWHHPGLVLIHAEGVETPQPELTEAV

SEQ ID NO: 43107 - protein, 260 aa, Escherichia coli
MKKLVLSLSLVLAFSSATAAFAAIPQNIRIGTDPTYAPFESKNSQGELVGFDIDLAKELCKRINTQCTFVENPLDALIPSLKAKKIDAIMSSLSITEKRQQEIAFTDKLYAADSRLVVAKNSDIQPTVESLKGKRVGVLQGTTQETFGNEHWAPKGIEIVSYQGQDNIYSDLTAGRIDAAFQDEVAASEGFLKQPVGKDYKFGGPSVKDEKLFGVGTGMGLRKEDNELREALNKAFAEMRADGTYEKLAKKYFDFDVYGG

SEQ ID NO: 43108 - protein, 122 aa, Escherichia coli
MWLLDQWAERHIAEAQAKGEFDNLAGSGEPLILDDDSHVPPELRAGYRLLKNAGCLPPELEQRREAIQLLDILKGIRHDDPQYQEVSRRLSLLELKLRQAGLSTDFLRGDYADKLLDKINDN

SEQ ID NO: 43109 - protein, 577 aa, Escherichia coli
MNIQALLSEKVRQAMIAAGAPADCEPQVRQSAKVQFGDYQANGMMAVAKKLGMAPRQLAEQVLTHLDLNGIASKVEIAGPGFINIFLDPAFLAEHVQQALASDRLGVATPEKQTIVVDYSAPNVAKEMHVGHLRSTIIGDAAVRTLEFLGHKVIRANHVGDWGTQFGMLIAWLEKQQQENAGEMELADLEGFYRDAKKHYDEDEEFAERARNYVVKLQSGDEYFREMWRKLVDITMTQNQITYDRLNVTLTRDDVMGESLYNPMLPGIVADLKAKGLAVESEGATVVFLDEFKNKEGEPMGVIIQKKDGGYLYTTTDIACAKYRYETLHADRVLYYIDSRQHQHLMQAWAIVRKAGYVPESVPLEHHMFGMMLGKDGKPFKTRAGGTVKLADLLDEALERARRLVAEKNPDMPADELEKLANAVGIGAVKYADLSKNRTTDYIFDWDNMLAFEGNTAPYMQYAYTRVLSVFRKAEIDEEQLAAAPVIIREDREAQLAARLLQFEETLTVVAREGTPHVMCAYLYDLAGLFSGFYEHCPILSAENEEVRNSRLKLAQLTAKTLKLGLDTLGIETVERM

SEQ ID NO: 43110 - protein, 248 aa, Escherichia coli
MEQAHTQLIAQLNERILAADNTPLYIKFAETVKNAVRSGVLEHGNILPGERDLSQLTGVSRITVRKAMQALEEEGVVTRSRGYGTQINNIFEYSLKEARGFSQQVVLRGKKPDTLWVNKRVVKCPEEVAQQLAVEAGSDVFLLKRIRYVDEEAVSIEESWVPAHLIHDVDAIGISLYDYFRSQHIYPQRTRSRVSARMPDAEFQSHIQLDSKIPVLVIKQVALDQQQRPIEYSISHCRSDLYVFVCEE

SEQ ID NO: 43111 - protein, 275 aa, Escherichia coli
MKPMQLRITSRKKLTSLLCALGLISIVAIYPRQTVNFFYSTAVQITDYIHFYGYRPVKSFAIRIPASYTIHGIDVSRWQERIDWQRVAKMRDNGIRLQFAFIKATEGEKLVDPYFSRNWQLSRENGLLRGAYHYFSPSVSASVQARLFLQTVDFSQGDFPAVLDVEERGKLSAKELRKRVSQWLKMVEKSTGKKPIIYSGAVFYHTNLAGYFNEYPWWVAHYYQRRPDNDGMAWRFWQHSDRGQVDGINGPVDFNVFNGTVEELQAFVDGIKETP

SEQ ID NO: 43112 - protein, 202 aa, Escherichia coli
MKLVGSYTSPFVRKLSILLLEKGITFEFINELPYNADNGVAQFNPLGKVPVLVTEEGECWFDSPIIAEYIELMNVAPAMLPRDPLESLRVRKIEALADGIMDAGLVSVREQARPAAQQSEDELLRQREKINRSLDVLEGYLVDGTLKTDTVNLATIAIACAVGYLNFRRVAPGWCVDRPHLVKLVENLFSRESFARTEPPKA

SEQ ID NO: 43113 - protein, 278 aa, Escherichia coli
MQFCSSDEFASKTMIKWPWKVQESAHQTALPWQEALSIPLLTCLTEQEQSKLVTLAERFLQQKRLVPLQGFELDSLRSCRIALLFCLPVLELGLEWLDGFHEVLIYPAPFVVDDEWEDDIGLVHNQRIVQSGQSWQQGPIVLNWLDIQDSFDASGFNLIIHEVAHKLDTRNGDRASGVPFIPLREVAGWEHDLHAAMNNIQEEIELVGENAASIDAYAASDPAECFAVLSEYFFSAPELFAPRFPSLWQRFCQFYQQDPLQRLHHANDTDSFSATNVH

SEQ ID NO: 43114 - protein, 393 aa, Escherichia coli
MKWIVPSHSFVFHGTGERYFLICVVNVLLTIITLGIYLPWALMKCKRYLYANMEVNGQRFSYGITGGNVFVSCLFFVFFYFAILMTVSADMPLVGCVLTLLLLVLLIFMAAKGLRHQALMTSLNGVRFSFNCSMKGFWWVTFFLPILMAIGMGTVFFISTKMLPANSSSSVIISMVLMAIVGIVSIGIFNGTLYSLVMSFLWSNTSFGIHRFKVKLDTTYCIKYAILAFLALLPFLAVAGYIIFDQILNAYDSSVYANDDIENLQQFMEMQRKMIIAQLIYYFGIAVSTSYLTVSLRNHFMSNLSLNDGRIRFRLTLTYHGMLYRMCALVVISGITGGLAYPLLKIWMIDWQAKNTYLLGDLDDLPLINKEEQPDKGFLASISRGVMPSLPFL

SEQ ID NO: 43115 - protein, 235 aa, Escherichia coli
MSSFQFEQIGVIRSPYKEKFAVPRQPGLVKSANGELHLIAPYNQADAVRGLEAFSHLWILFVFHQTMEGGWRPTVRPPRLGGNARMGVFATRSTFRPNPIGMSLVELKEVVCHKDSVILKLGSLDLVDGTPVVDIKPYLPFAESLPDASASYAQSAPAAEMAVSFTAEVEKQLLTLEKRYPQLTLFIREVLAQDPRPAYRKGEETGKTYAVWLHDFNVRWRVTDAGFEVFALEPR

SEQ ID NO: 43116 - protein, 341 aa, Escherichia coli
MATIKDVAKRANVSTTTVSHVINKTRFVAEETRNAVWAAIKELHYSPSAVARSLKVNHTKSIGLLATSSEAAYFAEIIEAVEKNCFQKGYTLILGNAWNNLEKQRAYLSMMAQKRVDGLLVMCSEYPEPLLAMLEEYRHIPMVVMDWGEAKADFTDAVIDNAFEGGYMAGRYLIERGHREIGVIPGPLERNTGAGRLAGFMKAMEEAMIKVPESWIVQGDFEPESGYRAMQQILSQPHRPTAVFCGGDIMAMGALCAADEMGLRVPQDVSLIGYDNVRNARYFTPALTTIHQPKDSLGETAFNMLLDRIVNKREEPQSIEVHPRLIERRSVADGPFRDYRR

SEQ ID NO: 43117 - protein, 660 aa, Escherichia coli
MKTVVFAYHDMGCLGIEALLAAGYEISAIFTHTDNPGEKAFYGSVARLAAERGIPVYAPDNVNHPLWVERIAQLSPDVIFSFYYRHLIYDEILQLAPAGAFNLHGSLLPKYRGRAPLNWVLVNGETETGVTLHRMVKRADAGAIVAQLRIAIAPDDIAITLHHKLCHAARQLLEQTLPAIKHGNILEIAQRENEATCFGRRTPDDSFLEWHKPASVLHNMVRAVADPWPGAFSYVGNQKFTVWSSRVHPHASKAQPGSVISVAPLLIACGDGALEIVTGQAGDGITMQGSQLAQTLGLVQGSRLNSQPACTARRRTRVLILGVNGFIGNHLTERLLREDHYEVYGLDIGSDAISRFLNHPHFHFVEGDISIHSEWIEYHVKKCDVVLPLVAIATPIEYTRNPLRVFELDFEENLRIIRYCVKYRKRIIFPSTSEVYGMCSDKYFDEDHSNLIVGPVNKPRWIYSVSKQLLDRVIWAYGEKEGLQFTLFRPFNWMGPRLDNLNAARIGSSRAITQLILNLVEGSPIKLIDGGKQKRCFTDIRDGIEALYRIIENAGNRCDGEIINIGNPENEASIEELGEMLLASFEKHPLRHHFPPFAGFRVVESSSYYGKGYQDVEHRKPSIRNAHRCLDWEPKIDMQETIDETLDFFLRTVDLTDKPS

SEQ ID NO: 43118 - protein, 67 aa, Escherichia coli
MFGNLGQAKKYLGQAAKMLIGIPDYDNYVEHMKTNHPDKPYMSYEEFFRERQNARYGGDGKGGMRCC

SEQ ID NO: 43119 - protein, 319 aa, Escherichia coli
MGWDTETKMSTYEKETEVMKKFSGIIPPVSSTFHRDGTLDKKAMREVADFLINKGVDGLFYLGTGGEFSQMNTAQRMALAEEAVTIVDGRVPVLIGVGSPSTDEAVKLAQHAQAYGADGIVAINPYYWKVAPRNLDDYYQQIARSVTLPVILYNFPDLTGQDLTPETVTRLALQNENIVGIKDTIDSVGHLRTMINTVKSVRPSFSVFCGYDDHLLNTMLLGGDGAITASANFAPELSVGIYRAWREGDLATAATLNKKLLQLPAIYALETPFVSLIKYSMQCVGLPVETYCLPPILEASEEAKDKVHVLLTAQGILPV

SEQ ID NO: 43120 - protein, 671 aa, Escherichia coli
MAELTALHTLTAQMKREGIRRLLVLSGEEGWCFEHTLKLRDALPGDWLWISPRPDAENHCSPSALQTLLGREFRHAVFDARHGFDAAAFAALSGTLKAGSWLVLLLPVWEEWENQPDADSLRWSDCPDPIATPHFVQHLKRVLTADNEAILWRQNQPFSLAHFTPRTDWYPATGAPQPEQQQLLKQLMTMPPGVAAVTAARGRGKSALAGQLISRIAGRAIVTAPAKASTDVLAQFAGEKFRFIAPDALLASDEQADWLVVDEAAAIPAPLLHQLVSRFPRTLLTTTVQGYEGTGRGFLLKFCARFPHLHRFELQQPIRWAQGCPLEKMVSEALVFDDENFTHTPQGNIVISAFEQTLWQSDPETPLKVYQLLSGAHYRTSPLDLRRMMDAPGQHFLQAAGENEIAGALWLVDEGGLSQQLSQAVWAGFRRPRGNLVAQSLAAHGNNPLAATLRGRRVSRIAVHPARQREGTGRQLIAGALQYTQDLDYLSVSFGYTGELWRFWQRCGFVLVRMGNHREASSGCYTAMALLPMSDAGKQLAEREHYRLRRDAQALAQWNGETLPVDPLNDAVLSDDDWLELAGFAFAHRPLLTSLGCLLRLLQTSELALPALRGRLQKNASDAQLCTTLKLSGRKMLLVRQREEAAQALFALNDVRTERLRDRITQWQLFH

SEQ ID NO: 43121 - protein, 217 aa, Escherichia coli
MSEPMMWLLVRGVWETLAMTFVSGFFGFVIGLPVGVLLYVTRPGQIIANAKLYRTVSAIVNIFRSIPFIILLVWMIPFTRVIVGTSIGLQAAIVPLTVGAAPFIARMVENALLEIPTGLIEASRAMGATPMQIVRKVLLPEALPGLVNAATITLITLVGYSAMGGAVGAGGLGQIGYQYGYIGYNATVMNTVLVLLVILVYLIQFAGDRIVRAVTRK

SEQ ID NO: 43122 - protein, 401 aa, Escherichia coli
MLSPIRLSPLPALRQDNDFLYDQGAPMEQRHITGKSHWYHETQSSTTEYDVLPLVPEAAKVSDPFLLDVILEKETLAPFLSWLDPARVLAVDLFPDQLTVTRSQTFTAYERLSTALTVAQVCGVQRLCNYYSARLTPLPGPDSTRESNHRLAQITQYARQLASSPSIIDNRSRQHLNDVGLTAWDCVIISQIIGFIGFQARTIATFQAYLGHPVRWLPGLEIQNYADASLFADESLRWRSSYEVEKLPEEHTKSSTAELCQLAEILSLHPISLSLLEKLLNSTRGNTQPDNQLAALLCARINGSPACFATCMDSSNEYKKISTLMRKGENEINQWADRHSVERATVQAIQWLTRAPDRFSAAQFSPLLEHEKSSTQIINLLVWSGLCGWINRLKIALGETY

SEQ ID NO: 43123 - protein, 397 aa, Escherichia coli [sequence omitted]

SEQ ID NO: 43124 - protein, 453 aa, Escherichia coli
MMQTVLAKIVADKAIWVEARKQQQPLASFQNEVQPSTRHFYDALQGARTAFILECKKASPSKGVIRDDFDPARIAAIYKHYASAISVLTDEKYFQGSFNFLPIVSQIAPQPILCKDFIIDPYQIYLARYYQADACLLMLSVLDDDQYRQLAAVAHSLEMGVLTEVSNEEEQERAIALGAKVVGINNRDLRDLSIDLNRTRELAPKLGHNVTVISESGINTYAQVRELSHFANGFLIGSALMAHDDLHAAVRRVLLGENKVCGLTRGQDAKAAYDAGAIYGGLIFVATSPRCVNVEQAQEVMAAAPLQYVGVFRNHDIADVVDKAKVLSLAAVQLHGNEEQLYIDTLREALPAHVAIWKALSVGETLPAREFQHVDKYVLDNGQGGSGQRFDWSLLNGQSLGNVLLAGGLGADNCVEAAQTGCAGLDFNSAVESQPGIKDARLLASVFQTLRAY

SEQ ID NO: 43125 - protein, 590 aa, Escherichia coli
MRTEYCGQLRLSHVGQQVTLCGWVNRRRDLGSLIFIDMRDREGIVQVFFDPDRADALKLASELRNEFCIQVTGTVRARDEKNINRDMATGEIEVLASSLTIINRADVLPLDSNHVNTEEARLKYRYLDLRRPEMAQRLKTRAKITSLVRRFMDDHGFLDIETPMLTKATPEGARDYLVPSRVHKGKFYALPQSPQLFKQLLMMSGFDRYYQIVKCFRDEDLRADRQPEFTQIDVETSFMTAPQVREVMEALVRHLWLEVKGVDLGDFPVMTFAEAERRYGSDKPDLRNPMELTDVADLLKSVEFAVFAGPANDPKGRVAALRVPGGASLTRKQIDEYGNFVKIYGAKGLAYIKVNERAKGLEGINSPVAKFLNAEIIEDILDRTAAQDGDMIFFGADNKKIVADAMGALRLKVGKDLGLTDESKWAPLWVIDFPMFEDDGEGGLTAMHHPFTSPKDMTAAELKAAPENAVANAYDMVINGYEVGGGSVRIHNGDMQQTVFGILGINEEEQREKFGFLLDALKYGTPPHAGLAFGLDRLTMLLTGTDNIRDVIAFPKTTAAACLMTEAPSFANPTALAELSIQVVKKAENN

SEQ ID NO: 43126 - protein, 1569 aa, Escherichia coli
MNTIHLRCLFRMNPLVWCLWADVAAKLRSLKRYSVFTFQRMKFMNRTSPYYCRRSVLSLLISALIYAPPGMAAFTTNVIGVVNDETVDGNQKVDERGTTNNTHIINHGQQNVHGGVSNGSLIESGGYQDIGSHNNFVGQANNTTINGGRQSIHDGGISTGTTIESGNQDVYKGGISNGTTIKGGASRVEGGSANGILIDGGSQIVKVQGHADGTTINKSGSQDVVQGSLATNTTINGGRQYVEQSTVETTTIKNGGEQRVYESRALDTTIEGGTQSLNSKSTAKNTHIYSGGTQIVDNTSTSDVIEVYSGGVLDVRGGTATNVTQHDGAILKTNTNGTTVSGTNSEGAFSIHNHVADNVLLENGGHLDINAYGSANKTIIKDKGTMSVLTNAKADATRIDNGGVMDVAGNATNTIINGGTQNINNYGIATGTNINSGTQNIKSGGKADTTIISSGSRQVVEKDGTAIGSNISAGGSLIVYTGGIAHGVNQETGSALVANTGAGTDIEGYNKLSHFTITGGEANYVVLENTGELTVVAKTSAKNTTIDTGGKLIVQKEAKTDSTRLNNGGVLEVQDGGEAKHVEQQSGGALIASTTSGTLIEGTNSYGDAFYIRNSEAKNVVLENAGSLTVVTGSRAVDTIINANGKMDVYGKDVGTVLNSAGTQTIYASATSDKANIKGGKQTVYGLATEANIESGEQIVDGGSTEKTHINGGTQTVQNYGKAINTDIVSGLQQIMANGTAEGSIINGGSQVVNEGGLAENSVLNDGGTLDVREKGSATGIQQSSQGALVATTRATRVTGTRADGVAFSIEQGAANNILLANGGVLTVESDTSSDKTQVNMGGREIVKTKATATGTTLTGGEQIVEGVANETTINDGGIQTVSANGEAIKTKINEGGTLTVNDNGKATDIVQNSGAALQTSTANGIEISGTHQYGTFSISGNLATNMLLENGGNLLVLAGTEARDSTVGKGGAMQNLGQDSATKVNSGGQYTLGRSKDEFQALARAEDLQVAGGTAIVYAGTLADASVSGATGSLSLMTPRDNVTPVKLEGAVRITDSATLTLGNGVDTTLADLTAASRGSVWLNSNNSCAGTSNCEYRVNSLLLNDGDVYLSAQTAAPATTNGIYNTLTTNELSGSGNFYLHTNVAGSRGDQLVVNNNATGNFKIFVQDTGVSPQSDDAMTLVKTGGGDASFTLGNTGGFVDLGTYEYVLKSDGNSNWNLTNDVKPNPDPIPNPKPDPKPDPKPDPNPKPDPTPDPTPTPVPEKRITPSTAAVLNMAATLPLVFDAELNSIRERLNIMKASPHNNNVWGATYNTRNNVTTDAGAGFEQTLTGMTVGIDSRNDIPEGITTLGAFMGYSHSHIGFDRGGHGSVGSYSLGGYASWEHESGFYLDGVVKLNRFKSNVAGKMSSGGAANGSYHSNGLGGHIETGMRFTDGNWNLTPYASLTGFTADNPEYHLSNGMKSKSVDTRSIYRELGATLSYNMRLGNGMEVEPWLKAAVRKEFVDDNRVKVNSDGNFVNYLSGRRGIYQAGIKASFSSTLSGHLGVGYSHSAGVESPWNAVAGVNWSF

SEQ ID NO: 43127 - protein, 399 aa, Escherichia coli
MYQPVALFIGLRYMRGRAADRFGRFVSWLSTIGITLGVMALVTVLSVMNGFERELQNNILGLMPQAILSSEHGSLNPQQLPETAVKLDGVNRVAPITTGDVVLQSARSVAVGVMLGIDPAQKDPLTPYLVNVKQTDLEPGKYNVILGEQLASQLGVNRGDQIRVMVPSASQFTPMGRIPSQRLFNVIGTFAANSEVDGYEMLVNIEDASRLMRYPAGNITGWRLWLDEPLKVDSLSQQKLPEGSKWQDWRDRKGELFQAVRMEKNMMGLLLSLIVAVAAFNIITSLGLMVMEKQGEVAILQTQGLTPRQIMMVFMVQGASAGIIGAILGAALGALLASQLNNLMPIIGVLLDGAALPVAIEPLQVIVIALVAMAIALLSTLYPSWRAAATQPAEALRYE

SEQ ID NO: 43128 - protein, 149 aa, Escherichia coli
MGLFNFVKDAGEKLWDAVTGQHDKDDQAKKVQEHLNKTGIPDADKVNIQIADGKATVTGDGLSQEAKEKILVAVGNISGIASVDDQVKTATPATASQFYTVKSGDTLSAISKQVYGNANLYNKIFEANKPMLKSPDKIYPGQVLRIPEE

SEQ ID NO: 43129 - protein, 231 aa, Escherichia coli
MSIAVTTTDPTNTGVSTTSSSSLTGSNAADLQSSFLTLLVAQLKNQDPTNPMENNELTSQLAQISTVSGIEKLNTTLGSISGQIDNSQSLQASNLIGHGVMIPGTTVLAGTGSEEGAVTTTTPFGVELQQAADKVTATITDKNGAVVRTIDIGELTAGVHSFTWDGTLTDGSTAPNGSYNVAISASNGGTQLVAQPLQFALVQGVIRGNSGNTLDLGTYGTTTLDEVRQII

SEQ ID NO: 43130 - protein, 288 aa, Escherichia coli
MMNNSEGLKSFQQSLADLPQWVSERLLQQINQLTNYEPVIGIMGKTGVGKSSLCNALFAGDISPVSDVAACTREPLRFRLQVGDRYITLMDLPGVGESGARDTEYAALYREQLPRLDLVLWLIKADDRALTVDEHFYHQVIGEVYRHKVLFVISQSDKAEPTSGGGQLSTAQKQNISRKICLLHELFQPVHPVCAVSVRLQWGLKVMAERMIKCLPREATSPVVSQLHPSFRTTVVREQARSDFGETVGAVLDSISAFPLIPAPVRAVIQAVRTTVVSVARAVWDFFF

SEQ ID NO: 43131 - protein, 306 aa, Escherichia coli
MEYKIHSRVSHIACCRHYFIARKDMNGLLRIRQRYQGLAQSDKKLADYLLLQPDTARHLSSQQLANEAGVSQSSVVKFAQKLGYKGFPALKLALSEALASQPESPSVPIHNQIRGDDPLRLVGEKLIKENTAAMYATLNVNSEEKLHECVTMLRSARRIILTGIGASGLVAQNFAWKLMKIGFNAAAVRDMHALLATVQASSPDDLLLAISYTGVRRELNLAADEMLRVGGKVLAITGFTPNALQQRASHCLYTIAEEQATNSASISACHAQGMLTDLLFIALIQQDLELAPERIRHSEALVKKLV

SEQ ID NO: 43132 - protein, 337 aa, Escherichia coli
MSEGWNIAVLGATGAVGEALLETLAERQFPVGEIYALARNESAGEQLRFGGKTITVQDAAEFDWTQAQLAFFVAGKEATAAWVEEATNSGCLVIDSSGLFALEPDVPLVVPEVNPFVLTDYRNRNVIAVPDSLTSQLLAALKPLIDQGGLSRISVTSLISASAQGKKAVDALAGQSAKLLNGIPIDEEDFFGRQLAFNMLPLLPDSEGSVREERRIVDEVRKILQDEGLMISASVVQAPVFYGHAQMVNFEALRPLAAEEARDAFVQGEDIVLSEENEFPTQVGDASGTPHLSVGCVRNDYGMPEQVQFWSVADNVRFGGALMAVKIAEKLVQEYLY

SEQ ID NO: 43133 - protein, 378 aa, Escherichia coli
MKILVDENMPYARDLFSRLGEVTAVPGRPIPVAQLADADALMVRSVTKVNESLLAGKPIKFVGTATAGTDHVDEAWLKQAGIGFSAAPGCNAIAVVEYVFSSLLMLAERDGFSLYDRTVGIVGVGNVGRRLQARLEALGIKTLLCDPPRADRGDEGDFRSLDELVQRADILTFHTPLFKDGPYKTLHLADEKLIRSLKPGAILINACRGAVVDNTALLTCLNEGQKLSVVLDVWEGEPELNVELLKKVDIGTSHIAGYTLEGKARGTTQVFEAYSKFIGHEQHVALDTLLPAPEFGRITLHGPLDQPTLKRLVHLVYDVRRDDAPLRKVAGIPGEFDKLRKNYLERREWSSLYVICDDASAASLLCKLGFNAVHHPAR

SEQ ID NO: 43134 - protein, 492 aa, Escherichia coli
MTLWINGDWITGQGASRVKRNPVSGEVLWQGNDADAAQVEQACRAARAAFPRWARLSFAERHAVVERFAALLESNKAELTAIIARETGKPRWEAATEVTAMINKIAISIKAYHVRTGEQRSEMPDGAASLRHRPHGVLAVFGPYNFPGHLPNGHIVPALLAGNTIIFKPSELTPWSGEAVMRLWQQAGLPPGVLNLVQGGRETGQALSALEDLDGLLFTGSANTGYQLHRQLSGQPEKILALEMGGNNPLIIDEVADIDAAVHLTIQSAFVTAGQRCTCARRLLLKSGAQGDAFLARLVAVSQRLTPGNWDDEPQPFIGGLISEQAAQQVVTAWQQLEAMGGRPLLAPRLLQAGTSLLTPGIIEMTGVAGVPDEEVFGPLLRVWRYDTFDEAIRMANNTRFGLSCGLVSPEREKFDQLLLEARAGIVNWNKPLTGAASTAPFGGIGASGNHRPSAWYAADYCAWPMASLESDSLTLPATLNPGLDFSDEVVR

SEQ ID NO: 43135 - protein, 619 aa, Escherichia coli
MSKGTTSQDAPFGTLLGYAPGGVAIYSSDYSSLDPQEYEDDAVFRSYIDDEYMGHKWQCVEFARRFLFLNYGVVFTDVGMAWEIFSLRFLREVVNDNILPLQAFPNGSPRAPVAGALLIWDKGGEFKDTGHVAIITQLHGNKVRIAEQNVIHSPLPQGQQWTRELEMVVENGCYTLKDTFDDTTILGWMIQTEDTEYSLPQPEIAGELLKISGARLENKGQFDGKWLDEKDPLQNAYVQANGQVINQDPYHYYTITESAEQELIKATNELHLMYLHATDKVLKDDNLLALFDIPKILWPRLRLSWQRRRHHMITGRMDFCMDERGLKVYEYNADSASCHTEAGLILERWAEQGYKGNGFNPAEGLINELAGAWKHSRARPFVHIMQDKDIEENYHAQFMEQALHQAGFETRILRGLDELGWDAAGQLIDGEGRLVNCVWKTWAWETAFDQIREVSDREFAAVPIRTGHPQNEVRLIDVLLRPEVLVFEPLWTVIPGNKAILPILWSLFPHHRYLLDTDFTVNDELVKTGYAVKPIAGRCGSNIDLVSHHEEVLDKTSGKFAEQKNIYQQLWCLPKVDGKYIQVCTFTVGGNYGGTCLRGDESLVIKKESDIEPLIVVKK

SEQ ID NO: 43136 - protein, 460 aa, Escherichia coli
MEKKLGLSALTALVLSSMLGAGVFSLPQNMAAVASPAALLIGWGITGAGILLLAFAMLILTRIRPELDGGIFTYAREGFGELIGFCSAWGYWLCAVIANVSYLVIVFSALSFFTDTPELRLFGDGNTWQSIVGASALLWIVHFLILRGVQTAASINLVATLAKLLPLGLFVVLAMMMFKLDTFKLDFTGLALGVPVWEQVKNTMLITLWVFIGVEGAVVVSARARNKRDVGKATLLAVLSALGVYLLVTLLSLGVVARPELAEIRNPSMAGLMVEMMGPWGEIIIAAGLIVSVCGAYLSWTIMAAEVPFLAATHKAFPRIFARQNAQAAPSASLWLTNICVQICLVLIWLTGSDYNTLLTIASEMILVPYFLVGAFLLKIATRPLHKAVGVGACIYGLWLLYASGPMHLLLSVVLYAPGLLVFLYARKTHTHDNVLNRQEMVLIGMLLIASVPATWMLVG

SEQ ID NO: 43137 - protein, 108 aa, Escherichia coli
MPKPGILKSKSMFCVIYRSSKRDQTYLYVEKKDDFSRVPEELMKGFGQPQLAMILPLDGRKKLVNADIEKVKQALTEQGYYLQLPPPPEDLLKQHLSVMGQKTDDTNK

SEQ ID NO: 43138 - protein, 219 aa, Escherichia coli
MYQHHNWQGALLDYPVSKVVCVGSNYAKHIKEMGSAVPEEPVLFIKPETALCDLRQPLAIPSDFGSVHHEVELAVLIGATLRQATEEHVRKAIAGYGVALDLTLRDVQGKMKKAGQPWEKAKAFDNSCPLSGFIPAAEFTGDPQNTTLSLSVNGEQRQQGTTADMIHKIVPLIAYMSKFFTLKAGDVVLTGTPDGVGPLQSGDELTVTFDGHSLTTRVL

SEQ ID NO: 43139 - protein, 330 aa, Escherichia coli
MKIKNILLTLCTSLLLTNVAAHAKEVKIGMAIDDLRLERWQKDRDIFVKKAESLGAKVFVQSANGNEETQMSQIENMINRGVDVLVIIPYNGQVLSNVVKEAKQEGIKVLAYDRMINDADIDFYISFDNEKVGELQAKALVDIVPQGNYFLMGGSPVDNNAKLFRAGQMKVLKPYVDSGKIKVVGDQWVDGWLPENALKIMENALTANNNKIDAVVASNDATAGGAIQALSAQGLSGKVAISGQDADLAGIKRIAAGTQTMTVYKPITLLANTAAEIAVELGNGQEPKADTTLNNGLKDVPSRLLTPIDVNKNNIKDTVIKDGFHKESEL

SEQ ID NO: 43140 - protein, 199 aa, Escherichia coli
MLSLLLPSTIRLIATRKGRPMNTNVFRLLLLGSLFSLSACVQQSEVRQMKHSVSTLNQEMTQLNQETVKITQQNRLNAKSSSGVYLLPGAKTPARLESQIGTLRMSLVNITPDADGTTLTLRIQGESNDPLPAFSGTVEYGQIQGTIDNFQEINVQNQLINAPASVLAPSDVDIPLQLKGISVDQLGFVRIHDIQPVMQ

SEQ ID NO: 43141 - protein, 373 aa, Escherichia coli
MRFVDEYRAPEQVMQLIEHLRERASHLSYTAERPLRIMEVCGGHTHAIFKFGLDQLLPENVEFIHGPGCPVCVLPMGRIDTCVEIASHPEVIFCTFGDAMRVPGKQGSLLQAKARGADVRIVYSPMDALKLAQENPTRKVVFFGLGFETTMPTTAITLQQAKARDVQNFYFFCQHITLIPTLRSLLEQPDNGIDAFLAPGHVSMVIGTDAYNFIASDFHRPLVVAGFEPLDLLQGVVMLVQQKIAAHSKVENQYRRVVPDAGNLLAQQAIADVFCVNGDSEWRGLGVIESSGVHLTPDYQRFDAEAHFRPAPQQVCDDPRARCGEVLTGKCKPHQCPLFGNTCNPQTAFGALMVSSEGACAAWYQYRQQESEA

SEQ ID NO: 43142 - protein, 388 aa, Escherichia coli
MKITISGTGYVGLSNGLLIAQNHEVVALDILPSRVAMLNDRISPIVDKEIQQFLQSDKIHFNATLDKNEAYRDADYVIIATPTDYDPKTNYFNTSSVESVIKDVVEINPYAVMVIKSTVPVGFTAAMHKKYRTENIIFSPEFLREGKALYDNLHPSRIVIGERSERAERFAALLQEGAIKQNIPMLFTDSTEAEAIKLFANTYLAMRVAYFNELDSYAESLGLNSRQIIEGVCLDPRIGNHYNNPSFGYGGYCLPKDTKQLLANYQSVPNNLISAIVDANRTRKDFIADAILSRKPQVVGIYRLIMKSGSDNFRASSIQGIMKRIKAKGVEVIIYEPVMKEDSFFNSRLERDLATFKQQADVIISNRMAEELKDVADKVYTRDLFGSD

SEQ ID NO: 43143 - protein, 1049 aa, Escherichia coli [sequence omitted]

SEQ ID NO: 43144 - protein, 852 aa, Escherichia coli
MQRKTLLSACIALALSGQGWAADITEVETTTGEKKNTNVTCPADPGKLSPEELKRLPSECSPLVEQNLMPWLSTGAAALITALAVVELNDDDDHHHRNNSPLPPTPPDDESDDTPVPPTPGGDEIIPDDPDDTPTPPKPVSFNNDVILDKTEKTLTIRDSVFTYTENADGTISLQDSNGRKATINLWQIDEANNTVALEGVSADGATKWQYNHNGELVITGDNATVNNNGKTTVDGKDSTGTEINGNNGKVIQDGDLDVSGGGHGIDITGDSATVDNKGTMTVTDPESMGIQIDGDKAIVNNEGESTITNGGTGTQINGDDATANNNGKTTVDGKDSTGTEINGNNGKVIQDGDLDVSGGGHGIDITGDSATVDNKGTMTVTDPESIGIQVDGDQAVVNNEGESAITNGGTGTQINGDDATANNNGKTTVDGKDSTGTEIAGNNGKVIQDGDLDVSGGGHGIDITGDSATVDNKGTMTVTDPESIGIQIDGDQAIVNNEGESTITNGGTGTQINGNDATANNSGKTTVDGKDSTGTKIAGNIGIVNLDGSLTVTGGAHGVENIGDNGTVNNKGDIVVSDTGSIGVLINGEGATVSNTGDVNVSNEATGFSITTNSGKVSLAGSMQVGDFSTGVDLNGNNNSVTLAAKDLKVVGQKATGINVSGDANTVNITGNVLVDKDKTADNAAEYFFDPSVGINVYGSDNNVTLDGKLTVVSDSEVTSRQSNLFDGSAEKTSGLVVIGDGNTVNMNGGLELIGEKNALADGSQVTSLRTGYSYTSVIVVSGESSVYLNGDTTISGEFPLGFAGVIRVQDKALLEIGSGATLTMQDIDSFEHHGTRTLDLPLYFQTSVIT

SEQ ID NO: 43145 - protein, 78 aa, Escherichia coli
MSTIEERVKKIIGEQLGVKQEEVTNNASFVEDLGADSLDTVELVMALEEEFDTEIPDEEAEKITTVQAAIDYINGHQA

SEQ ID NO: 43146 - protein, 194 aa, Escherichia coli
MNKVTKTAIAGLLALFAGNAAATDGEIVFDGEILKSACEINDSDKKIEVALGHYNAEQFRNIGERSPKIPFTIPLVNCPMTGWEHDNGNVEASFRLWLETRDNGTVPNFPNLAKVGSFAGIAATGVGIRIDDAESGNIMPLNAMGNDNTVYQIPAESNGIVNVDLIAYYVSTVVPSEITPGEADAIVNVTLDYR

SEQ ID NO: 43147 - protein, 231 aa, Escherichia coli
MSKRTFAVILTLLCSFCIGQALAGGIVLQRTRVIYDASRKEAALPVANKGAETPYLLQSWVDNIDGKSRAPFIITPPLFRLEAGDDSSLRIIKTADNLPENKESLFYINVRAIPAKKKSDDVNANELTLVFKTRIKMFYRPAHLKGRVNDAWKSLEFKRSDHSLNIYNPTEYYVVFAGLAVDKTDLTSKIEYIAPGEHKQLPLPASGGKNVKWAAINDYGGSSGTETRPLQ

SEQ ID NO: 43148 - protein, 360 aa, Escherichia coli
MKPSIVAKLEALHERHEEVQALLGDAQTIADQERFRALSREYAQLSDVSRCFTDWQQVQEDIETAQMMLDDPEMREMAQDELREAKEKSEQLEQQLQVLLLPKDPDDERNAFLEVRAGTGGDEAALFAGDLFRMYSRYAEARRWRVEIMSASEGEHGGYKEIIAKISGDGVYGRLKFESGGHRVQRVPATESQGRIHTSACTVAVMPELPDAELPDINPADLRIDTFRSSGAGGQHVNTTDSAIRITHLPTGIVVECQDERSQHKNKAKALSVLGARIHAAEMAKRQQAEASTRRNLLGSGDRSDRNRTYNFPQGRVTDHRINLTLYRLDEVMEGKLDMLIEPIIQEHQADQLAALSEQE

SEQ ID NO: 43149 - protein, 151 aa, Escherichia coli
MSTPDNRSVNFFSLFRRGQHYSKTWPLEKRLAPVFVENRVIKMTRYAIRFMPPIAVFTLCWQIALGGQLGPAVATALFALSLPMQGLWWLGKRSVTPLPPAILNWFYEVRGKLQESGQVLAPVEGKPDYQALADTLKRAFKQLDKTFLDDL

SEQ ID NO: 43150 - protein, 765 aa, Escherichia coli
MKWLCSVGIAVSLALQPALADDLFGNHPLTPEARDAFVTELLKKMTVDEKIGQLRLISVGPDNPKEAIREMIKDGQVGAIFNTVTRQDIRAMQDQVMELSRLKIPLFFAYDVLHGQRTVFPISLGLASSFNLDAVKTVGRVSAYEAADDGLNMTWAPMVDVSRDPRWGRASEGFGEDTYLTSTMGKTMVEAMQGKSPADRYSVMTSVKHFAAYGAVEGGKEYNTVDMSPQRLFNDYMPPYKAGLDAGSGAVMVALNSLNGTPATSDSWLLKDVLRDQWGFKGITVSDHGAIKELIKHGTAADPEDAVRVALKSGINMSMSDEYYSKYLPGLIKSGKVTMAELDDAARHVLNVKYDMGLFNDPYSHLGPKESDPVDTNAESRLHRKEAREVARESLVLLKNRLETLPLKKSATIAVVGPLADSKRDVMGSWSAAGVADQSVTVLTGIKNAVGENGKVLYAKGANVTSDKGIIDFLNQYEEAVKVDPRSPQEMIDEAVQTAKQSDVVVAVVGEAQGMAHEASSRTDITIPQSQRDLIAALKATGKPLVLVLMNGRPLALVKEDQQADAILETWFAGTEGGNAIADVLFGDYNPSGKLPMSFPRSVGQIPVYYSHLNTGRPYNADKPNKYTSRYFDEANGALYPFGYGLSYTTFTVSDVKLSAPTMKRDGKVTASVQVTNTGKREGATVVQMYLQDVTASMSRPVKQLKGFEKITLKPGETQTVSFPIDIEALKFWNQQMKYDAEPGKFNVFIGTDSARVKKGEFELL

SEQ ID NO: 43151 - protein, 164 aa, Escherichia coli
MKTNRSLVVIVSLITATLLLTACAQPEQSSLAGDWLLTPKDKTRGLTGSIAVNIAPFRCKTNCRGDNLPDNTRRWQLSGGNEKELTYLHNMSAQEKVGLNPGWQCYTSFFMRVCQGKPGTRPIVNEDYVSESGFFGSMMHVGIIELRRCQSENCQQELKAINTH

SEQ ID NO: 43152 - protein, 370 aa, Escherichia coli
MVNVRQPRDVAQILLSVLFLAIMIVACLWIVQPFILGFAWAGTVVIATWPVLLRLQKIMFGRRSLAVLVMTLLLVMVFIIPIALLVNSIVDGSGPLIKAISSGDMTLPDLAWLNTIPVIGAKLYAGWHNLLDMGGTAIMAKVRPYIGTTTTWFVGQAAHIGRFMVHCALMLLFSALLYWRGEQVAQGIRHFATRLAGVRGDAAVLLAAQAIRAVALGVVVTALVQAVLGGIGLAVSGVPYATLLTVLMILSCLVQLGPLPVLIPAIIWLYWTGDTTWGTVLLVWSGVVGTLDNVIRPMLIRMGADLPLILILSGVIGGLIAFGMIGLFIGPVLLAVSWRLFAAWVEEVPPPTDQPEEILEELGEIEKPNK

SEQ ID NO: 43153 - protein, 167 aa, Escherichia coli [sequence omitted]

SEQ ID NO: 43154 - protein, 480 aa, Escherichia coli
MVSKPFQRPFSLATRLTFFISLATIAAFFAFAWIMIHSVKVHFAEQDINDLKEISATLERVLNHPDETQARRLMTLEDIVSGYSNVLISLADSQGKTVYHSPGAPDIREFTRDAIPDKDAQGGEVYLLSGPTMMMPGHGHGHMEHSNWRMINLPVGPLVDGKPIYTLYIALSIDFHLHYINDLMNKLIMTASVISILIVFIVLLAVHKGHAPIRSVSRQIQNITSKDLDVRLDPQTVPIELEQLVLSFNHMIERIEDVFTRQSNFSADIAHEIRTPITNLITQTEIALSQSRSQKELEDVLYSNLEELTRMAKMVSDMLFLAQADNNQLIPEKKMLNLADEVGKVFDFFEALAEDRGVELRFVGDKCQVAGDPLMLRRALSNLLSNALRYTPTGETIVVRCQTVDHLVQVIVENPGTPIAPEHLPRLFDRFYRVDPSRQRKGEGSGIGLAIVKSIVVAHKGTVAVTSDARGTRFVITLPA

SEQ ID NO: 43155 - protein, 296 aa, Escherichia coli
MRKFIFVLLTLLLVSPFSFAMKGIIWQPQNRDSQVTDTQWQGLMSQLRLQGFDTLVLQWTRYGDAFTQPEQRTLLFKRAAAAQQAGLKLIVGLNADPEFFMHQKQSSAALESYLNRLLAADLQQARLWSAAPGITPDGWYISAEIDDLNWRSEAARQPLLTWLNNAQRLISDVSAKPVYISSFFAGNMSPDGYRQLLEHVKATGVNVWVQDGSGVDKLTAEQRERYLQASADCQSPAPASGVVYELFVAGKGKTFTAKPKPDAEIASLLAKRSSCGKDTLYFSLRYLPVAHGILEY

SEQ ID NO: 43156 - protein, 651 aa, Escherichia coli
MAMVAAVVLVFVFIFCTVLLFHLVQQNRYNTATQLESIARSVREPLSSAILKGDIPEAEAILASIKPAGVVSRADVVLPNQFQALRKSFIPERPVPVMVTRLFELPVQISLGVYSLERPANPQPIAYLVLQADSFRMYKFVMSTLSTLVTIYLLLSLILTVAISWCINRLILHPLRNIARELNAIPAKELVGHQLALPRLHQDDEIGMLVRSYNLNQQLLQRHYEEQNENAMRFPVSDLPNKALLMEMLEQVVARKQTTALMIITCETLRDTAGVLKEAQREILLLTLVEKLKSVLSPRMILAQISGYDFAVIANGVQEPWHAITLGQQVLTIMSERLPIERIQLRPHCSIGVAMFYGDLTAEQLYSRAISAAFTARHKGKNQIQFFDPQQMEAAQKRLTEESDILNALENHQFAIWLQPQVEMTSGKLVSAEVLLRIQQPDGSWDLPDGLIDRIECCGLMVTVGHWVLEESCRLLAAWQERGIMLPLSVNLSALQLMHPNMVADMLELLTRYRIQPGTLILEVTESRRIDDPHAAVAILRPLRNAGVRVALDDFGMGYAGLRQLQHMKSLPIDVLKIDKMFVEGLPGDSSMIAAIIMLAQSLNLQMIAEGVETEAQRDWLAKAGVGIAQGFLFARPLPIEIFEESYLEEK

SEQ ID NO: 43157 - protein, 227 aa, Escherichia coli
MTAIAPVITIDGPSGAGKGTLCKAMAEALQWHLLDSGAIYRVLALAALHHHVDVASEDALVPLASHLDVRFVSTNGNLEVILEGEDVSGEIRTQEVANAASQVAAFPRVREALLRRQRAFRELPGLIADGRDMGTVVFPDAPVKIFLDASSEERAHRRMLQLQEKGFSVNFERLLAEIKERDDRDRNRAVAPLVPAADALVLDSTTLSIEQVIEKALQYARQKLALA

SEQ ID NO: 43158 - protein, 423 aa, Escherichia coli
MQHNTLSKHNQKLPFTRYDFGWVLLCIGMAIGAGTVLMPVQIGLKGIWVFITAAIIAYPATWVVQDIYLKTLSESDSCNDYTDIISHYLGKNWGIFLGVIYFLMIIHGIFIYSLSVVFDSASYLKTFGLTDADLSQSLLYKVAIFAVLVAIASGGERLLFKISGPMVVVKVGIIVVFGFAMIPHWNFANITAFPQASVFFRDVLLTIPFCFFSAVFIQVLNPMNIAYRKREADKVLATRLALRTHRISYITLIAVILFFAFSFTFSISHEEAVSAFEQNISALALAAQVIPGHIIHITSTVLNIFAVLTAFFGIYLGFHEAIKGIILNLLSRIIDTKKINSRVLTLAICAFIVITLTIWVSFRVSVLVFFQLGSPLYGIVSCLIPFFLIYKVAQLEKLRGFKAWLILLYGILLCLSPLLKLIE

SEQ ID NO: 43159 - protein, 418 aa, Escherichia coli
MTLLALGINHKTAPVSLRERVSFSPDKLDQALDSLLAQPMVQGGVVLSTCNRTELYLSVEEQDNLQEALIRWLCDYHNLNEEDLRKSLYWHQDNDAVSHLMRVASGLDSLVLGEPQILGQVKKAFADSQKGHMKASELERMFQKSFSVAKRVRTETDIGASAVSVAFAACTLARQIFESLSTVTVLLVGAGETIELVARHLREHKVQKMIIANRTRERAQILADEVGAEVIALSDIDERLREADIIISSTASPLPIIGKGMVERALKSRRNQPMLLVDIAVPRDVEPEVGKLANAYLYSVDDLQSIISHNLAQRKAAAVEAETIVAQETSEFMAWLRAQSASETIREYRSQAEQVRDELTAKALAALEQGGDAQAIMQDLAWKLTNRLIHAPTKSLQQAARDGDNERLNILRDSLGLE

SEQ ID NO: 43160 - protein, 585 aa, Escherichia coli
MENSRIPGEHFFTTSDNTALFYRHWPALQPGAKKVIVLFHRGHEHSGRLQHLVDELAMPDTAFYAWDARGHGKSSGPRGYSPSLARSVRDVDEFVRFAASDSQVGLEEVVVIAQSVGAVLVATWIHDYAPAIRGLVLASPAFKVKLYVPLARPALALWHRLRGLFFINSYVKGRYLTHDRQRGASFNNDPLITRAIAVNILLDLYKTSERIIRDAAAITLPTQLLISGDDYVVHRQPQIDFYQRLRSPLKELHLLPGFYHDTLGEENRALAFEKMQSFISRLYANKSQKFDYQHEDCTGPSADRWRLLSGGPVPLSPVDLAYRFMRKAMKLFGTHSSGLHLGMSTGFDSGSSLDYVYQNQPQGSNAFGRLVDKIYLNSVGWRGIRQRKTHLQILIKQAVADLHAKGLAVRVVDIAAGHGRYVLDALANEPAVSDILLRDYSELNVAQGQEMIAQRGMSGRVRFEQGDAFNPEELSALTPRPTLAIVSGLYELFPENEQVKNSLAGLANAIEPGGILIYTGQPWHPQLEMIAGVLTSHKDGKPWVMRVRSQGEMDSLVRDAGFDKCTQRIDEWGIFTVSMAVRRDN

SEQ ID NO: 43161 - protein, 327 aa, Escherichia coli
MLKKCLPLLLLCTAPVFAKPVLTVYTYDSFAADWGPGPVVKKAFEADCNCELKLVALEDGVSLLNRLRMEGKNSKADVVLGLDNNLLDAASKTGLFAKSGVAADAVNVPGGWNNDTFVPFDYGYFAFVYDKNKLKNPPQSLKELVESDQNWRVIYQDPRTSTPGLGLLLWMQKVYGDDAPQAWQKLAKKTVTVTKGWSEAYGLFLKGESDLVLSYTTSPAYHILEEKKDNYAAANFSEGHYLQVEVAARTAASKQPELAQKFLQFMVSPAFQNAIPTGNWMYPVANVTLPAGFEKLTKPATTLEFTPAEVAAQRQAWISEWQRAVSR

SEQ ID NO: 43162 - protein, 551 aa, Escherichia coli
MPSARLQQQFIRLWQCCEGKSQDTTLNELAALLSCSRRHMRTLLNTMQDRGWLTWEAEVGRGKRSRLTFLYTGLALQQQRAEDLLEQDRIDQLVQLVGDKATVRQMLVSHLGRSFRQGRHILRVLYYRPLRNLLPGSALRRSETHIARQIFSSLTRINEENGELEADIAHHWQQISPLHWRFFLRPGVHFHHGRELEMDDVIASLKRINTLPLYSHIADIVSPTPWTLDIHLTQPDRWLPLLLGQVPAMILPREWETLSNFASHPIGTGPYAVIRNSTNQLKIQAFDDFFGYRALIDEVNVWVLPEIADEPAGGLMLKGPQGEEKEIESRLEEGCYYLLFDSRTHRGANQQVRDWVSYVLSPTNLVYFAEEQYQQLWFPAYGLLPRWHHARTIKSEKPAGLESLTLTFYQDHSEHRVIAGIMQQILASHQVTLKIKEIDYDQWHTGEIESDIWLNSANFTLPLDFSVFAHLCEVPLLQHCIPIDWQADAARWRNGEMNLANWCQQLVASKAMVPLLHHWLIIQGQRSMRGLRMNTLGWFDFKSAWFAPPDP

SEQ ID NO: 43163 - protein, 120 aa, Escherichia coli
MYYGALSIRAEAWLIVSPEVTKIMAKEQTDRTTLDLFAHERRPGRPKTNPLSRDEQLRINKRNQLKRDKVRGLKRVELKLNAEAVEALNELAESRNMSRSELIEEMLMQQLAALRSQGIV

SEQ ID NO: 43164 - protein, 254 aa, Escherichia coli
MKLNIRAQTAQNQHNNSPIVLVHGLFGSLDNLGVLARDLVNDHNIIQVDMRNHGLSPRDPVMNYPAMAQDLVDTLDAQQIDKATFIGHSMGGKAVMALTALASDRIDKLVAIDIAPVDYHVRRHDEIFAAINAVSESDAQTRQQAAAIMRQHLNEEGVIQFLLKSFVDGEWRFNVPVLWDQYPHIVGWEKIPAWDHPALFIPGGNSPYVSEQYRDDLLAQFPQARAHVIAGAGHWVHAEKPDAVLRAIRRYLND

SEQ ID NO: 43165 - protein, 371 aa, Escherichia coli
MASVQLQNVTKAWGEVVVSKDINLDIHEGEFVVFVGPSGCGKSTLLRMIAGLETITSGDLFIGEKRMNDTPPAERGVGMVFQSYALYPHLSVAENMSFGLKLAGAKKEVINQRVNQVAEVLQLAHLLDRKPKALSGGQRQRVAIGRTLVAEPSVFLLDEPLSNLDAALRVQMRIEISRLHKRLGRTMIYVTHDQVEAMTLADKIVVLDAGRVAQVGKPLELYHYPADRFVAGFIGSPKMNFLPVKVTATAIDQVQVELPMPNRQQVWLPVESRDVQVGANMSLGIRPEHLLPSDIADVILEGEVQVVEQLGNETQIHIQIPSIRQNLVYRQNDVVLVEEGATFAIGLPPERCHLFREDGTACRRLHKEPGV

SEQ ID NO: 43166 - protein, 158 aa, Escherichia coli
MKQLSFLPGEMTPQDRRLIQRALRALDRHLHEPGVAFTSTHAVREWLRLHMAALEREEFRVLYLDNQNQLIAHETLFTGTINRTEVHPREVVKRALHFNAAAVILAHNHPSGETTPSQADKTLTQRLVQVLQLVDIRVPDHLIVGGRQIYSFAEHGLL

SEQ ID NO: 43167 - protein, 89 aa, Escherichia coli
MLRYRRMVQLFFPLSPNVDIYNLWRKTRIKFIKAQYFNMLQIILFLKHTHNKYHKHKPDKYPMNMQQSFNYSIYSSATKLQKIITNSYK

SEQ ID NO: 43168 - protein, 1197 aa, Escherichia coli
MKFLPYIFLLCCGLWSTISFADEDYIEYRGISSNNRVTLDPLRLSNKELRWLASKKNLVIAVHKSQTATLLHTDSQQRVRGINADYLNLLKRALNIKLTLREYADHQKAMDALAEGEVDIVLSHLVTSPPLNNDIAATKPLIITFPALVTTLHDSMRPLTSPKPVNIARVANYPPDEVIHQSFPKATIISFTNLYQALASVSAGHNDYFIGSNIITSSMISRYFTHSLNVVKYYNSPRQYNFFLTRKESVILNEVLNRFVDALTNEVRYEVSQNWLDTGNLAFLNKPLELTEHEKQWIKQHPNLKVLENPYSPPYSMTDENGSVRGVMGDILNIITLQTGLNFSPITVSHNIHAGTQLSPGGWDIIPGAIYSEDRENNVLFAEAFITTPYVFVMQKAPDSEQTLKKGMKVAIPYYYELHSQLKEMYPEVEWIQVDNASAAFHKVKEGELDALVATQLNSRYMIDHYYPNELYHFLIPGVPNASLSFAFPRGEPELKDIINKALNAIPPSEVLRLTEKWIKMPNVTIDTWDLYSEQFYIVTTLSVLLVGSSLLWGFYLLRSVRRRKVIQGDLENQISFRKALSDSLPNPTYVVNWQGNVISHNSAFEHYFTADYYKNAMLPLENSDSPFKDVFSNAHEVTAETKENRTIYTQVFEIDNGIEKRCINHWHTLCNLPASDNAVYICGWQDITETRDLINALEVEKNKAIKATVAKSQFLATMSHEIRTPISSIMGFLELLSGSGLSKEQRVEAISLAYATGQSLLGLIGEILDVDKIESGNYQLQPQWVDIPTLVQNTCHSFGAIAASKSIALSCSSTFPEHYLVKIDPQAFKQVLSNLLSNALKFTTEGAVKITTSLGHIDDNHAVIKMTIMDSGSGLSQEEQQQLFKRYSQTSAGRQQTGSGLGLMICKELIKNMQGDLSLESHPGIGTTFTITIPVEISQQVATVEAKAEQPITLPEKLSILIADDHPTNRLLLKRQLNLLGYDVDEATDGVQALHKVSMQHYDLLITDVNMPNMDGFELTRKLREQNSSLPIWGLTANAQANEREKGLSCGMNLCLFKPLTLDVLKTHLSQLHQVAHIAPQYRHLDIEALKNNTANDLQLMQEILMTFQHETHKDLPAAFQALEAGDNRTFHQCIHRIHGAANILNLQKLINISHQLEITPVSDDSKPEILQLLNSVKEHIAELDQEIAVFCQKND

SEQ ID NO: 43169 - protein, 438 aa, Escherichia coli
MKPLHYTASALALGLALMGNAQAVTTIPFWHSMEGELGKEVDSLAQRFNAENPDYKIVPTYKGNYEQNLSAGIAAFRTGNAPAILQVYEVGTATMMASKAIKPVYDVFKEAGIQFDESQFVPTVSGYYSDSKTGHLLSQPFNSSTPVLYYNKDAFKKAGLDPEQPPKTWQDLADYAAKLKASGMKCGYASGWQGWIQLENFSAWNGLPFASKNNGFDGTDAVLEFNKPEQVKHIAMLEEMNKKGDFSYVGRKDESTEKFYNGDCAMTTASSGSLANIREYAKFNYGVGMMPYDADAKDAPQNAIIGGASLWVMQGKDKETYTGVAKFLDFLAKPENAAEWHQKTGYLPITKAAYDLTREQGFYEKNPGADTATRQMLNKPPLPFTKGLRLGNMPQIRVIVDEELESVWTGKKTPQQALDTAVERGNQLLRRFEKSTKS

SEQ ID NO: 43170 - protein, 417 aa, Escherichia coli
MTFSLFGDKFTRHSGITLLMEDLNDGLRTPGAIMLGGGNPAQIPEMQDYFQTLLTDMLESGKATDALCNYDGPQGKTELLTLLAGMLREKLGWDIEPQNIALTNGSQSAFFYLFNLFAGRRADGRVKKVLFPLAPEYIGYADAGLEEDLFVSARPNIELLPEGQFKYHVDFEHLHIGEETGMICVSRPTNPTGNVITDEELLKLDALGNQHGIPLVIDNAYGVPFPGIIFSEARPLWNPNIVLCMSLSKLGLPGSRCGIIIANEKIITAITNMNGIISLAPGGIGPAMMCEMIKRNDLLRLSETVIKPFYYQRVQETIAIIRRYLPENRCLIHKPEGAIFLWLWFKDLPITTKQLYQRLKARGVLMVPGHNFFPGLDKPWPHTHQCMRMNYVPEPEKIEAGVKILAEEIERAWAESH

SEQ ID NO: 43171 - protein, 430 aa, Escherichia coli [sequence omitted]

SEQ ID NO: 43172 - protein, 457 aa, Escherichia coli
MTAFSTLNVLPPAQLTNLNELGYLTMTPVQAAALPAILAGKDVRVQAKTGSGKTAAFGLGLLQQIDASLFQTQALVLCPTRELADQVAGELRRLARFLPNTKILTLCGGQPFGMQRDSLQHAPHIIVATPGRLLDHLQKGTVSLDALNTLVMDEADRMLDMGFSDAIDDVIRFAPASRQTLLFSATWPEAIAAISGRVQRDPLAIEIDSTDALPPIEQQFYETSSKGKIPLLQRLLSLHQPSSCVVFCNTKKDCQAVCDALNEVGQSALSLHGDLEQRDRDQTLVRFANGSARVLVATDVAARGLDIKSLELVVNFELAWDPEVHVHRIGRTARAGNSGLAISFCAPEEAQRANIISDMLQIKLNWQTPPANSSIATLEAEMATLCIDGGKKAKMRPGDVLGALTGDIGLDGADIGKIAVHPAHVYVAVRQAVAHKAWKQLQGGKIKGKTCRVRLLK

SEQ ID NO: 43173 - protein, 156 aa, Escherichia coli
MWLMSQDSKVFFRIFLGIGLVLILISVVVFYNQFTYSKDAIHTEGVIVDTVWHSSHSHRTGKDGSWYPVVAFRPTPDYTLIFNSSIGSDFYEDSEGDKVNVYYSPGHPEKAEINNPWVNFFKWGFIGIMGVIFIAVGLLISMPSSKKSRRKRKSRP

SEQ ID NO: 43174 - protein, 111 aa, Escherichia coli
MKKQIEGMTMKKVLALVVAAAMGLSSAAFAAETTTTPAPTATTTKAAPAKTTHHKKQHKAAPAQKAQAAKKHHKNTKAEQKAPEQKAQAAKKHAKKHSHQQPAKPAAQPAA

SEQ ID NO: 43175 - protein, 273 aa, Escherichia coli
MRTTIAVVLGAISLTSAFVFADKPDVARSANDEVSTLFFGHDDRVPVNDTTQSPWDAVGQLETASGNLCTATLIAPNLALTAGHCLLTPPKGKADKAVALRFVSNKGLWRYEIHDIEGRVDPTLGKRLKADGDGWIVPPAAAPWDFGLIVLRNPPSGITPLPLFEGDKAALTAALKAAGRKVTQAGYPEDHLDTLYSHQNCEVTGWAQTSVMSHQCDTLPGDSGSPLMLHTDDGWQLIGVQSSAPAAKDRWRADNRAISVTGFRDKLDQLSQK

SEQ ID NO: 43176 - protein, 315 aa, Escherichia coli
MPDMKLFAGNATPELAQRIANRLYTSLGDAAVGRFSDGEVSVQINENVRGGDIFIIQSTCAPTNDNLMELVVMVDALRRASAGRITAVIPYFGYARQDRRVRSARVPITAKVVADFLSSVGVDRVLTVDLHAEQIQGFFDVPVDNVFGSPILLEDMLQLNLDNPIVVSPDIGGVVRARAIAKLLNDTDMAIIDKRRPRANVSQVMHIIGDVAGRDCVLVDDMIDTGGTLCKAAEALKERGAKRVFAYATHPIFSGNAANNLRNSVIDEVVVCDTIPLSDEIKSLPNVRTLTLSGMLAEAIRRISNEESISAMFEH

SEQ ID NO: 43177 - protein, 257 aa, Escherichia coli
MKSATSAQRPYQEVGAMIRDLIIKTPYNPGERLPPEREIAEMLDVTRTVVREALIMLEIKGLVEVRRGAGIYVLDNSGSQNTDSPDANVCNDAGPFELLQARQLLESNIAEFAALQATREDIVKMRQALQLEERELASSAPGSSESGDMQFHLAIAEATHNSMLVELFRQSWQWRENNPMWIQLHSHLDDSLYRKEWLGDHKQILAALIKKDARAAKLAMWQHLENVKQRLLEFSNVDDIYFDGYLFDSWPLDKVDA

SEQ ID NO: 43178 - protein, 617 aa, Escherichia coli
MRRFLTTLMILLVVLVAGLSALVLLVNPNDFRDYMVKQVAARSGYQLQLDGPLRWHVWPQLSILSGRMSLTAQGASQPLVRADNMRLDVALLPLLSHQLSVKQVMLKGAVIQLTPQTEAVRSEDAPVAPRDNTLPDLSDDRGWSFDISSLKVADSVLVFQHEDDEQVTIRNIRLQMEQDPQHRGSFEFSGRVNRDQRDLTISLNGTVDASDYPHDLTAAIEQINWQLQGADLPKQGIQGQGSFQAQWQESHKRLSFNQISLTANDSTLSGQAQVTLTEKPEWQLRLQFPQLNLDNLIPLNETANGENGAAQQGQSQSTLPRPVISSRIDEPAYQGLQGFTADILLQASNVRWRGMNFTDVATQMTNKSGLLEITQLQGKLNGGQVSLPGTLDATSINPRINFQPRLENVEIGTILKAFNYPISLTGKMSLAGDFSGADIDADAFRHNWQGQAHVEMTDTRMEGMNFQQMIQQAVERNGGDVKAAENFDNVTRLDRFTTDLTLKDGVVTLNDMQGQSPVLALTGEGMLNLADQTCDTQFDIRVVGGWNGESKLIDFLKETPVPLRVYGNWQQLNYSLQVDQLLRKHLQDEAKRRLNDWAERNKDSRNGKDVKKLLEKM

SEQ ID NO: 43179 - protein, 486 aa, Escherichia coli
MTTIVDSNLPVARPSWDHSRLESRIVHLGCGAFHRAHQALYTHHLLESTDSDWGICEVNLMPGNDRVLIENLKKQQLLYTVAEKGAESTELKIIGSMKEALHPEIDGCEGILNAMARPQTAIVSLTVTEKGYCADAASGQLDLNNPLIKHDLENPTAPKSAIGYIVEALRLRREKGLKAFTVMSCDNVRENGHVAKVAVLGLAQARDPQLAAWIEENVTFPCTMVDRIVPAATPETLQEIADQLGVYDPCAIACEPFRQWVIEDNFVNGRPDWDKVGAQFVADVVPFEMMKLRMLNGSHSFLAYLGYLGGYETIADTVTNPAYRKAAFALMMQEQAPTLSMPEGTDLNAYATLLIERFSNPSLRHRTWQIAMDGSQKLPQRLLDPVRLHLQNGGSWRHLALGVAGWMRYTQGVDEQGNAIDVVDPMLAEFQKINAQYQGADRVKALLGLSGIFADDLPQNADFVGAVTAAYQQLCERGARECVAAL

SEQ ID NO: 43180 - protein, 127 aa, Escherichia coli
MQIPRMSLRQLAWSGAVLLLVGTLLLAWSAVRQQESTLAIRAVHQGTTMPDGFSIWHHLDAHGIPFKSITPKNDTLLITFDSSDQSAAAKAVLDRTLPHGYIIAQQDNNSQAMQWLTRLRDNSHRFG

SEQ ID NO: 43181 - protein, 119 aa, Escherichia coli
MVSALITVAVIAWCAQLALGGWQISRFNRAFDTLCQQGRVGVGRSSGRFKPRVVVAIALDDQQRIVDTLFMKGLTVFARPQKIPAITGMHAGDLQPDVIFPHDPLSQNALSLALKLKRG

SEQ ID NO: 43182 - protein, 349 aa, Escherichia coli
MATGTQPDAGQILNSLINSILLIDDNLAIHYANPAAQQLLAQSSRKLFGTPLPELLSYFSLNIELMQESLEAGQGFTDNEVTLVIDGRSHILSVTAQRMPDGMILLEMAPMDNQRRLSQEQLQHAQQVAARDLVRGLAHEIKNPLGGLRGAAQLLSKALPDPSLLEYTKVIIEQADRLRNLVDRLLGPQLPGTRVTESIHKVAERVVTLVSMELPDNVRLIRDYDPSLPELAHDPDQIEQVLLNIVRNALQALGPEGGEIILRTRTAFQLTLHGERYRLAARIDVEDNGPGIPPHLQDTLFYPMVSGREGGTGLGLSIARNLIDQHSGKIEFTSWPGHTEFSVYLPIRK

SEQ ID NO: 43183 - protein, 53 aa, Escherichia coli
MSLENAPDDVKLAVDLIVLLEENQIPASTVLRALDIVKRDYEKKLTRDDEAEK

SEQ ID NO: 43184 - protein, 175 aa, Escherichia coli
MKTALLLEKLEGQLATLRQRCAPVSQFATLSARFDRHLFQTRATTLQACLDEAGDNLAALRHAVEQQQLPQVAWLAEHLAAQLEAIAREASAWSLREWDSAPPKIARWQRKRIQHQDFERRLREMVAERRARLARVTDLVEQQTLHREVEAYEARLARCRHALEKIENRLARLTR

SEQ ID NO: 43185 - protein, 761 aa, Escherichia coli
MNQNLLVTKRDGSTERINLDKIHRVLDWAAEGLHNVSISQVELRSHIQFYDGIKTSDIHETIIKAAADLISRDAPDYQYLAARLAIFHLRKKAYGQFEPPALYDHVVKMVEMGKYDNHLLEDYTEEEFKQMDTFIDHDRDMTFSYAAVKQLEGKYLVQNRVTGEIYESAQFLYILVAACLFSNYPRETRLQYVKRFYDAVSTFKISLPTPIMSGVRTPTRQFSSCVLIECGDSLDSINATSSAIVKYVSQRAGIGINAGRIRALGSPIRGGEAFHTGCIPFYKHFQTAVKSCSQGGVRGGAATLFYPMWHLEVESLLVLKNNRGVEGNRVRHMDYGVQINKLMYTRLLKGEDITLFSPSDVPGLYDAFFADQEEFERLYTKYEKDDSIRKQRVKAVELFSLMMQERASTGRIYIQNVDHCNTHSPFDPAIAPVRQSNLCLEIALPTKPLNDVNDENGEIALCTLSAFNLGAINNLDELEELAILAVRALDALLDYQDYPIPAAKRGAMGRRTLGIGVINFAYYLAKHGKRYSDGSANNLTHKTFEAIQYYLLKASNELAKEQGACPWFNETTYAKGILPIDTYKKDLDTIANEPLHYDWEALRESIKTHGLRNSTLSALMPSETSSQISNATNGIEPPRGYVSIKASKDGILRQVVPDYEHLHDAYELLWEMPGNDGYLQLVGIMQKFIDQSISANTNYDPSRFPSGKVPMQQLLKDLLTAYKFGVKTLYYQNTRDGAEDAQDDLVPSIQDDGCESGACKI

SEQ ID NO: 43186 - protein, 427 aa, Escherichia coli
MNTFSVSRLALALAFGVTLTACSSTPPDQRPSDQTAPGTSSRPILSAKEAQNFDAQHYFASLTPGAAAWNPSPITLPAQPDFVVGPAGTQGVTHTTIQAAVDAAIIKRTNKRQYIAVMPGEYQGTVYVPAAPGGITLYGTGEKPIDVKIGLSLDGGMSPADWRHDVNPRGKYMPGKPAWYMYDSCQSKRSDSIGVLCSAVFWSQNNGLQLQNLTIENTLGDSVDAGNHPAVALRTDGDQVQINNVNILGRQNTFFVTNSGVQNRLETNRQPRTLVTNSYIEGDVDIVSGRGAVVFDNTEFRVVNSRTQQEAYVFAPATLSNIYYGFLAVNSRFNAFGDGVAQLGRSLDVDANTNGQVVIRDSAINEGFNTAKPWADAVISNRPFAGNTGSVDDNDEIQRNLNDTNYNRMWEYNNRGVGSKVVAEAKK

SEQ ID NO: 43187 - protein, 166 aa, Escherichia coli
MTESTSRRPAYARLLDRAVRILAVRDHSEQELRRKLAAPIMGKNGPEEIDATAEDYERVIAWCHEHGYLDDSRFVARFIASRSRKGYGPARIRQELNQKGISREATEKAMRECDIDWCALARDQATRKYGEPLPTVFSEKVKIQRFLLYRGYLMEDIQEIWRNFAD

SEQ ID NO: 43188 - protein, 134 aa, Escherichia coli
MDQVVVFQKMFEQVRKEQNFSWFYSELKHHRIAHYIYYLATDNIRIITHDDTVLLLRGTRNLLKVSTTKNPAKIKEAALLHICGKSTFREYCSTLAGAGVFRWVTDVNHNKRSYYAIDNTLLYIEDVENNKPLI

SEQ ID NO: 43189 - protein, 513 aa, Escherichia coli
MQLNSTEISELIKQRIAQFNVVSEAHNEGTIVSVSDGVIRIHGLADCMQGEMISLPGNRYAIALNLERDSVGAVVMGPYADLAEGMKVKCTGRILEVPVGRGLLGRVVNTLGAPIDGKGPLDHDGFSAVEAIAPGVIERQSVDQPVQTGYKAVDSMIPIGRGQRELIIGDRQTGKTALAIDAIINQRDSGIKCIYVAIGQKASTISNVVRKLEEHGALANTIVVVATASESAALQYLAPYAGCAMGEYFRDRGEDALIIYDDLSKQAVAYRQISLLLRRPPGREAFPGDVFYLHSRLLERAARVNAEYVEAFTKGEVKGKTGSLTALPIIETQAGDVSAFVPTNVISITDGQIFLETNLFNAGIRPAVNPGISVSRVGGAAQTKIMKKLSGGIRTALAQYRELAAFSQFASDLDDATRKQLDHGQKVTELLKQKQYAPMSVAQQSLVLFAAERGYLADVELSKIGSFEAALLAYVDRDHAPLMQEINQTGGYNDEIEGKLKGILDSFKATQSW

SEQ ID NO: 43190 - protein, 408 aa, Escherichia coli
MSPCENDTPINWKRNLIVAWLGCFLTGAAFSLVMPFLPLYVEQLGVTGHSALNMWSGIVFSITFLFSAIASPFWGGLADRKGRKLMLLRSALGMGIVMVLMGLAQNIWQFLILRALLGLLGGFVPNANALIATQVPRNKSGWALGTLSTGGVSGALLGPMAGGLLADSYGLRPVFFITASVLILCFFVTLFCIREKFQPVSKKEMLHMREVVTSLKNPKLVLSLFVTTLIIQVATGSIAPILTLYVRELAGNVSNVAFISGMIASVPGVAALLSAPRLGKLGDRIGPEKILITALIFSVLLLIPMSYVQTPLQLGILRFLLGAADGALLPAVQTLLVYNSSNQIAGRIFSYNQSFRDIGNVTGPLMGAAISANYGFRAVFLVTAGVVLFNAVYSWNSLRRRRIPQVSN

SEQ ID NO: 43191 - protein, 259 aa, Escherichia coli
MNQVAVVIGGGQTLGAFLCHGLAAEGYRVAVVDIQSDKAANVAQEINAEYGESMAYGFGADATSEQSVLALSRGVDEIFGRVDLLVYSAGIAKAAFISDFQLGDFDRSLQVNLVGYFLCAREFSRLMIRDGIQGRIIQINSKSGKVGSKHNSGYSAAKFGGVGLTQSLALDLAEYGITVHSLMLGNLLKSPMFQSLLPQYATKLGIKPDQVEQYYIDKVPLKRGCDYQDVLNMLLFYASPKASYCTGQSINVTGGQVMF

SEQ ID NO: 43192 - protein, 319 aa, Escherichia coli
MSLNFLDFEQPIAELEAKIDSLTAVSRQDEKLDINIDEEVHRLREKSVELTRKIFADLGAWQIAQLARHPQRPYTLDYVRLAFDEFDELAGDRAYADDKAIVGGIARLDGRPVMIIGHQKGRETKEKIRRNFGMPAPEGYRKALRLMQMAERFKMPIITFIDTPGAYPGVGAEERGQSEAIARNLREMSRLGVPVVCTVIGEGGSGGALAIGVGDKVNMLQYSTYSVISPEGCASILWKSADKAPLAAEAMGIIAPRLKELKLIDSIIPEPLGGAHRNPEAMAASLKAQLLADLADLDVLSTEDLKNRRYQRLMSYGYA

SEQ ID NO: 43193 - protein, 316 aa, Escherichia coli
MNELDGIKQFTTVVADSGDIESIRHYHPQDATTNPSLLLKAAGLSQYEHLIDDAIAWGKKNGKTQEQQVVAACDKLAVNFGAEILKIVPGRVSTEVDARLSFDKEKSIEKARHLVDLYQQQGVEKSRILIKLASTWEGIRAAEELEKEGINCNLTLLFSFAQARACAEAGVFLISPFVGRIYDWYQARKPMDPYVVEEDPGVKSVRNIYDYYKQHHYETIVMGASFRRTEQILALTGCDRLTIAPNLLKELQEKVSPVVRKLIPPSQTFPRPAPMSEAEFRWEHNQDAMAVEKLSEGIRLFAVDQRKLEDLLAAKL

SEQ ID NO: 43194 - protein, 122 aa, Escherichia coli
MFDGISLTEHQRQQMRDLMQQARHEQPPVNVSELETMHRLVTAENFDENAVRAQAEKMANEQIARQVEMAKVRNQMYRLLTPEQQAVLNEKHQQRMEQLRDVTQWQKSSSLKLLSSSNSRSQ

SEQ ID NO: 43195 - protein, 474 aa, Escherichia coli
MKKTTLALSALALSLGLALSPLSATAAETSSATTAQQMPSLAPMLEKVMPSVVSINVEGSTTVNTPRMPRNFQQFFGDDSPFCQEGSPFQSSPFCQGGQGGNGGGQQQKFMALGSGVIIDADKGYVVTNNHVVDNATVIKVQLSDGRKFDAKMVGKDPRSDIALIQIQNPKNLTAIKMADSDALRVGDYTVAIGNPFGLGETVTSGIVSALGRSGLNAENYENFIQTDAAINRGNSGGALVNLNGELIGINTAILAPDGGNIGIGFAIPSNMVKNLTSQMVEYGQVKRGELGIMGTELNSELAKAMKVDAQRGAFVSQVLPNSSAAKAGIKAGDVITSLNGKPISSFAALRAQVGTMPVGSKLTLGLLRDGKQVNVNLELQQSSQNQVDSSSIFNGIEGAEMSNKGKDQGVVVNNVKTGTPAAQIGLKKGDVIIGANQQAVKNIAELRKVLDSKPSVLALNIQRGDSTIYLLMQ

SEQ ID NO: 43196 - protein, 221 aa, Escherichia coli
MLDLFKAIGLGLVVLLPLANPLTTVALFLGLAGNMNSAERNRQSLMASVYVFAIMMVAYYAGQLVMDTFGISIPGLRIAGGLIVAFIGFRMLFPQQKAIDSPEAKSKSEELEDEPSANIAFVPLAMPSTAGPGTIAMIISSASTVRQSSTFADWVLMVAPPLIFFLVAVILWGSLRSSGAIMRLVGKGGIEAISRLMGFLLVCMGVQFIINGILEIIKTYH

SEQ ID NO: 43197 - protein, 110 aa, Escherichia coli
MFSIKPGPRNLPIDNPTLLSWNITDGDLNSKLNTLEYLNCITNIINSCGVYPQGLKDREIISTFHAEKVINDLLKNDYKISLSPDTTYRELNKAAQRSITAPDRIGERKT

SEQ ID NO: 43198 - protein, 164 aa, Escherichia coli
MIERGDNSGVYQYGRAEHFTHIISDKPSPKDKYVAYAINIPDYELAADVYNINVTSPSGQQETFKILINLEHLRQTLERKSLTAVQKSQCEIITPKKPGEAILHAFNATYQQIRENMSEFARCHYGYIQIPPVTTFRVRRTRNSRRRKGLLVSCLSTRRSLYHP

SEQ ID NO: 43199 - protein, 101 aa, Escherichia coli
MQMRQRDVAALDAKYTKELADAKAENDALRDDVAAGRRRLHIKAVCQSVREATTASGVDNAASPRLADTAERDYFTLRERLVMMQAQLEGAQQYITEQCLK

SEQ ID NO: 43200 - protein, 208 aa, Escherichia coli
MMNFNNVFRWHLPFLFLVLLTFRAAAADTLLILGDSLSAGYRMSASAAWPALLNDKWQSKTSVVNASISGDTSQQGLARLPALLKQHQPRWVLVELGGNDGLRGFQPQQTEQTLRQILQDVKAANAEPLLMQIRLPANYGRRYNEAFSAIYPKLAKEFDVPLLPFFMEEVYLKPQWMQDDGIHPNRDAQPFIADWMAKQLQPLVNHDS

SEQ ID NO: 43201 - protein, 1107 aa, Escherichia coli
MTEQHSVFNKYSTGTSNSFIFNNDVSSITGLVAQSNSTIINTDSGIIDLYGRGSVGMLAIADSTAENQGKITLDSMWVDANDTTAMRDIASNSAIDFGTGVGVGTDSYSGAGKNATAINQLGGVITIYNAGAGMAAYGASNTVINQGTINLEKNGNYDDSLAANTLVGMAVYEHGTAINDQTGVININVGTGQAFYNDGTGTIVNYGTICTFGVCQSGNEYNNTDDFTSLIYTGGDTITRSGETVTLNKSAAVTDKLAGNVVNSGTLSGDQITVSSGLLENTSGGIINNLVKLDKGAVIKNAGVMTNNVDVSGGILNNAGEMTAQITMNAGADSSLVNNTGTINKIVQNAGVFNNSGSVTGRMMSAGGVFNNQTDGAIMRGAALTGTAVANNEGTWNLGSSSEGNNTGMLEVNNNSAFNNRGEFILDNDKNAVHINQSGTLYNTGHMNISNSSHNGAVNMWGGNGRFINDGTIDVSAKSLVVSANNAGDQNAFFWNQDNGVINFDHDSASAVKVTHSNFIAQNDGIMNISGTGAVAMEGDKNAQLVNNGTINLGTAGTTDTGMIGMQLDANATADAVIENNGTINIFANDSFAFSVLGTVGHVVNNGTVVIADGVTGSGLIKQGDSINVEGMNGNNGNSSEVHYGDYTLPDVPKPNTVSVTSGSDEAGGSMNNLNGYVVGTNVNGSAGKLKVNNASMNGVEINTGFTAGTADTTVSFDNVVEGSNLTDADAITSTSVVWTAKGSTDASGNVDVTMSKNAYTDVATDASVNDIAKALDAGYTNNELFTSLNVGTTAELNSALKQVSGSQATTVFREARVLSNRFSMLADAAPKVGNGLAFNVVAKGDPRAELGNNTEYDMLALRKTIDLSESQTMSLEYGIARLDGDGAQKAGDNGVTGGYSQFFGLKHQMSFDNGMNWNNALRYDVHNLDSSRSIAFGNTNKTADTDVKQQYLEFRSEGAKTFEPSEGLKVTPYAGVKLRHTLEGGYQERNAGDFNLNMNSGSETAVDSIVGLKLDYAGKDGWSASATLEGGPNLSYAKSQRTASLAGAGSQHFNVDDGQKGGGINSLTSVGVKYSSKESSLNLDAYNWKEDGISDKGVMLNFKKTF

SEQ ID NO: 43202 - protein, 566 aa, Escherichia coli
MIVKRPVSASLARAFFYIVLLSILSTGIALLTLASSLRDAEAINIAGSLRMQSYRLGYDLQSGSPQLNAHRQLFQQALHSPVLTNLNVWYVPEAVKTRYAHLNANWLEMNNRLSKGDLPWYQANINNYVNQIDLFVLALQHYAERKMLLVVAISLAGGIGIFTLVFFTLRRIRHQVVAPLNQLVTASQRIEHGQFDSPPLDTNLPNELGLLAKTFNQMSSELHKLYRSLEASVEEKTRDLHEAKRRLEVLYQCSQALNTSQIDVHCFRHILQIVRDNEAAEYLELNVGENWRISEGQPNPELPMQILPVTMQETVYGELHWQNSHVSSSEPLLNSVSSMLGRGLYFNQAQKHFQQLLLMEERATIARELHDSLAQVLSYLRIQLTLLKRSIPEDNATAQSIMADFSQALNDAYRQLRELLTTFRLTLQQADLPSALREMLDTLQNQTSAKLTLDCRLPTLALDAQMQVHLLQIIREAVLNAMKHANASEIAVSCVTAPDGNHTVYIRDNGIGIGEPKEPEGHYGLNIMRERAERLGGTLTFSQPSGGGTLVSISFRSAEGEESQLM

SEQ ID NO: 43203 - protein, 481 aa, Escherichia coli
MQEIYRFIDDAIEADRQRYTDIADQIWDHPETRFEEFWSAEHLASALESAGFTVTRNVGNIPNAFIASFGQGKPVIALLGEYDALAGLSQQAGCAQPTSVTPGENGHGCGHNLLGTAAFAAAIAVKKWLEQYGQGGTVRFYGCPGEEGGSGKTFMVREGVFDDVDAALTWHPEAFAGMFNTRTLANIQASWRFKGIAAHAANSPHLGRSALDAVTLMTTGTNFLNEHIIEKARVHYAITNSGGISPNVVQAQAEVLYLIRAPEMTDVQHIYDRVAKIAEGAALMTETTVECRFDKACSSYLPNRTLENAMYQALSHFGTPEWNSEELAFAKQIQATLTSNDRQNSLNNIAATGGENGKVFALRHRETVLANEVAPYAATDNVLAASTDVGDVSWKLPVAQCFSPCFAVGTPLHTWQLVSQGRTSIAHKGMLLAAKTMAATTVNLFLDSGLLQECQQEHQQVTDTQPYHCPIPKNVTPSPLK

SEQ ID NO: 43204 - protein, 346 aa, Escherichia coli
MVWLANPERYGQMQYRYCGKSGLRLPALSLGLWHNFGHVNALESQRAILRKAFDLGITHFDLANNYGPPPGSAEENFGRLLREDFAAYRDELIISTKAGYDMWPGPYGSGGSRKYLLASLDQSLKRMGLEYVDIFYSHRVDENTPMEETASALAHAVQSGKALYVGISSYSPERTQKMVELLREWKIPLLIHQPSYNLLNRWVDKSGLLDTLQNNGVGCIAFTPLAQGLLTGKYLNGIPQDSRMHREGNKVRGLTPKMLTEANLNSLRLLNEMAQQRGQSMAQMALSWLLKDDRVTSVLIGASRAEQLEENVQALNNLTFSTKELAQIDQHIADGELNLWQASSDK

SEQ ID NO: 43205 - protein, 484 aa, Escherichia coli
MNNKGSGLTPAQALDKLDALYEQSVVALRNAIGNYITSGELPDENARKQGLFVYPSLTVTWDGSTTNPPKTRAFGRFTHAGSYTTTITRPTLFRSYLNEQLTLLYQDYGAHISVQPSQHEIPYPYVIDGSELTLDRSMSAGLTRYFPTTELAQIGDETADGIYHPTEFSPLSHFDARRVDFSLARLRHYTGTPVEHFQPFVLFTNYTRYVDEFVRWGCSQILDPDSPYIALSCAGGNWITAETEAPEEAISDLAWKKHQMPAWHLITADGQGITLVNIGVGPSNAKTICDHLAVLRPDVWLMIGHCGGLRESQAIGDYVLAHAYLRDDHVLDAVLPPDIPIPSIAEVQRALYDATKLVSGRPGEEVKQRLRTGTVVTTDDRNWELRYSASALRFNLSRAVAIDMESATIAAQGYRFRVPYGTLLCVSDKPLHGEIKLPGQANRFYEGAISEHLQIGIRAIDLLRAEGDRLHSRKLRTFNEPPFR

SEQ ID NO: 43206 - protein, 530 aa, Escherichia coli
MARLFTLSESKYYLMALDAGTGSIRAVIFDLEGNQIAVGQAEWRHLAVPDVPGSMEFDLNKNWQLACECMRQALHNAGIAPEYIAAVSACSMREGIVLYNNEGAPIWACANVDARAAREVSELKELHNNTFENEVYRATGQTLALSAIPRLLWLAHHRSDIYRQASTITMISDWLAYMLSGELAVDPSNAGTTGLLDLTTRDWKPALLDMAGLRADILSPVKETGTLLGVVSSQAAELCGLKAGTPVVVGGGDVQLGCLGLGVVRPAQTAVLGGTFWQQVVNLAAPVTDPEMNVRVNPHVIPGMVQAESISFFTGLTMRWFRDAFCAEEKLIAERLGIDTYTLLEEMASRVPPGSWGVMPIFSDRMRFKTWYHAAPSFINLSIDPDKCNKATLFRALEENAAIVSACNLQQIADFSNIHPSSLVFAGGGSKGKLWSQILADVSGLPVNIPVVKEATALGCAIAAGVGAGIFSSMAETGERLVRWERTHTPDPEKHELYQDSRDKWQAVYQDQLGLVDHGLTTSLWKAPGL

SEQ ID NO: 43207 - protein, 512 aa, Escherichia coli
MAFASLIERQRIRLLLALLFGACGTLAFSPYDVWPAAIISLMGLQALTFNRRPLQSAAIGFCWGFGLFGSGINWVYVSIATFGGMPGPVNIFLVVLLAAYLSLYTGLFAGVLSRLWPKTTWLRVAIAAPALWQVTEFLRGWVLTGFPWLQFGYSQIDGPLKGLAPIMGVEAINFLLMMVSGLLALALVKRNWRPLVVAVVLFALPFPLRYIQWFTPQPEKTIQVSMVQGDIPQSLKWDEGQLLNTLKIYYNATAPLMGKSSLIIWPESAITDLEINQQPFLKALDGELRDKGSSLVTGIVDARLNKQNRYDTYNTIITLGKGAPYSYESADRYNKNHLVPFGEFVPLESILRPLAPFFDLPMSSFSRGPYIQPPLSANGIELTAAICYEIILGEQVRDNFRPDTDYLLTISNDAWFGKSIGPWQHFQMARMRALELARPLLRSTNNGITAVIGPQGEIQAMIPQFTREVLTTNVTPTTGLTPYARTGNWPLWVLTALFGFAAVLMSLRQRRK

SEQ ID NO: 43208 - protein, 292 aa, Escherichia coli
MSDDNSHSSDTISNKKGFFSLLLSQLFHGEPKNRDELLALIRDSGQNDLIDEDTRDMLEGVMDIADQRVRDIMIPRSQMITLKRNQTLDECLDVIIESAHSRFPVISEDKDHIEGILMAKDLLPFMRSDAEAFSMDKVLRQAVVVPESKRVDRMLKEFRSQRYHMAIVIDEFGGVSGLVTIEDILELIVGEIEDEYDEEDDIDFRQLSRHTWTVRALASIEDFNEAFGTHFSDEEVDTIGGLVMQAFGHLPARGETIDIDGYQFKVAMADSRRIIQVHVKIPDDSPQPKLDE

SEQ ID NO: 43209 - protein, 747 aa, Escherichia coli
MKLNATYIKIRDKWWGLPLFLPSLILPIFAHINTFAHISSGEVFLFYLPLALMISMMMFFSWAALPGIALGIFVRKYAELGFYETLSLTANFIIIIILCWGGYRVFTPRRNNVSHGDTRLISQRIFWQIVFPATLFLILFQFAAFVGLLASRENLVGVMPFNLGTLINYQALLVGNLIGVPLCYFIIRVVRNPFYLRSYYSQLKQQVDAKVTKKEFALWLLALGALLLLLCMPLNEKSTIFSTNYTLSLLLPLMMWGAMRYGYKLISLLWAVVLMISIHSYQNYIPIYPGYTTQLTITSSSYLVFSFIVNYMAVLATRQRAVVRRIQRLAYVDPVVHLPNVRALNRALRDAPWSALCYLRIPGMEMLVKNYGIMLRIQYKQKLSHWLSPLLEPGEDVYQLSGNDLALRLNTESHQERITALDSHLKQFRFFWDGMPMQPQIGVSYCYVRSPVNHIYLLLGELNTVAELSIVTNAPENMQRRGAMYLQRELKDKVAMMNRLQQALEHNHFFLMAQPITGMRGDVYHEILLRMKGENDELISPDSFLPVAHEFGLSSSIDMWVIEHTLQFMAENRAKMPAHRFAINLSPTSVCQARFPVEVSQLLAKYQIEAWQLIFEVTESNALTNVKQAQITLQHLQELGCQIAIDDFGTGYASYARLKNVNADLLKIDGSFIRNIVSNSLDYQIVASICHLARMKKMLVVAEYVENEEIREAVLSLGIDYMQGYLIGKPQPLIDTLNEIEPIRESA

SEQ ID NO: 43210 - protein, 354 aa, Escherichia coli
MISPRKHQYYPFCCNIIALIVNNILQSSYHNQTTSLVSDTASFLTSLMEKNSLFSQRIRLRHLHTFVAVAQQGTLGRAAETLNLSQPALSKTLNELEQLTGARLFERGRQGAQLTLPGEQFLTHAVRVLDAINTAGRSLHRKEGLNNDVVRVGALPTAALGILPSVIGQFHQQQKETTLQVATMSNPMILAGLKTGEIDIGIGRMSDPELMTGLNYELLFLESLKLVVRPNHPLLQENVTLSRVLEWPVVVSPEGTAPRQHSDALVQSQGCKIPSGCIETLSASLSRQLTVEYDYVWFVPSGAVKDDLRHATLVALPVPGHGAGEPIGILTRVDATFSSGCQLMINAIRKSMPF

SEQ ID NO: 43211 - protein, 55 aa, Escherichia coli [sequence omitted]

SEQ ID NO: 43212 - protein, 46 aa, Escherichia coli
MRPFLQEYLMRRLLHYLINNIREHLMLYLFLWGLLAIMDLIYVFYF

SEQ ID NO: 43213 - protein, 372 aa, Escherichia coli
MKYDLIIIGSGSVGAAAGYYATRAGLNVLMTDAHMPPHQHGSHHGDTRLIRHAYGEGEKYVPLVLRAQTLWDELSRHNEEDPIFVRSGVINLGPADSTFLANVAHSAEQWQLNVEKLDAQGIMARWPEIRVPDNYIGLFETDSGFLRSELAIKTWIQLAKEAGCAQLFNCPVTAIRHDDDGVTIETADGEYQAKKAIVCAGTWVKDLLPELPVQPVRKVFAWYQADGRYSVKNKFPAFTGELPNGDQYYGFPAENDALKIGKHNGGQVIHSADERVPFAEVASDGSEAFPFLRNVLPGIGCCLYGAACTYDNSPDEDFIIDTLPGHDNTLLITGLSGHGFKFASVLGEIAADFAQDKKSDFDLTPFRLSRFQ

SEQ ID NO: 43214 - protein, 878 aa, Escherichia coli
MSYLNLRLYQRNTQCLHIRKHRLAGFFVRLVVACAFAAQAPLSSADLYFNPRFLADDPQAVADLSRFENGQELPPGTYRVDIYLNNGYMATRDVTFNTGDSEQGIVPCLTRAQLASMGLNTASVAGMNLLADDACVPLTTMVQDATAHLDVGQQRLNLTIPQAFMSNRARGYIPPELWDPGINAGLLNYNFSGNSVQNRIGGNSHYAYLNLQSGLNIGAWRLRDNTTWSYNSSDRSSGSKNKWQHINTWLERDIIPLRSRLTLGDGYTQGDIFDGINFRGAQLASDDNMLPDSQRGFAPVIHGIARGTAQVTIKQNGYDIYNSTVPPGPFTINDIYAAGNSGDLQVTIKEADGSTQIFTVPYSSVPLLQREGHTRYSITAGEYRSGNAQQEKTRFFQSTLLHGLPAGWTIYGGTQLADRYRAFNFGIGKNMGALGALSVDMTQANSTLPDDSQHDGQSVRFLYNKSLNESGTNIQLVGYRYSTSGYFNFADTTYSRMNGYNIETQDGVIQVKPKFTDYYNLAYNKRGKLQLTVTQQLGRTSTLYLSGSHQTYWGTSNVDEQFQAGLNTAFEDINWTLSYSLTKNAWQKGRDQMLALNVNIPFSHWLRSDSKSQWRHASASYSMSHDLNGRMTNLAGVYGTLLEDNNLSYSVQTGYAGGGDGNSGSTGYATLNYRGGYGNANIGYSHSDDIKQLYYGVSGGVLAHANGVTLGQPLNDTVVLVKAPGAKDAKVENQTGVRTDWRGYAVLPYATEYRENRVALDTNTLADNVDLDNAVANVVPTRGAIVRAEFKARVGIKLLMTLTHNNKPLPFGAMVTSESSQSSGIVADNGQVYLSGMPLAGKVQVKWGEEENAHCVANYQLPPESQQQLLTQLSAECR

SEQ ID NO: 43215 - protein, 72 aa, Escherichia coli
MFHCPLCQHAAHARTSRYITDTTKERYHQCQNVNCSATFITYESVQRYIVKPGEVHVVRPHPLPSGQQIMWM

SEQ ID NO: 43216 - protein, 286 aa, Escherichia coli
MSIISTKYLLQDAQANGYAVPAFNIHNAETIQAILEVCSEMRSPVILAGTPGTFKHIALEEIYALCSAYSTTYNMPLALHLDHHESLDDIRRKVHAGVRSAMIDGSHFPFAENVKLVKSVVDFCHSQDCSVEAELGRLGGVEDDMSVDAESAFLTDPQEAKRFVELTGVDSLAVAIGTAHGLYSKTPKIDFQRLAEIREVVDVPLVLHGASDVPDEFVRRTIELGVTKVNVATELKIAFAGAVKAWFAENPQGNDPRYYMRVGMDAMKEVVRNKINVCGSANRISA

SEQ ID NO: 43217 - protein, 335 aa, Escherichia coli
MPLDSTNIRQTMTDLIQRPRRLRKSPALRAMFEETTLSLNDLVLPIFVEEEIDDYKAVEAMPGVMRIPEKHLAREIERIANAGIRSVMTFGISHHTDETGSDAWREDGLVARMSRICKQTVPEMIVMSDTCFCEYTSHGHCGVLCEHGVDNDATLENLGKQAVVAAAAGADFIAPSAAMDGQVQAIRQALDAAGFKDTAIMSYSTKFASSFYGPFREAAGSALKGDRKSYQMNPMNRREAIRESLLDEAQGADCLMVKPAGAYLDIVRELRERTELPIGAYQVSGEYAMIKFAALAGAIDEEKVVLESLGSIKRAGADLIFSYFALDLAEKKILR

SEQ ID NO: 43218 - protein, 101 aa, Escherichia coli
MATLLQLHFAFNGPFGDAMAEQLKPLAESINQEPGFLWKVWTESEKNHEAGGIYLFTDEKSALAYLEKHTARLKNLGVEEVVAKVFDVNEPLSQINQAKLA

SEQ ID NO: 43219 - protein, 325 aa, Escherichia coli
MHMKKIIFAFIILFVFLLPMIIFYQPWVNALPSTPRHASPEQLEKTVRYLTQTVHPRSADNIDNLNRSAEYIKEVFVSSGARVTSQDVPITGGPYKNIVADYGPADGPLIIIGAHYDSASSYENDQLTYTPGADDNASGVAGLLELARLLHQQVPKTGVQLVAYASEEPPFFRSDEMGSAVHAASLERPVKLMIALEMIGYYDSAPGSQNYPYPAMSWLYPDRGDFIAVVGRIQDINAVRQVKAALLSSQDLSVYSMNTPGFIPGIDFSDHLNYWQHDIPAIMITDTAFYRNKQYHLPGDTADRLNYQKMAQVVDGVITLLYNSK

SEQ ID NO: 43220 - protein, 348 aa, Escherichia coli [sequence omitted]

SEQ ID NO: 43221 - protein, 186 aa, Escherichia coli
MNKFLFAAALIVSGLLVGCNQLTQYTITEQEINQSLAKHNNFSKDIGLPGVADAHIVLTNLTSQIGREEPNKVTLTGDANLDMNSLFGSQKATMKLKLKALPVFDKEKGAIFLKEMEVVDATVQPEKMQTVMQTLLPYLNQALRNYFNQQPAYVLREDGSQGEAMAKKLAKGIEVKPGEIVIPFTD

SEQ ID NO: 43222 - protein, 229 aa, Escherichia coli
MKKIIALMLFLTFFAHANDSEPGSQYLKAAEAGDRRAQYFLADSWFSSGDLSKAEYWAQKAADSGDADACALLAQIKITNPVSLDYPQAKVLAEKAAQAGSKEGEVTLAHILVNTQAGKPDYPKAISLLENASEDLENDSAVDAQMLLGLIYANGVGIKADDDKATWYFKRSSAISRTGYSEYWAGMMFLNGEEGFIEKNKQKALHWLNLSCMEGFDTGCEEFEKLTNG

SEQ ID NO: 43223 - protein, 715 aa, Escherichia coli
  MISC_FEATURE (140)..(140): X=any amino acid
MKKVVTVCPYCASGCKINLVVDNGKIVRAEAAQGKTNQGTLCLKGYYGWDFINDTQILTPRLKTPMIRRQRGGKLEPVSWDEALNYVAERLSAIKEKYGPDAIQTTGSSRGTGNETNYVMQKFARAVIGTNNVDCCARVXHGPSVAGLHQSVGNGAMSNAINEIDNTDLVFVFGYNPADSHPIVANHVINAKRNGAKIIVCDPRKIETARIADMHIALKNGSNIALLNAMGHVIIEENLYDKAFVASRTEGFEEYRKIVEGYTPESVEDITGVSASEIRQAARMYAQAKSAAILWGMGVTQFYQGVETVRSLTSLAMLTGNLGKPHAGVNPVRGQNNVQGACDMGALPDTYPGYQYVKDPANREKFAKAWGVESLPAHTGYRISELPHRAAHGEVRAAYIMGEDPLQTDAELSAVRKAFEDLELVIVQDIFMTKTASAADVILPSTSWGEHEGVFTAADRGFQRFFKAVEPKWDLKTDWQIISEIATRMGYPMHYNNTQEIWDELRHLCPDFYGATYEKMGELGFIQWPCRDTSDADQGTSYLFKEKFDTPNGLAQFFTCDWVAPIDKLTDEYPMVLSTVREVGHYSCRSMTGNCAALAALADEPGYAQINTEDAKRLGIEDEALVWVHSRKGKIITRAQVSDRPNKGAIYMTYQWWIGACNELVTENLSPITKTPEYKYCAVRVEPIADQRAAEQYVIDEYNKLKTRLREAALA

SEQ ID NO: 43224 - protein, 306 aa, Escherichia coli
MSTLGHQYDNSLVSNAFGFLRLPMNFQPYDSDADWVITGVPFDMATSGRAGGRHGPAAIRQVSTNLAWEHNRFPWNFDMRERLNVVDCGDLVYAFGDAREMSEKLQAHAEKLLAAGKRMLSFGGDHFVTLPLLRAHAKHFGKMALVHFDAHTDTYANGCEFDHGTMFYTAPKEGLIDPNHSVQIGIRTEFDKDNGFTVLDACQVNDRSVDDVIAQVKQIVGDMPVYLTFDIDCLDPAFAPGTGTPVIGGLTSDRAIKLVRGLKDLNIVGMDVVEVAPAYDQSEITALAAATLALEMLYIQAAKKGE

SEQ ID NO: 43225 - protein, 289 aa, Escherichia coli
MVMKNFEVLQPLQNSLSGLPLWVSERILQQINQLTHYEPVIGIMGKTGAGKSSLCNALFAGEVSPVSDVAACTRDPLRFRLQIGEHFMTIVDLPGVGESGVRDTEYAALYREQLPRLDLILWLIKADDRALATDEHFYRQVIGEAYRHKMLFVISQSDKAEPTSGGNILSTEQKQNISRKICLLHELFQPVHPVCAVSVRLQWGLRVMAERMIKCLPREPSSPVVALLQHPFRTWVAREQARDDFGETVDTILDTVSTFPLIPAPVRTIIQAVRSSVVSVARAVWDFFF

SEQ ID NO: 43226 - protein, 222 aa, Escherichia coli
MSETGNLLCGDKQTAQTYRAVAGTGAGLSWSCHGALAAGLAERTGRHCLPDVKSEFCLGDAGCSKTVARTGIAASLVWGGVHYWRHCDPREYGVMGLMWGLFSVIIASVAQLSLGFAASHLPPMTHLWDFIAALLAFGLDARILLLGLLGYLLSVFCWYKTLHKLALSKAYALLSMSYVLVWIASMVLPGWEGTFSLKALLGVACIMSGLMLIFLPTTKQRY

SEQ ID NO: 43227 - protein, 315 aa, Escherichia coli
MQNRLTIKDIARLSGVGKSTVSRVLNNESGVSQLTRERVEAVMNQHGFSPSRSARAMRGQSDKVVAIIVTRLDSLSENLAVQTMLPAFYEQGYDPIMMESQFSPQLVAEHLGVLKRRNIDGVVLFGFTGITEEMLAHWQSSLVLLARDAKGFASVCYDDEGAIKILMQRLYDQGHRNISYLGVPHSDVTTGKRRHEAYLAFCKAHKLHPVAALPGLAMKQGYENVAKVITPETTALLCATDTLALGASKYLQEQRIDTLQLASVGNTPLMKFLHPEIVTVDPGYAEAGRQAACQLIAQVTGRSEPQQIIIPATLS

SEQ ID NO: 43228 - protein, 413 aa, Escherichia coli
MSKRRVVVTGLGMLSPVGNTVESTWKALLAGQSGISLIDHFDTSAYATKFAGLVKDFNCEDIISRKEQRKMDAFIQYGIVAGVQAMQDSGLEITEENATRIGAAIGSGIGGLGLIEENHTSLMNGGPRKISPFFVPSTIVNMVAGHLTIMYGLRGPSISIATACTSGVHNIGHAARIIAYGDADVMVAGGAEKASTPLGVGGFGAARALSTRNDNPQAASRPWDKERDGFVLGDGAGMLVLEEYEHAKKRGAKIYAELVGFGMSSDAYHMTSPPENGAGAALAMANALRDAGIEASQIGYVNAHGTSTPAGDKAEAQAVKTIFGEAASRVLVSSTKSMTGHLLGAAGAVESIYSILALRDQAVPPTINLDNPDEGCDLDFVPHEARQVSGMEYTLCNSFGFGGTNGSLIFKKI

SEQ ID NO: 43229 - protein, 85 aa, Escherichia coli
MAHKKAGGSTRNGRDSEAKRLGVKRFGGESVLAGSIIVRQRGTKFHAGANVGCGRDHTLFAKADGKVKFEVKGPKNRKFISIEAE

SEQ ID NO: 43230 - protein, 334 aa, Escherichia coli
MEYPRVMIRFAVIGTNWITRQFVEAAHESGKYKLTAVYSRSLEQAQHFANDFSVEHLFTSLEAMAESDAIDAVYIASPNSLHFSQTQLFLSHKINVICEKPLASNLAEVDAAIACARENQVVLFEAFKTACLPNFHLLRQALPKVGKLRKVFFNYCQYSSRYQRYLDGENPNTFNPAFSNGSIMDIGFYCLASAVALFGEPKSVQATASLLASGVDAQGVVVMDYGDFSVTLQHSKVSDSVLASEIQGEAGSLVIEKLSECQKVCFVPRGSQMQDLTQPQHINTMLYEAELFATLVDEHLVDHPGLAVSRITAKLLTEIRRQTGVIFPADSVKL

SEQ ID NO: 43231 - protein, 223 aa, Escherichia coli
MLSGCISYALVSHTAKGSSGKYQSQSDTITGLSQAKDSNGTKGYVFVGESLDYLITDGADDIVKMLNDPALNRHNIQVADDARFVLNAGKKKFTGTISLYYYWNNEEEKALATHYGFACGVQHCTRSLENLKGTIHEKNKNMDYSKVMAFYHPFKVRFYEYYSPRGIPGWCFRSITASDCYAGHHYCTAAISGCICSKPIISKRANAFMLFARPQINSAHTSQ

SEQ ID NO: 43232 - protein, 774 aa, Escherichia coli
MTPLRVFRKTTPLVNTIRLSLLPLAGLSFSAFAAQVNIAPGSLDKALNQYAAHSGFTLSVDASLTRGKQSNGLHGDYDVESGLQQLLDGSGLQVKPLGNNSWTLEPAPAPKEDALTVVGDWLGDARENDVFEHAGARDVIRREDFAKTGATTMREVLNRIPGVSAPENNGTGSHDLAMNFGIRGLNPRLASRSTVLMDGIPVPFAPYGQPQLSLAPVSLGNMDAIDVVRGGGAVRYGPQSVGGVVNFVTRAIPQDFGIEAGVEGQLSPTSSQNNPKETHNLMVGGTADNGFGTALLYSGTRGSDWREHSATRIDDLMLKSKYAPDEVHTFNSLLQYYDGEADMPGGLSRADYDADRWQSTRPYDRFWGRRKLASLGYQFQPDSQHKFNIQGFYTQTLRSGYLEQGKRITLSPRNYWVRGIEPRYSQIFMIGPSAHEVGVGYRYLNESTHEMRYYTATSSGQLPSGSSPYDRDTRSGTEAHAWYLDDKIDIGNWTITPGMRFEHIESYQNNAITGTHEEVSYNAPLPALNVLYHLTDSWNLYANTEGSFGTVQYSQIGKAVQSGNVEPEKARTWELGTRYDDGALTAEMGLFLINFNNQYDSNQTNDTVTARGKTRHTGLETQARYDLGTLTPTLDNVSIYASYAYVNAEIREKGDTYGNLVPFSPKHKGTLGVDYKPGNWTFNLNSDFQSSQFADNANTVKESADGSTGRIPGFMLWGARVAYDFGPQMADLNLAFGVKNIFDQDYFIRSYDDNNKGIYAGQPRTLYMQGSLKF

SEQ ID NO: 43233 - protein, 220 aa, Escherichia coli
MLRIIDTETCGLQGGIVEIASVDVIDGKIVNPMSHLVRPDRPISPQAMAIHRITEAMVADKPWIEDVIPHYYGSEWYVAHNASFDRRVLPEMPGEWICTMKLARRLWPGIKYSNMALYKTRKLNVQTPPGLHHHRALYDCYITAALLIDIMNTSGWTAEQMADITGRPSLMTTFTFGKYRGKAVSDVAERDPGYLRWLFNNLDSMSPELRLTLKHYLENT

SEQ ID NO: 43234 - protein, 293 aa, Escherichia coli
MTRQKATLIGLIAIVLWSTMVGLIRGVSEGLGPVGGAAAIYSLSGLLLIFTVGFPRIRQIPKGYLLAGSLLFVSYEICLALSLGYAATHHQAIEVGMVNYLWPSLTILFAILFNGQKTNWLIVPGLLLALVGVCWVLGGDNGLHYDEIINNITTSPLSYFLAFIGAFIWAAYCTVTNKYARGFNGITVFVLLTGASLWVYYFLTPQPEMIFSTPVMIKLISAAFTLGFAYAAWNVGILHGNVTIMAVGSYFTPVLSSALAAVLLSAPLSFSFWQGALMVCGGSLLCWLATRRG

SEQ ID NO: 43235 - protein, 448 aa, Escherichia coli
MVMSQKTLFTKSALAVAVALISTQAWSAGFQLNEFSSSGLGRAYSGEGAIADDAGNVSRNPALITMFDRPTFSAGAVYIDPDVNISGTSPSGRSLKADNIAPTAWVPNMHFVAPINDQFGWGASITSNYGLATEFNDTYAGGSVGGTTDLETMNLNLSGAYRLNNAWSFGLGFNAVYARAKIERFAGDLGQLVAGQIMQSPAGQTQQGQALAATANGIDSNTKIAHLNGNQWGFGWNAGILYELDKNNRYALTYRSEVKIDFKGNYSSDLNRAFNNYGLPIPTATGGATQSGYLTLNLPEMWEVSGYNRVDPQWAIHYSLAYTSWSQFQQLKATSTSGDTLFQKHEGFKDAYRIALGTTYYYDDNWTFRTGIAFDDSPVPAQNRSISIPDQDRFWLSAGTTYAFNKDASVDVGVSYMHGQSVKINEGPYQFESEGKAWLFGTNFNYAF

SEQ ID NO: 43236 - protein, 399 aa, Escherichia coli
MKMRACINNQQIRHHNKCVILELLYRQKRANKSTLARLAQISIPAVSNILQELESEKRVVNIDDESQTRGHSSGTWLIAPEGDWTLCLNVTPTSIECQVANACLSPKGEFEYLQIDAPTPQALLSEIEKCWHRHRKLWPDHTINLALAIHGQVDPVTGVSQTMPQAPWTTPVEVKYLLEEKLGIRVMVDNDCVMLALAEKWQNNSQERDFCVINVDYGIGSSFVINEQIYRGSLYGSGQIGHTIVNPDGVVCDCGRYGCLETVASLSALKKQARVWLKSQPVSTQLDPEKLTTAQLIAAWQSGEPWITSWVDRSANAIGLSLYNFLNILNINQIWLYGRSCAFGENWLNTIIRQTGFNPFDRDEGPSVKATQIGFGQLSRAQQVLGIGYLYVEAQLRQI

SEQ ID NO: 43237 - protein, 543 aa, Escherichia coli
MLTLLHLLSAVALLVWGTHIVRTGVMRVFGARLRTVLSRSVEKKPLAFCAGIGVTALVQSSNATTMLVTSFVAQDLVALAPALVIVLGADVGTALMARILTFDLSWLSPLLIFIGVIFFLGRKQSRAGQLGRVGIGLGLILLALELIVQAVTPITQANGVQVIFASLTGDILLDALIGAMFAIISYSSLAAVLLTATLTAAGIISFPVALCLVIGANLGSGLLAMLNNSAANAAARRVALGSLLFKLVGSLIILPFVHLLAETMGKLSLPKAELVIYFHVFYNLVRCLVMLPFVDPMARFCKTIIRDEPELDTQLRPKHLDVSALDTPTLALANAARETLRIGDAMEQMMEGLNKVMHGEPRQEKELRKLADDINVLYTAIKLYLARMPKEELAEEESRRWAEIIEMSLNLEQASDIVERMGSEIADKSLAARRAFSLDGLKELDALYEQLLSNLKLAMSVFFSGDVTSARRLRRSKHRFRILNRRYSHAHVDRLHQQNVQSIETSSLHLGLLGDMQRLNSLFCSVAYSVLEQPDEDEGRDEY

SEQ ID NO: 43238 - protein, 261 aa, Escherichia coli
MTTIKLIVNSVSKSERESIIAALHGQSIFNGGGLSPLNKISPSHPPKPATVAVPEETEKKARDVNEKTALLKKKSATELGELATSINTIARDAHMEANLEMEIVPQGLRVLIKDDQNRNMFERGSAKIMPFFKTLLVELAPVFDSLDNKIIITGHTDAMAYKNNIYNNWNLSGDRALSARRVLEEAGMPEDKVMQVSAMADQMLLDSKNPQSAGNRRIEIMVLTKSASDTLYQYFGQHGDKVVQPLVQKLDKQQVLSQRTR

SEQ ID NO: 43239 - protein, 785 aa, Escherichia coli
MASSALTLPFSRIAHAVDSAIPTKSDEKVIWSACTVNCGSRCPLRMHVVDGEIKYVETDNTGDDNYDGLHQVRACLRGRSMRRRVYNPDRLKYPMKRVGARGEGKFERISWEEAYDIIATNMQRLIKEYGNESIYLNYGTGTLGGTMTRSWPPGNTLVARLMNCCGGYLNHYGDYSSAQIAEGLNYTYGGWADGNSPSDIENSKLVVLFGNNPGETRMSGGGVTYYLEQARQKSNARMIIIDPRYTDTGAGREDEWIPIRPGTDAALVNGLAYVMITENLVDQAFLDKYCVGYDEKTLPASAPKNGHYKAYILGEGPDGVAKTPEWASQITGVPADKIIKLAREIGSTKPAFISQGWGPQRHANGEIATRAISMLAILTGNVGINGGNSGAREGSYSLPFVRMPTLENPIQTSISMFMWTDAIERGPEMTALRDGVRGKDKLDVPIKMIWNYAGNCLINQHSEINRTHEILQDDKKCELIVVIDCHMTSSAKYADILLPDCTASEQMDFALDASCGNMSYVIFNDQVIKPRFECKTIYEMTSELAKRLGVEQQFTEGRTQEEWMRHLYAQSREAIPELPTFEEFRKQGIFKKRDPQGHHVAYKAFREDPQANPLTTPSGKIEIYSQALADIAATWELPEGDVIDPLPIYTPGFESYQDPLNKQYPLQLTGFHYKSRVHSTYGNVDVLKAACRQEMWINPLDAQKRGIHNGDKVRIFNDRGEVHIEAKVTPRMMPGVVALGEGAWYDPDAKRVDKGGCINVLTTQRPSPLAKGNPSHTNLVQVEKV

SEQ ID NO: 43240 - protein, 383 aa, Escherichia coli
MHLSLMISRHYINRMKLSLMHISILAGIPEEFKVNIYIGWLFKLIPLIMGLICIALGGFVLESSGQSEYFVAGHVLISLAAICLALFTTAFIIISQLTRGVNTFYNTLFPIIGYAGSIITMIWGWALLAGNDVMADEFVAGHVIFGVGMIAACVSTVAASSGHFLLIPKNAAGSKSDGTPVQAYSSLIGNCLIAVPVLLTLLGFIWSITLLRSADITPHYVAGHVLLGLTAICACLIGLVATIVHQTRNTFSTKEHWLWCYWVIFLGSITVLQGIYVLVSSDASARLAPGIILICLGMICYSIFSKVWLLALVWRRTCSLANRIPMIPVFTCLFCLFLASFLAEMAQTDMGYFIPSRVLVGLGAVCFTLFSIVSILEAGSAKK

SEQ ID NO: 43241 - protein, 485 aa, Escherichia coli
MTMQLEVILPLVAYLVVVFGISVYAMRKRSTGTFLNEYFLGSRSMGGIVLAMTLTATYISASSFIGGPGAAYKYGLGWVLLAMIQLPAVWLSLGILGKKFAILARRYNAVTLNDMLFARYQSRLLVWLASLSLLVAFVGAMTVQFIGGARLLETAAGIPYETGLLIFGISIALYTAFGGFRASVLNDTMQGLVMLIGTVVLLIGVVHAAGGLSNAVQTLQTIDPQLVTPQGADDILSPAFMTSFWVLVCFGVIGLPHTAVRCISYKDSKAVHRGIIIGTIVVAILMFGMHLAGALGRAVIPDLTVPDLVIPTLMVKVLPPFAAGIFLAAPMAAIMSTINAQLLQSSATIIKDLYLNIRPDQMQNETRLKRMSAVITLVLGALLLLAAWKPPEMIIWLNLLAFGGLEAVFLWPLVLGLYWERANAKGALSAMIVGGVLYAVLATLNIQYLGFHPIVPSLLLSLLAFLVGNRFGTSVPQATVLTTDK

SEQ ID NO: 43242 - protein, 313 aa, Escherichia coli
MKLIRGIHNLSQAPQEGCVLTIGNFDGVHRGHRALLQGLQEEGRKRNLPVMVMLFEPQPLELFATDKAPARLTRLREKLRYLAECGVDYVLCVRFDRRFAALTAQNFISDLLVKHLRVKFLAVGDDFRFGAGREGDFLLLQKAGMEYGFDITSTQTFCEGGVRISSTAVRQALADDNLALAESLLGHPFAISGRVVHGDELGRTIGFPTANVPLRRQVSPVKGVYAVEVLGLGEKPLPGVANIGTRPTVAGIRQQLEVHLLDVAMDLYGRHIQVVLRKKIRNEQRFASLDELKAQIARDELTAREFFGLTKPA

SEQ ID NO: 43243 - protein, 938 aa, Escherichia coli
MSDYKSTLNLPETGFPMRGDLAKREPGMLARWTDDDLYGIIRAAKKGKKTFILHDGPPYANGSIHIGHSVNKILKDIIVKSKGLSGYDSPYVPGWDCHGLPIELKVEQEYGKPGEKFTAAEFRAKCREYAATQVDGQRKDFIRLGVLGDWSHPYLTMDFKTEANIIRALGKIIGNGHLHKGAKPVHWCVDCRSALAEAEVEYYDKTSPSIDVAFQAVDQDALKAKFAVSNVNGPISLVIWTTTPWTLPANRAISIAPDFDYALVQIDGQAVILAKDLVESVMQRIGVTDYTILGTVKGAELELLRFTHPFMGFDVPAILGDHVTLDAGTGAVHTAPGHGPDDYVIGQKYGLETANPVGPDGTYLPGTYPTLDGVNVFKANDIVVALLQEKGALLHVEKMQHSYPCCWRHKTPIIFRATPQWFVSMDQKGLRAQSLKEIKGVQWIPDWGQARIESMVANRPDWCISRQRTWGVPMSLFVHKDTEELHPRTLELMEEVAKRVEVDGIQAWWDLDAKEILGDEADQYVKVPDTLDVWFDSGSTHSSVVDVRPEFAGHAADMYLEGSDQHRGWFMSSLMISTAMKGKAPYRQVLTHGFTVDGQGRKMSKSIGNTVSPQDVMNKLGADILRLWVASTDYTGEMAVSDEILKRAADSYRRIRNTARFLLANLNGFDPAKDMVKPEEMVVLDRWAVGCAKAAQEDILKAYEAYDFHEVVQRLMRFCSVEMGSFYLDIIKDRQYTAKADSVARRSCQTALYHIAEALVRWMAPILSFTADEVWGYLPGEREKYVFTGEWYEGLFGLADSEAMNDAFWDELLKVRGEVNKVIEQARADKKVGGSLEAAVTLYAEPELSAKLTALGDELRFVLLTSGATVADYNDAPADAQQSEVLKGLKVALSKAEGEKCPRCWHYTQDVGKVAEHAEICGRCVSNVAGDGEKRKFA

SEQ ID NO: 43244 - protein, 326 aa, Escherichia coli
MKKIPLGTTDITLSRMGLGTWAIGGGPAWNGDLDRQICIDTILEAHRCGINLIDTAPGYNFGNSEVIVGQALKKLPREQVVVETKCGIVWERKGSLFNKVGDRQLYKNLSPESIREEVAASLQRLGIDYIDIYMTHWQSVPPFFTPIAETVAVLNELKSEGKIRAIGAANVDADHIREYLQYGELDIIQAKYSILDRAMENELLPLCRDNGIVVQVYSPLEQGLLTGTITRDYVPGGARANKVWFQRENMLKVIDMLEQWQPLCARYQCTIPTLALAWILKQSDLISILSGATAPEQVRENVAALNINLSDADATLMREMAEALER

SEQ ID NO: 43245 - protein, 495 aa, Escherichia coli
MQYIKIHALDNVAVALADLAEGTEVSVDNQTVTLRQDVARGHKFALTDIAKGANVIKYGLPIGYALADIAAGVHVHAHNTRTNLSDLDQYRYQPDFQDLPAQAADREVQIYRRANGDVGVRNELWILPTVGCVNGIARQIQNRFLKETNNAEGTDGVFLFSHTYGCSQLGDDHINTRTMLQNMVRHPNAGAVLVIGLGCENNQVAAFRETLGDIDPERVHFMICQQQDDEIEAGIEHLHQLYNVMRNDKREPGKLSELKFGLECGGSDGLSGITANPMLGRFSDYVIANGGTTVLTEVPEMFGAEQLLMDHCRDEATFEKLVTMVNDFKQYFIAHDQPIYENPSPGNKAGGITTLEDKSLGCTQKAGSSVVVDVLRYGERLKTPGLNLLSAPGNDAVATSALAGAGCHMVLFSTGRGTPYGGFVPTVKIATNSELAAKKKHWIDFDAGQLIHGKAMPQLLEEFIDTIVEFANGKQTCNERNDFRELAIFKSGVTL

SEQ ID NO: 43246 - protein, 276 aa, Escherichia coli
MSQAALNTRNSEEEVSSRRNNGTRLAGILFLLTVLTTVLVSGWVVLGWMEDAQRLPLSKLVLTGERHYTRNDDIRQSILALGEPGTFMTQDVNIIQTQIEQRLPWIKQVSVRKQWPDELKIHLVEYVPIARWNDQHMVDAEGNTFSVPPERTSKQVLPMLYGPEGSANEVLQGYREMGQMLAKDRFTLKEAAMTARRSWQLTLNNDIKLNLGRGDTMKRLARFVELYPVLQQQAQTDGKRISYVDLRYDSGAAVGWAPLPPEESTQQQNQAQAEQQ

SEQ ID NO: 43247 - protein, 466 aa, Escherichia coli
MSVVPVADVLQGRVAVDSEVTVRGWVRTRRDSKAGISFLAVYDGSCFDPVQAVINNSLPNYNEDVLRLTTGCSVIVTGKVVASPGQGQQFEIQASKVEVAGWVEDPDTYPMAAKRHSIEYLREVAHLRPRTNLIGAVARVRHTLAQALHRFFNEQGFFWVSTPLITASDTEGAGEMFRVSTLDLENLPRNDQGKVDFDKDFFGKESFLTVSGQLNGETYACALSKIYTFGPTFRAENSNTSRHLAEFWMLEPEVAFANLNDIAGLAEAMLKYVFKAVLEERADDMKFFAERVDKDAVSRLERFIEADFAQVDYTDAVTILENCGRKFENPVYWGVDLSSEHERYLAEEHFKAPVVVKNYPKDIKAFYMRLNEDGKTVAAMDVLAPGIGEIIGGSQREERLDVLDERMLEMGLNKEDYWWYRDLRRYGTVPHSGFGLGFERLIAYVTGVQNVRDVIPFPRTPRNASF

SEQ ID NO: 43248 - protein, 330 aa, Escherichia coli
MGWHHCQYHSFTALDVINNYVACLLLNRGKEAVMVANINLIKQESYSVVNLEKQLMSNESPKQSLLNDFSHRLKMEGEEQLFHCVNELKYGLSSNNEYDLFKNRETSLWKRKVPESAALAMTGTVYKLFGSRLLNARNQLDKNLLEMAMQMVYGKDMVTKSGDILIDIQLNKDGSLQSKHYTFDVGEVINSYNIDLFVNASSINQTYLHDKNPGDVISLYGTLDNIPLVVKECTGKNHQINVKAKLPQERSEKVEDMCERMRGGISMFNHTTKTAGNIEHNLQLSFLVDSRPSITNKYSAKDVAPDILVLPVNVYHADFKIKINNAVEKT

SEQ ID NO: 43249 - protein, 309 aa, Escherichia coli
MTTKKADYIWFNGEMVRWEDAKVHVMSHALHYGTSVFEGIRCYDSHKGPVVFRHREHMQRLHDSAKIYRFPVSQSIDELMEACRDVIRKNNLTSAYIRPLIFVGDVGMGVNPPAGYSTDVIIAAFPWGAYLGAEALEQGIDAMVSSWNRARPNTIPTAAKAGGNYLSSLLVGSEARRHGYQEGIALDVNGYISEGAGENLFEVKDGVLFTPPFTSSALPGITRDAIIKLAKELGIEVREQVLSRESLYLADEVFMSGTAAEITPVRSVDGIQVGEGRCGPVTKRIQQAFFGLFTGETEDKWGWLDQVNQ

SEQ ID NO: 43250 - protein, 393 aa, Escherichia coli
MHNSPAVSSAKSFDLTSTAFLIVAFLTGIAGALQTPTLSIFLTDEVHARPAMVGFFFTGSAVIGILVSQFLAGRSDKRGDRKSLIVFCCLLGVLACTLFAWNRNYFVLLFVGVFLSSFGSTANPQMFALAREHADKTGREAVMFSSFLRAQVSLAWVIGPPLAYALAMGFSFTVMYLSAAVAFIVCGVMVWLFLPSMRKELPLATGTIEAPRRNRRDTLLLFVICTLMWGSNSLYIINMPLFIINELHLPEKLAGVMMGTAAGLEIPTMLIAGYFAKRLGKRFLMRVAAVGGVCFYAGMLMAHSPVILLGLQLLNAIFIGILGGIGMLYFQDLMPGQAGSATTLYTNTSRVGWIIAGSVAGIVAEIWNYHAVFWFAMVMIIATLFCLLRIKDV

SEQ ID NO: 43251 - protein, 167 aa, Escherichia coli
MATAGMLLKLNSQMNREFYASNLYLHLSNWCSEQSLNGTATFLRAQAQSNVTQMMRMFNFMKSVGATPIVKAIDVPGEKLNSLEELFQKTMEEYEQRSSTLAQLADEAKELNDDSTVNFLRDLEKEQQHDGLLLQTILDEVRSAKLAGMCPVQTDQHVLNVVSHQLH

SEQ ID NO: 43252 - protein, 112 aa, Escherichia coli
MHCADEGFEKPLPHLFEAAVFLMGFTLWGKLEFNKRDGFLDCPHGDRVCGGGMVSKVDILQLTGHFFTNFNGRDYIENIQNLFDNQLASNHIRNQFLIGIQRLGHRKLLIAF

SEQ ID NO: 43253 - protein, 447 aa, Escherichia coli
MLNSILVILCLIAVSAFFSMSEISLAASRKIKLKLLADEGNINAQRVLNMQENPGMFFTVVQIGLNAVAILGGIVGDAAFSPAFHSLFSRYMSAELSEQLSFILSFSLVTGMFILFADLTPKRIGMIAPEAVALRIINPMRFCLYVCTPLVWFFNGLANIIFRIFKLPMVRKDDITSDDIYAVVEAGALAGVLRKQEHELIENVFELESRTVPSSMTPRENVIWFDLHEDEQSLKNKVAEHPHSKFLVCNEDIDHIIGYVDSKDLLNRVLANQSLALNSGVQIRNTLIVPDTLTLSEALESFKTAGEDFAVIMNEYALVVGIITLNDVMTTLMGDLVGQGLEEQIVARDENSWLIDGGTPIDDVMRVLDIDEFPQSGNYETIGGFMMFMLRKIPKRTDSVKFAGYKFEVVDIDNYRIDQLLVTRIDSKATALSPKLPDAKDKEESVA

SEQ ID NO: 43254 - protein, 92 aa, Escherichia coli
MCFINLRSVADTINTQTRRITMFTYYQAENSTAEPALVNAIEQGLRAQHGVVTEDDILMELTKWVEASDNDILSDIYQQTINYVVSGQHPTL

SEQ ID NO: 43255 - protein, 436 aa, Escherichia coli
MGQVLPLVTRQGDRIAIVSGLRTPFARQATAFHGIPAVDLGKMVVGELLARSEIPAEVIEQLVFGQVVQMPEAPNIAREIVLGTGMNVHTDAYSVSRACATSFQAVANVAESLMAGTIRAGIAGGADSSSVLPIGVSKKLARVLVDVNKARTMSQRLKLFSRLRLRDLMPVPPAVAEYSTGLRMGDTAEQMAKTYGITREQQDALAHRSHQRAAQAWSDGKLKEEVMTAFIPPYKQPLVEDNNIRGNSSLADYAKLRPAFDRKHGTVTAANSTPLTDGAAAVILMTESRAKELGLVPLGYLRSYAFTAIDVWQDMLLGPAWSTPLALERAGLTMSDLTLIDMHEAFAAQTLANIQLLGSERFAREALGRAHATGEVDDSKFNVLGGSIAYGHPFAATGARMITQTLHELRRRGGGFGLVTACAAGGLGAAMVLEAE

SEQ ID NO: 43256 - protein, 415 aa, Escherichia coli
MNTNKLSLRRNVIYLAVVQGSNYLLPLLTFPYLVRTLGPENFGIFGFCQATMLYMIMFVEYGFNLTATQSIAKAADSKDKVTSIFWAVIFSKIVLIVITLIFLTSMTLLVPEYNKHAVIIWSFVPALVGNLIYPIWLFQGKEKMKWLTLSSILSRLAIIPLTFIFVNTKSDIAIAGFIQSSANLVAGIIALAIVVHEGWIGKVTLSLHNVRRSLADGFHVFISTSAISLYSTGIVIILGFISGPTSVGNFNAANTIRNALQGLLNPITQAIYPRISSTLVLNRVKGVILIKKSLTCLSLIGGAFSLILLLGASILVKISIGPGYDNAVIVLMIISPLPFLISLSNVYGIQVMLTHNYKKEFSKILIAAGLLSLLLIFPLTTLFKEIGAAITLLATECLVTSLMLMFVRNNKLLVC

SEQ ID NO: 43257 - protein, 605 aa, Escherichia coli
MVVIWRVLVRCGPTGMTDADFGKPIIAVVNSFTQFVPGHVHLRDLGKLVAEQIEAAGGVAKEFNTIAVDDGIAMGHGGMLYSLPSRELIADSVEYMVNAHCADAMVCISNCDKITPGMLMASLRLNIPVIFVSGGPMEAGKTKLSDQIIKLDLVDAMIQGADPKVSDSQSDQVERSACPTCGSCSGMFTANSMNCLTEALGLSQPGNGSLLATHADRKQLFLNAGKRIVELTKRYYEQNDESALPRNIASKAAFENAMTLDIAMGGSTNTVLHLLAAAQEAEIDFTMSDIDKLSRKVPQLCKVAPSTQKYHMEDVHRAGGVIGILGELDRAGLLNRDVKNVLGLTLPQTLEQYDVMLTQDDAVKNMFRAGPAGIRTTQAFSQDCRWDTLDDDRANGCIRSLEHAYSKDGGLAVLYGNFAENGCIVKTAGVDDSILKFTGPAKVYESQDDAVEAILGGKVVAGDVVVIRYEGPKGGPGMQEMLYPTSFLKSMGLGKACALITDGRFSGGTSGLSIGHVSPEAASGGSIGLIEDGDLIAIDIPNRGIQLQVSDAELAARREAQDARGDKAWTPKNRERQVSFALRAYASLATSADKGAVRDKSKLGG

SEQ ID NO: 43258 - protein, 376 aa, Escherichia coli
MAYTTFSQTKNDQLKEPMFFGQPVNVARYDQQKYDIFEKLIEKQLSFFWRPEEVDVSRDRIDYQALPEHEKHIFISNLKYQTLLDSIQGRSPNVALLPLISIPELETWVETWAFSETIHSRSYTHIIRNIVNDPSVVFDDIVTNEQIQKRAEGISSYYDELIEMTSYWHLLGEGTHTVNGKTVTVSLRELKKKLYLCLMSVNALEAIRFYVSFACSFAFAERELMEGNAKIIRLIARDEALHLTGTQHMLNLLRSGADDPEMAEIAEECKQECYDLFVQAAQQEKDWADYLFRDGSMIGLNKDILCQYVEYITNIRMQAVGLDLPFQTRSNPIPWINTWLVSDNVQVAPQEVEVSSYLVGQIDSEVDTDDLSNFQL

SEQ ID NO: 43259 - protein, 190 aa, Escherichia coli
MKLVHMASGLAVAIALAACADKSADIQTPAPAANTSISATQQPAIQQPNVSGTVWIRQKVALPPDAVLTVTLSDASLADAPSKVLAQKAVRTEGKQSPFSFVLSFNPADVQPNARILLSAAITVNDKLVFITDTVQPVINQGGTKADLTLVPVQQTAVPVQASGGATTTVPSTSPTQVNPSSAVPAPTQY

SEQ ID NO: 43260 - protein, 156 aa, Escherichia coli
MNIIEANVATPDARVAITIARFNNFINDSLLEGAIDALKRIGQVKDENITVVWVPGAYELPLAAGALAKTGKYDAVIALGTVIRGGTAHFEYVAGGASNGLAHVAQDSEIPVAFGVLTTESIEQAIERAGTKAGNKGAEAALTALEMINVLKAIKA

SEQ ID NO: 43261 - protein, 139 aa, Escherichia coli
MKPAARRRARECAVQALYSWQLSQNDIADVEYQFLAEQDVKDVDVLYFRELLAGVATNTAYLDGLMKPYLSRLLEELGQVEKAVLRIALYELSKRSDVPYKVAINEAIELAKSFGAEDSHKFVNGVLDKAAPVIRPNKK

SEQ ID NO: 43262 - protein, 495 aa, Escherichia coli [sequence omitted]

SEQ ID NO: 43263 - protein, 549 aa, Escherichia coli
MKNINPTQTAAWQALQKHFDEMKDVTIADLFAKDGDRFSKFSATFDDQMLVDYSKNRITEETLAKLQDLAKECDLAGAIKSMFSGEKINRTENRAVLHVALRNRSNTPILVDGKDVMPEVNAVLEKMKTFSEAIISGEWKGYTGKAITDVVNIGIGGSDLGPYMVTEALRPYKNHLNMHFVSNVDGTHIAEVLKKVNPETTLFLVASKTFTTQETMTNAHSARDWFLKAAGDEKHVAKHFAALSTNAKAVGEFGIDTANMFEFWDWVGGRYSLWSAIGLSIVLSIGFDNFVELLSGAHAMDKHFSTTPAEKNLPVLLALIGIWYNNFFGAETEAILPYDQYMHRFAAYFQQGNMESNGKYVDRNGNVVDYQTGPIIWGEPGTNGQHAFYQLIHQGTKMVPCDFIAPAITHNPLSDHHQKLLSNFFAQTEALAFGKSREVVEQEYRDQGKDPATLDYVVPFKVFEGNRPTNSILLREITPFSLGALIALYEHKIFTQGVILNIFTFDQWGVELGKQLANRILPELKDDKEISSHDSSTNGLINRYKAWRG

SEQ ID NO: 43264 - protein, 59 aa, Escherichia coli
MGITMVGQEQLESSPLCQHSDNEPETKRECSVVIPDDWQLTSQQQAFIELFAEDDQPKQ

SEQ ID NO: 43265 - protein, 81 aa, Escherichia coli
MRIEVTIAKTSPLPAGAIDALAGELSRRIQYAFPDNEGHVSVRYAAANNLSVIGATKEDKQRISEILQETWESADDWFVSE

SEQ ID NO: 43266 - protein, 419 aa, Escherichia coli
MTTQLEQAWELAKQRFAAVGIDVEEALRQLDRLPVSMHCWQGDDVSGFENPEGSLTGGIQATGNYPGKARNASELRADLEQAMRLIPGPKRLNLHAIYLESDTPVSRDQIKPEHFKNWVEWAKANQLGLDFNPSCFSHPLSADGFTLSHADDSIRQFWIDHCKASRRVSAYFGEQLGTPSVMNIWIPDGMKDITVDRLAPRQRLLAALDEVISEKLNPAHHIDAVESKLFGIGAESYTVGSNEFYMGYATSRQTALCLDAGHFHPTEVISDKISAAMLYVPQLLLHVSRPVRWDSDHVVLLDDETQAIASEIVRHDLFDRVHIGLDFFDASINRIAAWVIGTRNMKKALLRALLEPTADVRKLEAAGDYTARLALLEEQKSLPWQAVWEMYCQRHDTPAGSEWLESVRAYEKEILSRRG

SEQ ID NO: 43267 - protein, 437 aa, Escherichia coli
MITNTKLDPIETASVDELQALQTQRLKWTLKHAYENVPMYRRKFDAAGVHPDDFRELSDLRKFPCTTKQDLRDNYPFDTFAVPMEQVVRIHASSGTTGKPTVVGYTQNDIDNWANIVARSLRAAGGSPKDKIHVAYGYGLFTGGLGAHYGAERLGATVIPMSGGQTEKQAQLIRDFQPDMIMVTPSYCLNLIEELERQLGGDASGCSLRVGVFGAEPWTQAMRKEIERRLGITALDIYGLSEVMGPGVAMECLETTDGPTIWEDHFYPEIVNPHDGTPLADGEHGELLFTTLTKEALPVIRYRTRDLTRLLPGTARTMRRMDRISGRSDDMLIIRGVNVFPSQLEEEIVKFEHLSPHYQLEVNRRGHLDSLSVKVELKESSLTLTHEQRCQVCHQLRHRIKSMVGISTDVMIVNCGSIPRSEGKACRVFDLRNIVGA

SEQ ID NO: 43268 - protein, 588 aa, Escherichia coli
MNNSINHKFHHISRAEYQELLAVSRGDAVADYIIDNVSILDLINGGEISGPIVIKGRYIAGVGAEYTDAPALQRIDARGATAVPGFIDAHLHIESSMMTPVTFETATLPRGLTTVICDPHEIVNVMGEAGFAWFARCAEQARQNQYLQVSSCVPALEGCDVNGASFTLEQMLAWRDHPQVTGLAEMMDYPGVISGQNALLDKLDAFRHLTLDGHCPGLGGKELNAYITAGIENCHESYQLEEGRRKLQLGMSLMIREGSAARNLNALAPLINEFNSPQCMLCTDDRNPWEIAHEGHIDALIRRLIEQHNVPLHVAYRVASWSTARHFGLNHLGLLAPGKQADIVLLSDARKVTVQQVLVKGEPIDAQTLQAEESARLAQSAPPYGNTIARQPVSASDFALQFTPGKRYRVIDVIHNELITHSHSSVYSENGFDRDDVSFIAVLERYGQRLAPACGLLGGFGLNEGALAATVSHDSHNIVVIGRSAEEMALAVNQVIQDGGGLCVVRNGQVQSHLPLPIAGLMSTDTAQSLAEQIDALKAAARECGPLPDEPFIQMAFLSLPVIPALKLTSQGLFDGEKFAFTTLEVTE

SEQ ID NO: 43269 - protein, 530 aa, Escherichia coli
MTAKTAPKVTLWEFFQQLGKTFMLPVALLSFCGIMLGIGSSLSSHDVITLIPVLGNPVLQAIFTWMSKIGSFAFSFLPVMFCIAIPLGLARENKGVAAFAGFIGYAVMNLAVNFWLTNKGILPTTDAAVLKANNIQSILGIQSIDTGILGAVIAGIIVWMLHERFHNIRLPDALAFFGGTRFVPIISSLVMGLVGLVIPLVWPIFAMGISGLGHMINSAGDFGPMLFGTGERLLLPFGLHHILVALIRFTDAGGTQEVCGQTVSGALTIFQAQLSCPTTHGFSESATRFLSQGKMPAFLGGLPGAALAMYHCARPENRHKIKGLLISGLIACVVGGTTEPLEFLFLFVAPVLYVIHALLTGLGFTVMSVLGVTIGNTDGNIIDFVVFGILHGLSTKWYMVPVVAAIWFVVYYVIFRFAITRFNLKTPGRDSEVASSIEKAVAGAPGKSGYNVPAILEALGGADNIVSLDNCITRLRLSVKDMSLVNVQALKDNRAIGVVQLNQHNLQVVIGPQVQSVKDEMAGLMHTVQA

SEQ ID NO: 43270 - protein, 251 aa, Escherichia coli
MKLRLSALALGTTLLVGCASSGTDQQGRSDPLEGFNRTMYNFNFNVLDPYIVRPVAVAWRDYVPQPARNGLSNFTGNLEEPAVMVNYFLQGDPYQGMVHFTRFFLNTILGMGGFIDVAGMANPKLQRTEPHRFGSTLGHYGVGYGPYVQLPFYGSFTLRDDGGDMADGFYPVLSWLTWPMSVGKWTLEGIETRAQLLDSDGLLRQSSDPYIMVREAYFQRHDFIANGGELKPQENPNAQAIQDDLKDIDSE

SEQ ID NO: 43271 - protein, 228 aa, Escherichia coli
MLYGFSGVILQGALVTLELAISSVVLAVIIGLIGAGGKLSQNRLSGLIFEGYTTLIRGVPDLVLMLLIFYGLQIALNTVTEAMGVGQIDIDPMVAGIITLGFIYGAYFTETFRGAFMAVPKGHIEAATAFGFTRGQVFRRIMFPSMMRYALPGIGNNWQVILKSTALVSLLGLEDVVKATQLAGKSTWEPFYFAIVCGVIYLVFTTVSNGVLLFLERRYSVGVKRADL

SEQ ID NO: 43272 - protein, 181 aa, Escherichia coli
MSEAPKKRWYVVQAFSGFEGRVATSLREHIKLHNMEDLFGEVMVPTEEVVEIRGGQRRKSERKFFPGYVLVQMVMNDASWHLVRSVPRVMGFIGGTSDRPAPISDKEVDAIMNRLQQVGDKPRPKTLFEPGEMVRVNDGPFADFNGVVEEVDYEKSRLKVSVSIFGRATPVELDFSQVEKA

SEQ ID NO: 43273 - protein, 162 aa, Escherichia coli
MLEDLRANSWSLRPCCMVLAYRVAHFCSVWRKKNVLNNLWAAPLLVLYRIITECFFGYEIQAAATIGRRFTIHHGYAVVINKNVVAGDDFTIRHGVTIGNRGADNMACPHIGNGVELGANVIILGDITLGNNVTVGAGSVVLDSVPDNALVVGEKARVKVIK

SEQ ID NO: 43274 - protein, 279 aa, Escherichia coli
MKNNPLISIYMPTWNRQQLAIRAIKSVLRQDYSNWEMIIVDDCSTSWEQLQQYVTALNDPRITYIHNDINSGACAVRNQAIMLAQGEYITGIDDDDEWTPNRLSVFLAHKQQLVTHAFLYANDYVCQGEVYSQPASLPLYPKSPYSRRLFYKRNIIGNQVFTWAWRFKECLFDTELKAAQDYDIFLRMVVEYGEPWKVEEATQILHINHGEMQITSSPKKFSGYFHFYRKHKDKFDRASKKYQLFTLYQIRNKRMTWRTLLTLLSVRNGKRLADGIRGR

SEQ ID NO: 43275 - protein, 486 aa, Escherichia coli
MGNNLLSAKATLPVYDLNNLAPRIVHLGFGAFHRAHQGVYADILATEHFSDWGYYEVNLIGGEQQIADLQQQDNLYTVAEMSADVWTARVVGVVKKALHVQIDGLETVLAAMCEPQIAIVSLTITEKGYFHSPATGQLMLDHPMVAADVQNPHQPKTATGVIVEALARRKAAGLPAFTVMSCDNMPENGHVMRDVVTSYAQAVDVKLAQWIEDNVTFPSTMVDRIVPAVTEDTLAKIEQLTGVRDPAGVACEPFRQWVIEDNFVAGRPEWEKAGAELVSDVLPYEEMKLRMLNGSHSFLAYLGYLAGYQHINDCMEDEHYRYAAYGLMLQEQAPTLKVQGVDLQDYANRLIARYSNPALRHRTWQIAMDGSQKLPQRMLDSVRWHLAHDSKFDLLALGVAGWMRYVGGVDEQGNPIEISDPLLPVIQKAVQSSAEGKARVQSLLAIKAIFGDDLPDNSLFTARVTETYLSLLAHGAKATVAKYSVK

SEQ ID NO: 43276 - protein, 88 aa, Escherichia coli
MKINNILRNIFMKSKDTLKWFPAQLPEVRIILGDAVVEVAKQGRPINTRTLLDYIEGNIKKTSWLDNKELLQTAISVLKDNQNLNGKM

SEQ ID NO: 43277 - protein, 88 aa, Escherichia coli
MKINNILRNIFMKSKDTLKWFPAQLPEVRIILGDAVVEVAKQGRPINTRTLLDYIEGNIKKKSWLDNKELLQTAISVLKDNQNLNGKM

SEQ ID NO: 43278 - protein, 283 aa, Escherichia coli
MKVLNELRQFYPLDELLRAAEIPRSTFYYHLKALSKPDKYADVKKRISEIYHENRGRYGYRRVTLSLHREGKQINHKAVQRLMGTLSLKAAIKVKRYRSYRGEVGQTAPNVLQRDFKATRPNEKWVTDVTEFAVNGRKLYLSPVIDLFNNEVISYSLSERPVMNMVENMLDQAFKKLNPHEHPVLHSDQGWQYRMRRYQNILKEHGIKQSMSRKGNCLDNAVVECFFGTLKSECFYLDEFSNISELKDAVTEYIEYYNSRRISLKLKGLTPIEYRNQTYMPRV

SEQ ID NO: 43279 - protein, 750 aa, Escherichia coli
MLIYAWKAGRNTWWFAATLTVLGLFVVLNITLFASDYFTGDGINDAVLYTLTNSLTGAGVSKYILPGIGIVLGLTAVFGALGWILRRRRHHPHHFGYSLLALLLALGSVDASPAFRQITELVKSQSRDGDPDFAAYYKEPSKTIPDPKLNLVYIYGESLERTYFDNEAFPDLTPELGALKNEGLDFSHTQQLPGTDYTIAGMVASQCGIPLFAPFEGNASASVSSFFPQNICLGDILKNSGYQNYFVQGANLRFAGKDVFLKSHGFDHLYGSEELKSVVADPHYRNDWGFYDDTVLDEAWKKFEELSRSGQRFSLFTLTVDTHHPDGFISRTCNRKKYDFDGKPNQSFSAVSCSQENIATFINKIKASPWFKDTVIVVSSDHLAMNNTAWKYLNKQDRNNLFFVIRGDKPQQETLAVKRNTMDNGATVLDILGGDNYLGLGRSSLSGQSMSEIFLNIKEKTLAWKPDIIRLWKFPKEMKEFTIDQQKNMIAFSGSHFRLPLLLRVSDKRVEPLPESEYSAPLRFQLADFAPRDNFVWVDRCYKMAQLWAPELALSTDWCVSQGQLGGQQIVQHVDKTTWQGKTAFKDTVIDMARYKGNVDTLKIVDNDIRYKADSFIFNVAGAPEEVKQFSGISRPESWGRWSNAQLGDEVKIEYKHPLPKKFDLVITAKAYGNNASRPIPVRVGNEEQTLVLGNEVTTTTLHFDNPTDADTLVIVPPEPVSTNEGNILGHSPRKLGIGMVEIKVVEREG

SEQ ID NO: 43280 - protein, 519 aa, Escherichia coli
MSTDNKQSLPAITLAAIGVVYGDIGTSPLYTLRECLSGQFGFGVERDAVFGFLSLIFWLLIFVVSIKYLTFVMRADNAGEGGILTLMSLAGRNTSARTTSMLVIMGLIGGSFFYGEVVITPAISVMSAIEGLEIVAPQLDTWIVPLSIIVLTLLFMIQKHGTAMVGKLFAPIMLTWFLILAGLGLRSIIANPEVLHALNPMWAVHFFLEYKTVSFIALGAVVLSITGVEALYADMGHFGKFPIRLAWFTVVLPSLTLNYFGQGALLLKNPEAIKNPFFLLAPDWALIPLLIIAALATVIASQAVISGVFSLTRQAVRLGYLSPMRIIHTSEMESGQIYIPFVNWMLYVAVVIVIVSFEHSSNLAAAYGIAVTGTMVLTSILSTTVARQNWHWNKYFVALILIAFLCVDIPLFTANLDKLLSGGWLPLSLGTVMFIVMTTWKSERFRLLRRMHEHGNSLEAMIASLEKSPPVRVPGTAVYMSRAINVIPFALMHNLKHNKVLHERVDSVNSAHRRRSICP

SEQ ID NO: 43281 - protein, 307 aa, Escherichia coli
MGSTRKGMLNVLIAAVLWGSSGVCAQYIMEQSQMSSQFLTMTRLIFAGLILLTLSFVHGDKIFSIINNHKDAISLLIFSVVGALTVQLTFLLTIEKSNAATATVLQFLSPTIIVAWFSLVRKSRPGILVFCAILTSLVGTFLLVTHGNPTSLSISPAALFWGIASAFAAAFYTTYPSTLIARYGTLPVVGWSMLIGGLILLPFYARQGTNFVVNGSLILAFFYLVVIGTSLTFSLYLKGAQLIGGPKASILSCAEPLSSALLSLLLLGITFTLPDWLGTLLILSSVILISMDSRRRARKINRPARHK

SEQ ID NO: 43282 - protein, 343 aa, Escherichia coli
MSAFTPASEVLLRHSDDFEQSRILFAGDLQDDLPARLDTAASRAHTQQFHHWQVLSRQMGDNARFSLVATADDVADCDTLIYYWPKNKPEAQFQLMNLLSLLPVGTDIFVVGENRSGVRSAEQMLADYAPLNKVDSARRCGLYFGRLEKQPVFDAEKFWGEYSVDGLTVKTLPGVFSRDGLDVGSQLLLSTLTPHTKGKVLDVGCGAGVLSVAFARHSPKIRLTLCDVSAPAVEASRATLAANGVEGEVFASNVFSEVKGRFDMIISNPPFHDGMQTSLDAAQTLIRGAVRHLNSGGELRIVANAFLPYPDVLDETFGFHEVIAQTGRFKVYRAIMTRQAKKG

SEQ ID NO: 43283 - protein, 692 aa, Escherichia coli
MSYTPMSDLGQQGLFDITRTLLQQPDLASLCEALSQLVKRSALADNAAIVLWQAQTQRASYYASREKDTPIKYEDETVLAHGPVRSILSRPDTLHCSYEEFCETWPQLDAGGLYPKFGHYCLMPLAAEGHIFGGCEFIRYDDRPWSEKEFNRLQTFTQIVSVVTEQIQSRVVNNVDYELLCRERDNFRILVAITNAVLSRLDMDELVSEVAKEIHYYFDIDDISIVLRSHRKNKLNIYSTHYLDKQHPAHEQSEVDEAGTLTERVFKSKEMLLINLHERDDLAPYERMLFDTWGNQIQTLCLLPLMSGDTMLGVLKLAQCEEKVFTTTNLNLLRQIAERVAIAVDNALAYQEIHRLKERLVDENLALTEQLNNVDSEFGEIIGRSEAMYSVLKQVEMVAQSDSTVLILGETGTGKELIARAIHNLSGRNNRRMVKMNCAAMPAGLLESDLFGHERGAFTGASAQRIGRFELADKSSLFLDEVGDMPLELQPKLLRVLQEQEFERLGSNKIIQTDVRLIAATNRDLKKMVADREFRSDLYYRLNVFPIHLPPLRERPEDIPLLAKAFTFKIARRLGRNIDSIPAETLRTLSNMEWPGNVRELENVIERAVLLTRGNVLQLSLPDIVLPEPETPPAATVVALEGEDEYQLIVRVLKETNGVVAGPKGAAQRLGLKRTTLLSRMKRLGIDKSALI

SEQ ID NO: 43284 - protein, 447 aa, Escherichia coli
MDQTYSLESFLNHVQKRDPNQTEFAQAVREVMTTLWPFLEQNPKYRQMSLLERLVEPERVIQFRVVWVDDRNQIQVNRAWRVQFSSAIGPYKGGMRFHPSVNLSILKFLGFEQTFKNALTTLPMGGGKGGSDFDPKGKSEGEVMRFCQALMTELYRHLGADTDVPAGDIGVGGREVGFMAGMMKKLSNNTACVFTGKGLSFGGSLIRPEATGYGLVYFTEAMLKRHGMGFEGMRVSVSGSGNVAQYAIEKAMEFGARVITASDSSGTVVDESGFTKEKLARLIEIKASRDGRVADYAKEFGLVYLEGQQPWSLPVDIALPCATQNELDVDAAHQLIANGVKAVAEGANMPTTIEATELFQQAGVLFAPGKAANAGGVATSGLEMAQNAARLGWKAEKVDARLHHIMLDIHHACVEHGGEGEQTNYVQGANIAGFVKVADAMLAQGVI

SEQ ID NO: 43285 - protein, 418 aa, Escherichia coli
MLHPRARTMLLLSLPAVAIGIASSLILIVVMKIASVLQNLLWQRLPGTLGIAQDSPLWIIGVLTLTGIAVGLVIRFSQGHAGPDPACEPLIGAPVPPSALPGLIVALILGLAGGVSLGPEHPIMTVNIALAVAIGARLLPRVNRMEWTILASAGTIGALFGTPVAAALIFSQTLNGSSEVPLWDRLFAPLMAAAAGALTTGLFFHPHFSLPIAHYGQMEMTDILSGAIVAAIAIAAGMVAVWCLPRLHAMMHQMKNPVLVLGIGGFILGILGVIGGPVSLFKGLDEMQQMVANQAFSTSDYFLLAVIKLAALVVAAASGFRGGRIFPAVFVGVALGLMLHEHVPAVPAAITVSCAILGIVLVVTRDGWLSLFMAAVVVPNTTLLPLLCIVMLPAWLLLAGKPMMMVNRPKQQPPHDNV

SEQ ID NO: 43286 - protein, 499 aa, Escherichia coli
MLNLFVGLDIYTGLLLLLALAFVLFYEAINGFHDTANAVAAVIYTRAMQPQLAVVMAAFFNFFGVLLGGLSVAYAIVHMLPTDLLLNMGSTHGLAMVFSMLLAAIIWNLGTWFFGLPASSSHTLIGAIIGIGLTNALLTGSSVMDALNLREVTKIFSSLIVSPIVGLVIAGGLIFLLRRYWSGTKKRDRIHRIPEDRKKKKGKRKPPFWTRIALIVSAAGVAFSHGANDGQKGIGLVMLVLVGIAPAGFVVNMNASGYEITRTRDAVTNFEHYLQQHPELPQKLIAMEPPLPAASTDGTQVTEFHCHPANTFDAIARVKTMLPGNMESYEPLSVSQRSQLRRIMLCISDTSAKLAKLPGVSKEDQNLLKKLRSDMLSTIEYAPVWIIMAVALALGIGTMIGWRRVAMTIGEKIGKRGMTYAQGMAAQMTAAVSIGLASYIGMPVSTTHVLSSAVAGTMVVDGGGLQRKTVTSILMAWVFTLPAAIFLSGGLYWIALQLI

SEQ ID NO: 43287 - protein, 631 aa, Escherichia coli
MAGKFRCILLLIAGLFVSSLSYAENTEIPSYEEGISLFDVEATLQPDGVLDIKENIHFQARNQQIKHGFYRDLPRLWMQPDGDAALLNYHIVGVTRDGIPEPWHLDWHIGLMSIVVGDKQRFLPQGDYHYQIHYQVKNAFLREGDSDLLIWNVTGNHWPFEIYKTRFSLQFSNIAGNPFSEIDLFTGEEGDTYRNGRILEDGRIESRDPFYREDFTVLYRWPHALLSNASAPQTTNIFSHLLLPSTSSLLIWFPCLFLVCGWLYLWKRRPQFTPVDVIETDVIPPDYTPGMLRLDAKLVYDDKGFCADIVNLIVKGKIHLEDQSDKNQQILIRVNEGATRNNAVLLPAEQLLLEALFRKGDKVVLTGRRNRVLRRAFLRMQKFYLPRKKSSFYRSDTFLQWGGLAILAVILYGNLSPVGWAGMSLVGDMFIMICWIIPFLFCSLELLFARDDDKPCVNRVIITLFLPLICSGVAFYSLYINVGDVFFYWYMPAGYFTAVCLTGYLTGMGYIFLPKFTQTGQQRYAHGEAIVNYLARKEAATHSGRRRKGETRKLDYALLGWAISANLGREWALRIAPSLSSAIRAPEIARNGVLFSLQTHLSCGANTSLLGRSYSGGGAGGGAGGGGGGGW

SEQ ID NO: 43288 - protein, 430 aa, Escherichia coli
MLDPNLLRNEPDAVAEKLARRGFKLDVDKLGALEERRKVLQVKTENLQAERNSRSKSIGQAKARGEDIEPLRLEVNKLGEELDAAKAELDALQAEIRDIALTIPNLPADEVPVGKDENDNVEVSRWGTPREFDFEVRDHVTLGEMHSGLDFAAAVKLTGSRFVVMKGQIARMHRALSQFMLDLHTEQHGYSENYVPYLVNQDTLYGTGQLPKFAGDLFHTRPLEEEADTSNYALIPTAEVPLTNLVRGEIIDEDDLPIKMTAHTPCFRSEAGSYGRDTRGLIRMHQFDKVEMVQIVRPEDSMAALEEMTGHAEKVLQLLGLPYRKIILCTGDMGFGACKTYDLEVWIPAQNTYREISSCSNVWDFQARRMQARCRSKSDKKTRLVHTLNGSGLAVGRTLVAVMENYQQADGRIEVPEVLRPYMNGLEYIG

SEQ ID NO: 43289 - protein, 462 aa, Escherichia coli
MENKSARAKVQAFGGFLTAMVIPNIGAFIAWGFITALFIPTGWLPNEHFAKIVGPMITYLLPVMIGSTGGHLVGGKRGAVMGGIGTIGVIVGAEIPMFLGSMIMGPLGGLVIKYVDKALEKRIPAGFEMVINNFSLGIAGMLLCLLGFEVIGPAVLIANTFVKECIEALVHAGYLPLLSVINEPAKVLFLNNAIDQGVYYPLGMQQASVNGKSIFFMVASNPGPGLGLLLAFTLFGKGMSKRSAPGAMIIHFLGGIHELYFPYVLMKPLTIIAMIAGGMSGTWMFNLLDGGLVAGPSPGSIFAYLALTPKGSFLATIAGVTVGTLVSFAITSLILKMEKTVETESEDEFAQSANAVKAMKQEGAFSLSRVKRIAFVCDAGMGSSAMGATTFRKRLEKAGLAIEVKHYAIENVPADADIVVTHASLEGRVKRVTDKPLILINNYIGDPKLDTLFNQLTAEHKH

SEQ ID NO: 43290 - protein, 147 aa, Escherichia coli
MRLSDYFPESSISVIHSAKDWQEAIDFSMVSLLDKNYISENYIQAIKDSTINNGPYYILAPGVAMPHARPECGALKTGMSLTLLEQGVYFPGNDEPIKLLIGLSAADADSHIGAIQALSELLCEEEILEQLLTASSEKQLADIISRG

SEQ ID NO: 43291 - protein, 271 aa, Escherichia coli
MAFKFKTFAAVGALIGSLALVGCGQDEKDPNHIKVGVIVGAEQQVAEVAQKVAKDKYGLDVELVTFNDYVLPNEALSKGDIDANAFQHKPYLDQQLKDRGYKLVAVGNTFVYPIAGYSKKIKSLDELQDGSQVAVPNDPTNLGRSLLLLQKVGLIKLKDGVGLLPTVLDVVENPKNLKIVELEAPQLPRSLDDAQIALAVINTTYASQIGLTPAKDGIFVEDKESPYVNLIVTREDNKDAENVKKFVQAYQSDEVYEAANKVFNGGAVKGW

SEQ ID NO: 43292 - protein, 514 aa, Escherichia coli
MKIRSQVGMVLNLDKCIGCHTCSVTCKNVWTGREGMEYAWFNNVETKPGIGYPKNWEDQEEWQGGWVRDVNGKIRPRLGNKMGVITKIFANPVVPQIDDYYEPFTFDYEHLHSAPEGKHIPTARPRSLIDGKRMDKVIWGPNWEELLGGEFEKRARDRNFEAMQKEMYGQFENTFMMYLPRLCEHCLNPSCVATCPSGAIYKREEDGIVLIDQDKCRGWRLCISGCPYKKIYFNWKSGKSEKCIFCYPRIESGQPTVCSETCVGRIRYLGVLLYDADRIEEAASTEREVDLYERQCEVFLDPHDPSVIEEALKQGIPQNVIDAAQRSPVYKMAMDWKLALPLHPEYRTLPMVWYVPPLSPIQSYADAGGLPKSEGVLPAIESLRIPVQYLANMLSAGDTGPVLRALKRMMAMRHYMRSQTVEGVTDTRAIDEVGLSVAQVEEMYRYLAIANYEDRFVIPTSHREMAGDAFAERNGCGFTFGDGCHGSDSKFNLFNSSRIDAINITEVRDKAEGE

SEQ ID NO: 43293 - protein, 400 aa, Escherichia coli
MTQFASPVLHSLLDTDAYKLHMQQAVFHHYYDVHVAAEFRCRGDDLLGIYADAIREQVQAMQHLRLQDDEYQWLSALPFFKADYLNWLREFRFNPEQVTVSNDNGKLDIRLSGPWREVILWEVPLLAVISEMVHRYRSPQADVAQALDTLESKLVDFSALTAGLDMSRFHLMDFGTRRRFSREVQETIVKRLQQESWFVGTSNYDLARRLSLTPMGTQAHEWFQAHQQISPDLANSQRAALAAWLEEYPDQLGIALTDCITMDAFLRDFGVEFASRYQGLRHDSGDPVEWGEKAIAHYEKLGIDPQSKTLVFSDNLDLRKAVELYRHFSSRVQLSFGIGTRLTCDIPQVKPLNIVIKLVECNGKPVAKLSDSPGKTICHDKAFVRALRKAFDLPHIKKAS

SEQ ID NO: 43294 - protein, 514 aa, Escherichia coli
MGTCYTRAEMKDGFMPHTIKKMSLIGLILMIFTSVFGFANSPSAYYLMGYSAIPFYIFSALLFFIPFALMMAEMGAAYRKEEGGIYSWMNNSVGPRFAFIGTFMWFSSYIIWMVSTSAKVWVPFSTFLYGSDMTQHWRIAGLEPTQVVGLLAVAWMILVTVVASKGINKIARITAVGGIAVMCLNLVLLLVSITILLLNGGHFAQDINFLASPNPGYQSGLAMLSFVVFAIFAYGGIEAVGGLVDKTENPEKNFAKGIVFAAIVISIGYSLAIFLWGVSTNWQQVLSNGSVNLGNITYVLMKSLGMTLGNALHLSPEASLSLGVWFARITGLSMFLAYTGAFFTLCYSPLKAIIQGTPKALWPEPMTRLNAMGMPSIAMWMQCGLVTVFILLVSFGGGTASAFFNKLTLMANVSMTLPYLFLALAFPFFKARQDLDRPFVIFKTHLSAMIATVVVVLVVTFANVFTIIQPVVEAGDWDSTLWMIGGPVFFSLLAMAIYQNYCSRVAKNPQWAVE

SEQ ID NO: 43295 - protein, 104 aa, Escherichia coli
MDDTSRDPAITEDEIRALQFSAGDVAEIEQTILSFVDACHTRKVAMVVGSTINTLKDRDGKRWGNLPDIYCAYLIRCLVFRGELVGYGDLFRMRYSEIKRPVTL

SEQ ID NO: 43296 - protein, 382 aa, Escherichia coli
MIKSALLVLEDGTQFHGRAIGATGSAVGEVVFNTSMTGYQEILTDPSYSRQIVTLTYPHIGNVGTNDADEESSQVHAQGLVIRDLPLIASNFRNTEDLSSYLKRHNIVAIADIDTRKLTRLLREKGAQNGCIIAGDNPDAALALEKARAFPGLNGMDLAKEVTTAEAYSWTQGSWTLTGGLPEAKKEDELPFHVVAYDFGAKRNILRMLVDRGCRLTIVPAQTSAEDVLKMNPDGIFLSNGPGDPAPCDYAITAIQKFLETDIPVFGICLGHQLLALASGAKTVKMKFGHHGGNHPVKDVEKNVVMITAQNHGFAVDEATLPANLRVTHKSLFDGTLQGIHRTDKPAFSFQGHPEASPGPHDAAPLFDHFIELIEQYRKTAK

SEQ ID NO: 43297 - protein, 230 aa, Escherichia coli
MMTKIKLLMLIIFYLIISASAHAAGGIALGATRIIYPADAKQTAVWIRNSHTNERFLVNSWIENSSGVKEKSFIITPPLFVSEPKSENTLRIIYTGPPLAADRESLFWMNVKTIPSVDKNALNGRNVLQLAILSRMKLFLRPIQLQELPAEAPDTLKFSRSGNYINVHNPSPFYVTLVNLQVGSQKLGNAMAAPRVNSQIPLPSGVQGKLKFQTVNDYGSVTPVREVNLN

SEQ ID NO: 43298 - protein, 337 aa, Escherichia coli
MMTTMLEVAKRAGVSKATVSRVLSGNGYVSQETKDRVFQAVEESGYRPNLLARNLSAKSTQTLGLVVTNTLYHGIYFSELLFHAARMAEEKGRQLLLADGKHSAEEERQAIQYLLDLRCDAIMIYPRFLSVDEIDDIIDAHSQPIMVLNRRLRKNSSHSVWCDHKQTSFNAVAELINAGHQEIAFLTGSMDSPTSIERLAGYKDALAQHGIALNEKLIANGKWTPASGAEGVEMLLERGAKFSALVASNDDMAIGAMKALHERGVAVPEQVSVIGFDDIAIAPYTVPALSSVKIPVTEMIQEIIGRLIFMLDGGDFSPPKTFSGKLIRRDSLIAPSR

SEQ ID NO: 43299 - protein, 408 aa, Escherichia coli
MGINEIIMYIMMFFMLIAAVDRILSQFGGSARFLGKFGKSIEGSGGQFEEGFMAMGALGLAMVGMTALAPVLAHVLGPVIIPVYEMLGANPSMFAGTLLACDMGGFFLAKELAGGDVAAWLYSGLILGSMMGPTIVFSIPVALGIIEPSDRRYLALGVLAGIVTIPIGCIAGGLVAMYSGVQINGQPVEFTFALILMNMIPVIIVAILVALGLKFIPEKMINGFQIFAKFLVALITLGLAAAVVKFLLGWELIPGLDPIFMAPGDKPGEVMRAIEVIGSISCVLLGAYPMVLLLTRWFEKPLMSVGKVLNMNNIAAAGMVATLANNIPMFGMMKQMDTRGKVINCAFAVSAAFALGDHLGFAAANMNAMIFPMIVGKLIGGVTAIGVAMMLVPKEDATATKTEAEAQS

SEQ ID NO: 43300 - protein, 348 aa, Escherichia coli
MKKWSRHLLAAGALALGMSAAHADDNNTLYFYNWTEYVPPGLLEQFTKETGIKVIYSTYESNETMYAKLKTYKDGAYDLVVPSTYYVDKMRKEGMIQKIDKSKLTNFSNLDPDMLNKPFDPNNDYSIPYIWGATAIGVNGDAVDPKSVTSWADLWKPEYKGSLLLTDDAREVFQMALRKLGYSGNTTDPKEIEAAYNELKKLMPNVAAFNSDNPANPYMEGEVNLGMIWNGSAFVARQAGTPIDVVWPKEGGIFWMDSLAIPANAKNKEGALKLINFLLRPDVAKQVAETIGYPTPNLAARKLLSPEVANDKTLYPDAETIKNGEWQNDVGAASSIYEEYYQKLKAGR

SEQ ID NO: 43301 - protein, 152 aa, Escherichia coli
MFRGATLVNLDSKGRLSVPTRYREQLLENAAGQMVCTIDIYHPCLLLYPLPEWEIIEQKLSRLSSMNPVERRVQRLLLGHASECQMDGAGRLLIAPVLRQHAGLTKEVMLVGQFNKFELWDETTWHQQVKEDIDAEQLATGDLSERLQDLSL

SEQ ID NO: 43302 - protein, 438 aa, Escherichia coli
MDSTLISTRPDEGTLSLSRARRAALGSFAGAVVDWYDFLLYGITAALVFNREFFPQVSPAMGTLAAFATFGVGFLFRPLGGVIFGHFGDRLGRKRMLMLTVWMMGIATALIGILPSFSTIGWWAPILLVTLRAIQGFAVGGEWGGAALLSVESAPKNKKAFYSSGVQVGYGVGLLLSTGLVSLISMMTTDEQFLSWGWRIPFLFSIVLVLGALWVRNGMEESAEFEQQQHYQAAAKKRIPVIEALLRHPGAFLKIIALRLCELLTMYIVTAFALNYSTQNMGLPRELFLNIGLLVGGLSCLTIPCFAWLADRFGRRRVYITGTLIGTLSAFPFFMALEAQSIFWIVFFSIMLANIAHDMVVCVQQPMFTEMFGASYRYSGAGVGYQVASVVGGGFTPFIAAALITYFAGNWHSVAIYLLAGCLISAMTALLMKDSQRA

SEQ ID NO: 43303 - protein, 261 aa, Escherichia coli
MVLMSETKNELEDLLEKAATEPAHRPAFFRTLLESTVWVPGTAAQGEAVVEDSALDLQHWEKEDGTSVIPFFTSLEALQQAVEDEQAFVVMPVRTLFEMTLGETLFLNAKLPTGKEFMPREISLLIGEEGNPLSSQEILEGGESLILSEVAEPPAQMIDSLTTLFKTIKPVKRAFICSIKENEEAQPNLLIGIEADGDIEEIIQATGSVATDTLPGDEPIDICQVKKGEKGISHFITEHIAPFYERRWGGFLRDFKQNRII

SEQ ID NO: 43304 - protein, 192 aa, Escherichia coli
MEYRSLTLDDFLSRFQLLRPQINRETLNHRQAAVLIPIVRRPQPGLLLTQRSIHLRKHAGQVAFPGGAVDDTDASAIAAALREAEEEVAIPPSAVEVIGVLPPVDSVTGYQVTPVVGIIPPDLPYRASEDEVSAVFEMPLAQALHLGRYHPLDIYRRGDSHRVWLSWYEQYFVWGMTAGIIRELALQIGVKP

SEQ ID NO: 43305 - protein, 866 aa, Escherichia coli
MYRTHRQHSLLSSGGVPSFIGGLVVFVSAAFNAQAETWFDPAFFKDDPSMVADLSRFEKGQKITPGVYRVDIVLNQTIVDTRNVNFVEITPEKGIAACLTTESLDAMGVNTDAFPAFKQLDKQACVPLAEIIPDASVTFNVNKLRLEISVPQIAIKSNARGYVPPERWDEGINALLLGYSFSGANSIHSSADSDSGDSYFLNLNSGVNLGPWRLRNNSTWSRSSGQTAEWKNLSSYLQRAVIPLKGELTVGDDYTAGDFFDSVSFRGVQLASDDNMLPDSLKGFAPVVRGIAKSNAQITIKQNGYTIYQTYVSPGAFEISDLYSTSSSGDLLVEIKEADGSVNSYSVPFSSVPLLQRQGRIKYAVTLAKYRTNSNEQQESKFAQATLQWGGPWGTTWYGGGQYAEYYRAAMFGLGFNLGDFGAISFDATQAKSTLADQSEHKGQSYRFLYAKTLNHLGTNFQLMGYRYSTSGFYTLSDTMYKHMDGYEFNDGDDEDTPMWSRYYNLFYTKRGKLQVNISQQLGEYGSFYLSGSQQTYWHTDQQDRLLQFGYNTQIKDLSLGISWNYSKSRGQPDADQVFALNFSLPLNLLLPRSNDSYTRKKNYAWMTSNTSIDNEGHTTQNLGLTETLLDDGNLSYSVQQGYNSEGKTANGSASMDYKGAFADARVGYNYSDNGSQQQLNYALSGSLVAHSQGITLGQSLGETNVLIAAPGAENTRVANSTGLKTDWRGYTVVPYATSYRENRIALDAASLKRNVDLENAVVNVVPTKGALVLAEFNAHAGARVLMKTSKQGIPLRFGAIATLDGVQANSGIIDDDGSLYMAGLPAKGTISVRWGEAPDQICHINYELTEQQINSAITRMDAICR

SEQ ID NO: 43306 - protein, 504 aa, Escherichia coli
MQQSTPYLSFRGIGKTFPGVKALTDISFDCYAGQVHALMGENGAGKSTLLKILSGNYAPTTGSVVINGQEMSFSDTTAALNAGVAIIYQELHLVPEMTVAENIYLGQLPHKGGIVNRSLLNYEAGLQLKHLGMDIDPDTPLKYLSIGQWQMVEIAKALARNAKIIAFDEPTSSLSAREIDNLFRVIRELRKEGRVILYVSHRMEEIFALSDAITVFKDGRYVKTFTDMQQVDHDALVQAMVGRDIGDIYGWQPRSYGEERLRLDAVKAPGVRTPISLAVRSGEIVGLFGLVGAGRSELMKGMFGGTQITAGQVYIDQQPIDIRKPSHAIAAGMMLCPEDRKAEGIIPVHSVRDNINISARRKHVLGGCVINNGWEENNADHHIRSLNIKTPGAEQLIMNLSGGNQQKAILGRWLSEEMKVILLDEPTRGIDVGAKHEIYNVIYALAAQGVAVLFASSDLPEVLGVADRIVVMREGEIAGELLHEQADERQALSLAMPKVSQAVA

SEQ ID NO: 43307 - protein, 440 aa, Escherichia coli
MQAYFDQLDRVRYEGSKSSNPLAFRHYNPDELVLGKRMEEHLRFAACYWHTFCWNGADMFGVGAFNRPWQQPGEALALAKRKADVAFEFFHKLHVPFYCFHDVDVSPEGASLKEYINNFAQMVDVLAGKQEESGVKLLWGTANCFTNPRYGAGAATNPDPEVFSWAATQVVTAMEATHKLGGENYVLWGGREGYETLLNTDLRQEREQLGRFMQMVVEHKHKIGFQGTLLIEPKPQEPTKHQYDYDAATVYGFLKQFGLEKEIKLNIEANHATLAGHSFHHEIATAIALGLFGSVDANRGDAQLGWDTDQFPNSVEENALVMYEILKAGGFTTGGLNFDAKVRRQSTDKYDLFYGHIGAMDTMALALKIAARMIEDGELDKRIAQRYSGWNSELGQQILKGQMSLADLAKYAQEHHLSPVHQSGRQEQLENLVNHYLFDK

SEQ ID NO: 43308 - protein, 240 aa, Escherichia coli
MNSFCHAGRVGQKTREGIKMPGTGKMKHVSLTLQVENDLKHQLSIGALKPGARLITKNLAEQLGMSITPVREALLRLVSVNALSVAPAQAFTVPEVGKRQLDEINRIRYELELMAVALAVENLTPQDLAELQELLEKLQQAQEKGDMEQIINVNRLFRLAIYHRSNMPILCEMIEQLWVRMGPGLHYLYEAINPAELREHIENYHLLLAALKAKDKEGCRHCLAEIMQQNIAILYQQYNR

SEQ ID NO: 43309 - protein, 128 aa, Escherichia coli
MASSSLIMGNNMHVKYLAGIVGAALLMAGCSSSNELSAAGQSVRIVDEQPGAECQLIGTATGKQSNWLSGQHGEEGGSMRGAANDLRNQAAAMGGNVIYGISSPSQGMLSSFVPTDSQIIGQVYKCPN

SEQ ID NO: 43310 - protein, 428 aa, Escherichia coli
MKLYNLKDHNEQVSFAQAVTQGLGKNQGLFFPHDLPEFSLTEIDEMLKLDFVTRSAKILSAFIGDEIPQEILEERVRAAFAFPAPVANVESDVGCLELFHGPTLAFKDFGGRFMAQMLTHIAGDKPVTILTATSGDTGAAVAHAFYGLPNVKVVILYPRGKISPLQEKLFCTLGGNIETVAIDGDFDACQALVKQAFDDEELKVALGLNSANSINISRLLAQICYYFEAVAQLPQETRNQLVVSVPSGNFGDLTAGLLAKSLGLPVKRFIAATNVNDTVPRFLHDGQWSPKATQATLSNAMDVSQPNNWPRVEELFRRKIWQLKELGYAAVDDETTQQTMRELKELGYTSEPHAAVAYRALRDQLNPGEYGLFLGTAHPAKFKESVEAILGETLDLPKELAERADLPLLSHNLPADFAALRKLMMNHQ

SEQ ID NO: 43311 - protein, 98 aa, Escherichia coli
MKKMQSIVLALSLVLVAPMAAQAAEITLVPSVKLQIGDRDNRGYYWDGGHWRDHGWWKQHYEWRGNRWHLHGPPPPPRHHKKAPHDHHGGHGPGKHHR

SEQ ID NO: 43312 - protein, 402 aa, Escherichia coli
MKRLQAFKFQLRPGGQQECEMRRFAGACRFVFNRALARQNENHEAGNKYIPYGKMASWLVEWKNATETQWLKDSPSQPLQQSLKDLERAYKNFFRKRAAFPRFKKRGQNDAFRYPQGVKLDQENSRIFLPKLGWMRYRNSRQVTGVVKNVTVSQSCGKWYISIQTESEVSTPVHPSASMVGLDAGVAKLATLSDGTVFEPVNSFQKNQKKLARLQRQLSRKVKFSNNWQKQKRKIQRLHSCIANIRRDYLHKVTTAVSKNHAMIVIEDLKVSNMSKSAAGTVSQPGRNVRAKSGLNRSILDQGWYEMRRQLAYKQLWRGGQVLAVPPAYTSQRCAYCGHTAKENRLSQSKFRCQVCGYTANADVNGARNILAAGHAVLACGEMVQSGRPLKQEPTEMIQATA

SEQ ID NO: 43313 - protein, 402 aa, Escherichia coli
MKRLQAFKFQLRPGGQQEREMRRFAGACRFVFNRALALQNENHEAGNKYIPYGKMASWLVEWKNATETQWLKDAPSQPLQQSLKDLERAYKNFFRKRAAFPRFKKRGQNDAFRYPQGVKLDQENSRIFLPKLGWMRYRNSRQVTGVVKNVTASQSCGKWYISIQTENEVSTPVHPSALMVGLDAGVAKLATLSDGTVFGPVNSFQKNQKTLARLQRQLSRKVKFSNNWQKQKRKIQRLHSCIANICRDYLHKVTTTVSKNHAMIVIEDLKVSNMSKSAAGTVSQPGRNVRAKSGLNRSILDQGWYEMRRQLEYKQLWRGGQVLAVPPAYTSQRCACCGHTAKENRLSQSKFRCQACGYTANADVNGARNILAAGHAVLACGEMVQSGRPLKQEPTEMIQATA

SEQ ID NO: 43314 - protein, 956 aa, Escherichia coli
MIIHFTLNGAPQELTVNPGENVQKLLFNMGMHSVRNSDDGFGFAGSDAIIFNGNIVNASLLIAAQLEKADIRTAESLGKWNELSLVQQAMVDVGVVQSGYNDPAAALIITDLLDRIAAPTREEIDDALSGLFSRDAGWQQYYQVIELAVARKNNPQATIDIAPTFRDDLEVIGKHYPKTDAAKMVQAKPCYVEDRVTADACVIKMLRSPHAHALITHLDVSKAEALPGVVHVITHLNCPDIYYTPGGQSAPEPSPLDRRMFGKKMRHVGDRVAAVVAESEEIALEALKLIDVEYEVLKPVMSIDEAMAEDAPVVHDEPVVYVAGAPDTLEDDNSHAAQRGEHMIINFPIGSRPRKNIAASIHGHIGDMDKGFADADVIIERTYNSTQAQQCPTETHICFTRMDGDRLVIHASTQVPWHLRRQVARLVGMKQHKVHVIKERVGGGFGSKQDILLEEVCAWATCVTGRPVLFRYTREEEFIANTSRHVAKVTVKLGAKKDGRLTAVKMDFRANTGPYGNHSLTVPCNGPALSLPLYPCDNVDFQVTTYYSNICPNGAYQGYGAPKGNFAITMALAELAEQLQIDQLEIIERNRVHEGQELKILGAIGEGKAPTSVPSAASCALEEILRQGREMIQWSSPKPQNGDWHIGRGVAIIMQKSGIPDIDQANCMIKLESDGTFIVHSGGADIGTGLDTVVTKLAAEVLHCPPQDVHVISGDTDHALFDKGAYASSGTCFSGNAARLAAENLREKILFHGAQMLGEPVADVQLATPGVVRGKKGEVSFGDIAHKGETGTGFGSLVGTGSYITPDFAFPYGANFAEVAVNTRTGEIRLDKFYALLDCGTPVNPELALGQIYGATLRAIGHSMSEEIIYDAEGHPLTRDLRSYGAPKIGDIPRDFRAVLVPSDDKVGPFGAKSISEIGVNGAAPAIATAIHDACGIWLREWHFTPEKILTALEKI

SEQ ID NO: 43315 - protein, 263 aa, Escherichia coli
MSSNFRHQLLSLSLLVGIAAPWAAFAQAPISSVGSGSVEDRVTQLERISNAHSQLLTQLQQQLSDNQSDIDSLRGQIQENQYQLNQVVERQKQILLQIDSLSSGGAAAQSTSGDQSGAAASTTPTADAGTANAGAPVKSGNANTDYNAAIALVQDKSRQDDAMVAFQNFIKNYPDSTYLPNANYWLGQLNYNKGKKDDAAYYFASVVKNYPKSPKAADAMFKVGVIMQDKGDTAKAKAVYQQVISKYPGTDGAKQAQKRLNAM

SEQ ID NO: 43316 - protein, 663 aa, Escherichia coli
MSSRKELANAIRALSMDAVQKAKSGHPGAPMGMADIAEVLWRDFLKHNPQNPSWADRDRFVLSNGHGSMLIYSLLHLTGYDLPMEELKNFRQLHSKTPGHPEVGYTAGVETTTGPLGQGIANAVGMAIAEKTLAAQFNRPGHDIVDHYTYAFMGDGCMMEGISHEVCSLAGTLKLGKLIAFYDDNGISIDGHVEGWFTDDTAMRFEAYGWHVIRDIDGHDAASIKRAVEEARAVTDKPSLLMCKTIIGFGSPNKAGTHDSHGAPLGDAEIALTREQLGWKYAPFEIPSEIYAQWDAKEAGQAKESAWNEKFAAYAKAYPQEAAEFTRRMKGEMPSDFDAKAKEFIAKLQANPAKIASRKASQNAIEAFGPLLPEFLGGSADLAPSNLTLWSGSKAINEDAAGNYIHYGVREFGMTAIANGISLHGGFLPYTSTFLMFVEYARNAVRMAALMKQRQVMVYTHDSIGLGEDGPTHQPVEQVASLRVTPNMSTWRPCDQVESAVAWKYGVERQDGPTALILSRQNLAQQERTEEQLANIARGGYVLKDCAGQPELIFIATGSEVELAVAAYEKLTAEGVKARVVSMSSTDAFDKQDAAYRESVLPKAVTARVAVEAGIADYWYKYVGLNGAIVGMTTFGESAPAELLFEEFGFTVDNVVAKAKELL

SEQ ID NO: 43317 - protein, 385 aa, Escherichia coli
MLTVKQIEAAKPKEKPYRLLDGNGLYLYVPVSGKKVWQLRYKIDGKEKILTVGKYPLMTLQEARDKAWTARKDISVGIDPVKAKKASSNNNSFSAIYKEWYEHKKQVWSVGYATELAKMFDDDILPIIGGLEIQDIEPMQLLEVIRRFEDRGAMERANKARRRCGEVFRYAIVTGRAKYNPAPDLADAMKGYRKKNFPFLPADQIPAFNKALATFSGSIVSLIATKVLRYTALRTKELRSMLWKNVDFENRIITIDASVMKGRKIHVVPMSDQVVELLTTLSSITKPVSEFVFAGRNDKKKPICENAVLLVIKQIGYEGLESGHGFRHEFSTIMNEHEWPADAIEVQLAHANGGSVRGIYNHAQYLDKRREMMQWWADWLDEKVE

SEQ ID NO: 43318 - protein, 523 aa, Escherichia coli
MMLDIVELSRLQFALTAMYHFLFVPLTLGMAFLLAIMETVYVLSGKQIYKDMTKFWGKLFGINFALGVATGLTMEFQFGTNWSYYSHYVGDIFGAPLAIEGLMAFFLESTFVGLFFFGWDRLGKVQHMCVTWLVALGSNLSALWILVANGWMQNPIASDFNFETMRMEMVSFSELVLNPVAQVKFVHTVASGYVTGAMFILGISAWYMLKGRDFAFAKRSFAIAASFGMAAVLSVIVLGDESGYEMGDVQKTKLAAIEAEWETQPAPAAFTLFGIPDQEEETNKFAIQIPYALGIIATRSVDTPVIGLKELMVQHEERIRNGMKAYSLLEQLRSGSTDQAVRDQFNSMKKDLGYGLLLKRYTPNVADATEAQIQQATKDSIPRVAPLYFAFRIMVACGFLLLAIIALSFWSVIRNRIGEKKWLLRAALYGIPLPWIAVEAGWFVAEYGRQPWAIGEVLPTAVANSSLTAGDLIFSMVLICGLYTLFLVAELFLMFKFARLGPSSLKTGRYHFEQSSTTTQPAR

SEQ ID NO: 43319 - protein, 353 aa, Escherichia coli
MAIDENKQKALAAALGQIEKQFGKGSIMRLGEDRSMDVETISTGSLSLDIALGAGGLPMGRIVEIYGPESSGKTTLTLQVIAAAQREGKTCAFIDAEHALDPIYARKLGVDIDNLLCSQPDTGEQALEICDALARSGAVDVIVVDSVAALTPKAEIEGEIGDSHMGLAARMMSQAMRKLAGNLKQSNTLLIFINQIRMKIGVMFGNPETTTGGNALKFYASVRLDIRRIGAVKEGENVVGSETRVKVVKNKIAAPFKQAEFQILYGEGINFYGELVDLGVKEKLIEKAGAWYSYKGEKIGQGKANATAWLKDNPETAKEIEKKVRELLLSNPNSTPDFSVDDSEGVAETNEDF

SEQ ID NO: 43320 - protein, 78 aa, Escherichia coli
MKFMLNATGLPLQDLVFGASVYFPPFFKAFAFGFVIWLVVHRLLRGWIYAGDIWHPLLMDLSLFAICVCLALAILIAW

SEQ ID NO: 43321 - protein, 299 aa, Escherichia coli
MRLPCSGNTDCVVTMSIKTIKYFSTIIVAVVAVLAGWWLWNYYMQSPWTRDGKIRAEQVSITPQVSGRIVELNIKDNQLVNAGDLLLTIDKTPFQIAELNAQAQLAKAQSDLAKANNEANRRRHLSQNFISAEELDTANLNVKAMQASVDAAQATLKQAQWQLAQTEIRAPVSGWVTNLTTRIGDYADTGKPLFALVDSHSFYVIGYFEETKLRHIREGAPAQITLYSDNKTLQGHVSSIGRAIYDQSVESDSSLIPDVKPNVPWVRLAQRVPVRFALDKVPGDVTLVSGTTCSIAVGQ

SEQ ID NO: 43322 - protein, 547 aa, Escherichia coli
MNLDFWMTVFNKFARTFKSHWLLYLCVIVFGITNLVASSGAHMVQRLLFFVLTILVVKRISSLPLRLLVAAPFVLLTAADMSISLYSWCTFGTTFNDGFAISVLQSDPDEVVKMLGMYIPYLCAFAFLSLLFLAVIIKYDVSLPTKKVTGILLLIVISGSLFSACQFAYKDAKNKKAFSPYILASRFATYTPFFNLNYFALAAKEHQRLLSIANTVPYFQLSVRDTGIDTYVLIVGESVRVDNMSLYGYTRSTTPQVEAQRKQIKLFNQAISGAPYTALSVPLSLTADSVLSHDIHNYPDNIINMANQAGFQTFWLSSQSAFRQNGTAVTSIAMRAMETVYVRGFDELLLPHLSQALQQNTQQKKLIVLHLNGSHEPACSAYPQSSAVFQPQDDQDACYDNSIHYTDSLLGQVFELLKDRRASVMYFADHGLERDPTKKNVYFHGGREASQQAYHVPMFIWYSPVLGDGVDRTTENNIFSTAYNNYLINAWMGVTKPEQPQTLEEVIAHYKGDSRVVDANHDVFDYVMLRKEFTEDKQGNPTPEGQG

SEQ ID NO: 43323 - protein, 536 aa, Escherichia coli
MSIPFTRWPEEFARRYREKGYWQDLPLTDILTRHAASDSIAVIDGERQLSYRELNQAADNLACSLRRQGIKPGETALVQLGNVAELYITFFALLKLGVAPVLALFSHQRSELNAYASQIEPALLIADRQHALFSGDDFLNTFVTEHSSIRVVQLLNDSGEHNLQDAINHPAEDFTATPSPADEVAYFQLSGGTTGTPKLIPRTHNDYYYSVRRSVEICQFTQQTRYLCAIPAAHNYAMSSPGSLGVFLAGGTVVLAADPSATLCFPLIEKHQVNVTALVPPAVSLWLQALIEGESRAQLASLKLLQVGGARLSATLAARIPAEIGCQLQQVFGMAEGLVNYTRLDDSAEKIIHTQGYPMCPDDEVWVADAEGNPLPQGEVGRLMTRGPYTFRGYYKSPQHNASAFDANGFYCSGDLISIDPEGYITVQGREKDQINRGGEKIAAEEIENLLLRHPAVIYAALVSMEDELMGEKSCAYLVVKEPLRAVQVRRFLREQGIAEFKLPDRVECVDSLPLTAVGKVDKKQLRQWLASRASA

SEQ ID NO: 43324 - protein, 269 aa, Escherichia coli
MPELPEVETSRRGIEPHLVGATILHAVVRNGRLRWPVSEEIYRLSDQPVLSVQRRAKYLLLELPEGWIIIHLGMSGSLRILPEELPPEKHDHVDLVMSNGKVLRYTDPRRFGAWLWTKELEGHNVLTHLGPEPLSDDFNGEYLHQKCAKKKTAIKPWLMDNKLVVGVGNIYASESLFAAGIHPDRLASSLSLAECELLARVIKAVLLRSIEQGGTTLKDFLQSDGKPGYFAQELQVYGRKGEPCRVCGTPIVATKHAQRATFYCRQCQK

SEQ ID NO: 43325 - protein, 396 aa, Escherichia coli
MHLLVHPNGSKYWRLQYRYEGKQKMLALGVYPEITLADARVRRDEARKLLANGVDPGDKKKNDKVEQSKARTFKEVAIEWHGTNKKWSEDHAHRVLKSLEDNLFAALGERNIAELKTRDLLAPIKAVEMSGRLEVAARLQQRTTAIMRYAVQSGLIDYNPAQEMAGAVASCNRQHRPALELKRIPELLTKIDSYTGRPLTRWAIELTLLIFIRSSELRFARWSEIDFEASIWTIPPEREPIPGVKHSHRGSKMRTTHLVPLSTQALAILKQIKQFYGAHDLIFIGDHDSHKPMSENTVNSALRVMGYDTKVEVCGHGFRTMACSSLVESGLWSRDAVERQMSHMARNSVRAAYIHKAEHLEERRLMLQWWADFLDVNRERFISPFEYAKINNPLKQ

SEQ ID NO: 43326 - protein, 63 aa, Escherichia coli
MPTKPPYPREAYIVTIEKGKPGQTVTWYQLRADHPKPDSLISEHPTAQEAMDAKKRYEDPDKE

SEQ ID NO: 43327 - protein, 253 aa, Escherichia coli
MAQVAIITASDSGIGKECALLLAQQGFDIGITWHSDEEGAKDTAREVVSHGVRAEIVQLDLGNLPEGALALEKLIQRLGRIDVLVNNAGAMTKAPFLDMAFDEWRKIFTVDVDGAFLCSQIAARQMVKQGQGGRIINITSVHEHTPLPDASAYTAAKHALGGLTKAMALELVRHKILVNAVAPGAIATPMNGMDDSDVKPDAEPSIPLRRFGATHEIASLVVWLCSEGANYTTGQSLIVDGGFMLANPQFNPE

SEQ ID NO: 43328 - protein, 438 aa, Escherichia coli
MGNTSIQTQSYRAVDKDAGQSRSYIIPFALLCSLFFLWAVANNLNDILLPQFQQAFTLTNFQAGLIQSAFYFGYFIIPIPAGILMKKLSYKAGIITGLFLYALGAALFWPAAEIMNYTLFLVGLFIIAAGLGCLETAANPFVTVLGPESSGHFRLNLAQTFNSFGAIIAVVFGQSLILSNVPHQSQDVLDKMSPEQLSAYKHSLVLSVQTPYMIIVAIVLLVALLIMLTKFPALQSDNHSDAKQGSFSASLSRLARIRHWRWAVLAQFCYVGAQTACWSYLIRYAVEEIPGMTAGFAANYLTGTMVCFFIGRFTGTWLISRFAPHKVLAAYALIAMALCLISAFAGGHVGLIALTLCSAFMSIQYPTIFSLGIKNLGQDTKYGSSFIVMTIIGGGIVTPVMGFVSDAAGNIPTAELIPALCFAVIFIFARFRSQTATN

SEQ ID NO: 43329 - protein, 16 aa, Escherichia coli
MTRVQFKHHHHHHHPD

SEQ ID NO: 43330 - protein, 299 aa, Escherichia coli
MTDNTRLRIAMQKSGRLSDDSRELLARCGIKINLHTQRLIAMAENMPIDILRVRDDDIPGLVMDGVVDLGIIGENVLEEELLNRRAQGEDPRYFTLRRLDFGGCRLSLATPVDEAWDGPLSLNGKRIATSYPHLLKRYLDQKGISFKSCLLNGSVEVAPRAGLADAICDLVSTGATLEANGLREVEVIYRSKACLIQRDGEMEESKQQLIDKLLTRIQGVIQARESKYIMMHAPTERLDEVIALLPGAERPTILPLAGDQQRVAMHMVSSETLFWETMEKLKALGASSILVLPIEKMME

SEQ ID NO: 43331 - protein, 485 aa, Escherichia coli
MNTSHVRVVTHMCGFLVWLYSLSMLPPMVVALFYKEKSLFVFFITFVIFFCIGGGAWYTTKKSGIQLRTRDGFIIIVMFWILFSVISAFPLWIDSELNLTFIDALFEGVSGITTTGATVIDDVSSLPRAYLYYRSQLNFIGGLGVIVLAVAVLPLLGIGGAKLYQSEMPGPFKDDKLTPRLADTSRTLWITYSLLGIACIVCYRLAGMPLFDAICHGISTVSLGGFSTHSESIGYFNNYLVELVAGSFSLLSAFNFTLWYIVISRKTIKPLIRDIELRFFLLIALGVIIVTSFQVWHIGMYDLHGSFIHSFFLASSMLTDNGLATQDYASWPTHTIVFLLLSSFFGGCIGSTCGGIKSLRFLILFKQSKHEINQLSHPRALLSVNVGGKIVTDRVMRSVWSFFFLYTLFTVFFILVLNGMGYDFLTSFATVAACINNMGLGFGATASSFGVLNDIAKCLMCIAMILGRLEIYPVIILFSGFFWRS

SEQ ID NO: 43332 - protein, 396 aa, Escherichia coli
MIMKRQRNVNLLLMLVLLVAVGQMAQTIYIPAIADMARDLNVREGAVQSVMGAYLLTYGVSQLFYGPISDRVGRRPVILVGMSIFMLATLVAVTTSSLTVLIAASAMQGMGTGVGGVMARTLPRDLYERTQLRHANSLLNMGILVSPLLAPLIGGLLDTMWNWRACYLFLLVLCAGVTFSMARWMPETRPVDAPRTRLLTSYKTLFGNSGFNCYLLMLIGGLAGIAAFEACSGVLMGAVLGLSSMTVSILFILPIPAAFFGAWFAGRPNKRFSTLMWQSVICCLLAGLLMWIPDWFGVMNVWTLLVPAALFFFGAGMLFPLATSGAMEPFPFLAGTAGALVGGLQNIGSGVLASLSAMLPQTGQGSLGLLMTLMGLLIVLCWLPLATRMSHQGQPV

SEQ ID NO: 43333 - protein, 588 aa, Escherichia coli
MKLPVREFDAVVIGAGGAGMRAALQISQSGQTCALLSKVFPTRSHTVSAQGGITVALGNTHEDNWEWHMYDTVKGSDYIGDQDAIEYMCKTGPEAILELEHMGLPFSRLDDGRIYQRPFGGQSKNFGGEQAARTAAAADRTGHALLHTLYQQNLKNHTTIFSEWYALDLVKNQDGAVVGCTALCIETGEVVYFKARATVLATGGAGRIYQSTTNAHINTGDGVGMAIRAGVPVQDMEMWQFHPTGIAGAGVLVTEGCRGEGGYLLNKHGERFMERYAPNAKDLAGRDVVARSIMIEIREGRGCDGPWGPHAKLKLDHLGKEVLESRLPGILELSRTFAHVDPVKEPIPVIPTCHYMMGGIPTKVTGQALTVNEKGEDVVVPGLFAVGEIACVSVHGANRLGGNSLLDLVVFGRAAGLHLQESIAEQGALRDASESDVEASLDRLNRWNNNRNGEDPVAIRKALQECMQHNFSVFREGDAMAKGLEQLKVIRERLKNARLDDTSSEFNTQRVECLELDNLMETAYATAVSANFRTESRGAHSRFDFPDRDDENWLCHSLYLPESESMTRRSVNMEPKLRPAFPPKIRTY

SEQ ID NO: 43334 - protein, 103 aa, Escherichia coli
MTNFTTSTPHDALFKTFLTHPDTARDFMEIHLPKDLRELCDLDSLKLESASFVDEKLRALHSDILWSVKTREGDGYIYVVIEHQSREDIHMAFRLMRYSMAVM

SEQ ID NO: 43335 - protein, 260 aa, Escherichia coli
MTNFTTSTPHDALFKSFLMHPDTARDFMEIHLPKDLRELCDLDSLKLESASFVDEKLRALHSDILWSVKTREGDGYIYVVIEHQSREDIHMAFRLMRYSMAVMQRHIEHDKRRPLPLVIPMLFYHGSRSPYPWSLCWLDEFADPTTARKLYNAAFPLVDITVVPDDEIVQHRRVALLELIQKHIRQRDLMGLIDQLVVLLVTECANDSQITALLNYILLTGDEERFNEFISELTSRMPQHRERIMTIAERIHNDDCRANS

SEQ ID NO: 43336 - protein, 454 aa, Escherichia coli
MSDNDTIVAQATPPGRGGVGILRISGFKAREVAETVLGKLPKPRYADYLPFKDADGSVLDQGIALWFPGPNSFTGEDVLELQGHGGPVILDLLLKRILTIPGLRIARPGEFSERAFLNDKLDLAQAEAIADLIDASSEQAARSALNSLQGAFSARVNHLVEALTHLRIYVEAAIDFPDEEIDFLSDGKIEAQLNDVIADLDAVRAEARQGSLLREGMKVVIAGRPNAGKSSLLNALAGREAAIVTDIAGTTRDVLREHIHIDGMPLHIIDTAGLREASDEVERIGIERAWQEIEQADRVLFMVDGTTTDAVDPAEIWPEFIARLPAKLPITVVRNKADITGETLGMSEVNGHALIRLSARTGEGVDVLRNHLKQSMGFDTNMEGGFLARRRHLQALEQAAEHLQQGKAQLLGAWAGELLAEELRLAQQNLSEITGEFTSDDLLGRIFSSFCIGK

SEQ ID NO: 43337 - protein, 240 aa, Escherichia coli
MIEFKNVSKHFGPTQVLHNIDLNIAQGEVVVIIGPSGSGKSTLLRCINKLEEITSGDLIVDGLKVNDPKVDERLIRQEAGMVFQQFYLFPHLTALENVMFGPLRVRGANKEEAEKLARELLAKVGLAERAHHYPSELSGGQQQRVAIARALAVKPKMMLFDEPTSALDPELRHEVLKVMQDLAEEGMTMVIVTHEIGFAEKVASRLIFIDKGRIAEDGNPQVLIKNPPSQRLQEFLQHVS

SEQ ID NO: 43338 - protein, 219 aa, Escherichia coli
MQFDWSAIWPAIPLLIEGAKMTLWISVLGLAGGLVIGLLAGFARTFGGWIANHVALVFIEVIRGTPIVVQVMFIYFALPMAFNDLRIDPFTAAVVTIMINSGAYIAEITRGAVLSIHKGFREAGLALGLSRWETIRYVILPLALRRMLPPLGNQWIISIKDTSLFIVIGVAELTRQGQEIIAGNFRALEIWSAVAVFYLIITLVLSFILRRLERRMKIL

SEQ ID NO: 43339 - protein, 336 aa, Escherichia coli
MRRELAIEFSRVTESAALAGYKWLGRGDKNTADGAAVNAMRIMLNQVNIDGTIVIGEGEIDEAPMLYIGEKVGTGRGDAVDIAVDPIEGTRMTAMGQANALAVLAVGDKGCFLNAPDMYMEKLIVGPGAKGTIDLNLPLADNLRNVAAALGKPLSELTVTILAKPRHDAVIAEMQQLGVRVFAIPDGDVAASILTCMPDSEVDVLYGIGGAPEGVVSAAVIRALDGDMNGRLLARHDVKGDNEENRRIGEQELARCKAMGIEAGKVLRLGDMARSDNVIFSATGITKGDLLEGISRKGNIATTETLLIRGKSRTIRRIQSIHYLDRKDPEMQVHIL

SEQ ID NO: 43340 - protein, 714 aa, Escherichia coli
MSNVQEWQQLANKELSRREKTVDSLVHQTAEGIAIKPLYTEADLDNLEVTGTLPGLPPYVRGPRATMYTAQPWTIRQYAGFSTAKESNAFYRRNLAAGQKGLSVAFDLATHRGYDSDNPRVAGDVGKAGVAIDTVEDMKVLFDQIPLDKMSVSMTMNGAVLPVLAFYIVAAEEQGVTPDKLTGTIQNDILKEYLCRNTYIYPPKPSMRIIADIIAWCSGNMPRFNTISISGYHMGEAGANCVQQVAFTLADGIEYIKAAISAGLKIDDFAPRLSFFFGIGMDLFMNVAMLRAARYLWSEAVSGFGAQDPKSLALRTHCQTSGWSLTEQDPYNNVIRTTIEALAATLGGTQSLHTNAFDEALGLPTDFSARIARNTQIIIQEESELCRTVDPLAGSYYIESLTDQIVKQARAIIQQIDEAGGMAKAIEAGLPKRMIEEASAREQSLIDQGKRVIVGVNKYKLDHEDETDVLEIDNVMVRNEQIASLERIRATRDDAAVTAALNALTHAAQHNENLLAAAVNAARVRATLGEISDALEVAFDRYLVPSQCVTGVIAQSYHQSEKSASEFDAIVAQTEQFLADNGRRPRILIAKMGQDGHDRGAKVIASAYSDLGFDVDLSPMFSTPEEIARLAVENDVHVVGASSLAAGHKTLIPELVEALKKWGREDICVVAGGVIPPQDYAFLQERGVAAIYGPGTPMLDSVRDVLNLISQHHD

SEQ ID NO: 43341 - protein, 451 aa, Escherichia coli
MFSEVMRYILDLGPTVMLPIVIIIFSKILGMKAGDCFKAGLHIGIGFVGIGLVIGLMLDSIGPAAKAMAENFDLNLHVVDVGWPGSSPMTWASQIALVAIPIAILVNVAMLLTRMTRVVNVDIWNIWHMTFTGALLHLATGSWMIGMAGVVIHAAFVYKLGDWFARDTRNFFELEGIAIPHGTSAYMGPIAVLVDAIIEKIPGVNRIKFSADDIQRKFGPFGEPVTVGFVMGLIIGILAGYDVKGVLQLAVKTAAVMLLMPRVIKPIMDGLTPIAKQARSRLQAKFGGQEFLIGLDPALLLGHTAVVSASLIFIPLTILIAVCVPGNQVLPFGDLATIGFFVAMAVAVHRGNLFRTLISGVIIMSITLWIATQTIGLHTQLAANAGALKAGGMVASMDQGGSPITWLLIQVFSPQNIPGFIIIGAIYLTGIFMTWRRARGFIKQEKVVLAE

SEQ ID NO: 43342 - protein, 904 aa, Escherichia coli
MGFALMALLTLTSTLVGWYNLRFISQVEKDNTQALIPTMNMARQLSEASAWELFAAQNLTSADNEKMWQAQGRMLTAQSLKINALLQALREQGFDTTAIEQQEQEISRSLRQQGELVGQRLQLRQQQQQLSQQIVAAADEIARLAQGQANNATTSAGATQAGIYDLIEQDQRQAAESALDRLIDIDLEYVNQMNELRLSALRVQQMVMNLGLEQIQKNAPTLEKQLNNAVKILQRRQIRIEDPGVRAQVATTLTTVSQYSDLLALYQQDSEISNHLQTLAQNNIAQFAQFSSEVSQLVDTIELRNQHGLAHLEKASARGQYSLLLLGMVSLCALILILWRVVYRSVTRPLAEQTQALQRLLDGDIDSPFPETAGVRELDTIGRLMDAFRSNVHALNRHREQLAAQVKARTAELQELVIEHRQARAEAEKASQAKSAFLAAMSHEIRTPLYGILGTAQLLADNPALNAQRDDLRAITDSGESLLTILNDILDYSAIEAGGKNVSVSDEPFEPRPLLESTLQLMSGRVKGRPIRLATAIADDMPCALMGDPRRIRQVITNLLSNALRFTDEGYIILRSRTDGEQWLVEVEDSGCGIDPAKLAEIFQPFVQVSGKRGGTGLGLTISSRLAQAMGGELSATSTPEVGSCFCLRLPLRVATAPVPKTVNQAVRLDGLRLLLIEDNPLTQRITIEMLKTSGAQIVAVGNAAQALETLQNSEPFAAALVDFDLPDIDGITLARQLAQQYPSLVLIGFSAHVIDETLRQRTSSLFRGIIPKPVPREVLGQLLAHYLQLQVNNDQSLDVSQLNEDAQLMGTEKIHEWLVLFTQHALPLLDEIDIARASQDSEKIKRAAHQLKSSCSSLGMHIASQLCAQLEQQPLSAPLPHEEITRSVAALEAWLHKKDLNAI

SEQ ID NO: 43343 - protein, 246 aa, Escherichia coli
MLINRNIVALFALPFMASATASELSIGAGAAYNESPYRGYNENTKAIPLISYEGDTFYVRQTTLGFILSQSEKNELSLTASWMPLEFDPTDNDDYAMQQLDKRDSTAMAGVAWYHHERWGTVKASAAADVLDNSNGWVGELSVFHKMQIGRLSLTPALGVLYYDENFSDYYYGISESESRRSGLASYSAQDAWVPYVSLTAKYPIGEHVVLMASAGYSELPEEITDSPMIDRNESFTFVTGVSWRF

SEQ ID NO: 43344 - protein, 457 aa, Escherichia coli
MALWGGRFTQAADQRFKQFNDSLRFDYRLAEQDIVGSVAWSKALVTVGVLTAEEQAQLEEALNVLLEDVRARPQQILESDAEDIHSWVEGKLIDKVGQLGKKLHTGRSRNDQVATDLKLWCKDTVSELLTANRQLQSALVETAQNNQDAVMPGYTHLQRAQPVTFAHWCLAYVEMLARDESRLQDALKRLDVSPLGCGALAGTAYEIDREQLAGWLGFASATRNSLDSVSDRDHVLELLSAAAIGMVHLSRFAEDLIFFNTGEAGFVELSDRVTSGSSLMPQKKNPDALELIRGKCGRVQGALTGMMMTLKGLPLAYNKDMQEDKEGLFDALDTWLDCLHMAALVLDGIQVKRPRCQEAAQQGYANATELADYLVAKGVPFREAHHIVGEAVVEAIRQGKPLEDLPLSELQKFSQVIDEDVYPILSLQSCLDKRAAKGGVSPQQVAQAIAFAQARLG

SEQ ID NO: 43345 - protein, 417 aa, Escherichia coli
MSHWATFKQTATNLWVTLRHDILALAVFLNGLLIFKTIYGMSVNLLDIFHIKAFSELDLSLLANAPLFMLGVFLVLNSIGLLFRAKLAWAISIILLLIALIYTLHFYPWLKFSIGFCIFTLVFLLILRKDFSHSSAAAGTIFAFISFTTLLFYSTYGALYLSEGFNPRIESLMTAFYFSIETMSTVGYGDIVPVSESARLFTISVIISGITVFATSMTSIFGPLIRGGFNKLVKGNNHTMHRKDHFIVCGHSILAINTILQLNQRGQNVTVISNLPEDDIKQLEQRLGDNADVIPGDSNDSSVLKKAGIDRCRAILALSDNDADNAFVVLSAKDMSSDVKTVLAVSDSKNLNKIKMVHPDIILSPQLFGSEILARVLNGEEINNDMLVSMLLNSGHGIFSDNDELETKADSKESAQK

SEQ ID NO: 43346 - protein, 115 aa, Escherichia coli
MAIIPKNYARLESGYREKALKIYPWVCGRCSREFVYSNLRELTVHHIDHDHTNNPEDGSNWELLCLYCHDHEHSKYTEADQYGTTVIAGEDAQKDVGEAKYNPFADLKAMMNKKK

SEQ ID NO: 43347 - protein, 955 aa, Escherichia coli
MGIKQHNGNTKADRLAELKIRSPSIQLIKFGAIGLNAIIFSPLLIAADTGSQYGTNITINDGDRITGDTADPSGNLYGVMTPAGNTPGNINLGNDVTVNVNDASGYAKGIIIQGKNSSLTANRLTVDVVGQTSAIGINLIGDYTHADLGTGSTIKSNDDGIIIGHSSTLTATQFTIENSNGIGLTINDYGTSVDLGSGSKITTDGSTGVYIGGLNGNNANGAARFTATDLTIDVQGYSAMGINVQKNSVVDLGTNSTIKTNGDNAHGLWSFGQVSANALTVDVTGAAANGVEVRGGTTTIGADSHISSAQGGGLVTSGSDAIINFTGTAAQRNSIFSGGSYGASAQTATAVVNMQNTDITVDRNGSLALGLWALSGGRITGDSLAITGAAGARGIYAMTNSQIDLTSDLVIDMSTPDQMAIATQHDDGYAASRINASGRMLINGSVLSKGGLINLDMHPGSVWTGSSLSDNVNGGKLDVAMNNSVWNVTSNSNLDTLALSHSTVDFASHGSTAGTFATLNVENLSGNSTFIMRADVVGEGNGVNNKGDLLNISGSSAGNHVLAIRNQGSEATTGNEVLTVVKTTDGAASFSASSQVELGGYLYDVRKNGTNWELYASGTVPEPTPNPEPTPAPAQPPIVNPDPTPEPAPTPKPTTTADAGGNYLNVGYLLNYVENRTLMQRMGDLRNQSKDGNIWLRSYGGSLDSFASGKLSGFDMGYSGIQFGGDKRLSDVMPLYVGLYIGSTHASPDYSGGDGTARSDYMGMYASYMAQNGFYSDLVIKASRQKNSFHVLDSQNNGVNANGTANGMSISLEAGQRFNLSPTGYGFYIEPQTQLTYSHQNEMTMKASNGLNIHLNHYESLLGRASMILGYDITAGNSQLNVYVKTGAIREFSGDTEYLLNNSREKYSFKGNGWNNGVGVSAQYNKQHTFYLEADYTQGNLFDQKQVNGGYRFSF

SEQ ID NO: 43348 - protein, 83 aa, Escherichia coli
MANVEIYTKETCPYCHRAKALLSSKGVSFQELPIDGNAAKREEMIKRSGRTTVPQIFIDAQHIGGCDDLYALDARGGLDPLLK

SEQ ID NO: 43349 - protein, 143 aa, Escherichia coli
MQEIMQFVGRHPILSIAWIALLVAVLVTTFKSLTSKVKVITRGEATRLINKEDAVVVDLRQRDDFRKGHIAGSINLLPSEIKANNVGELEKHKDKPVIVVDGSGMQCQEPANALTKAGFAQVFVLKEGVAGWAGENLPLVRGK

SEQ ID NO: 43350 - protein, 289 aa, Escherichia coli
MSILIDKNTKVICQGFTGSQGTFHSEQAIAYGTKMVGGVTPGKGGTTHLGLPVFNTVREAVAATGATASVIYVPAPFCKDSILEAIDAGIKLIITITEGIPTLDMLTVKVKLDEAGVRMIGPNCPGVITPGECKIGIQPGHIHKPGKVGIVSRSGTLTYEAVKQTTDYGFGQSTCVGIGGDPIPGSNFIDILEMFEKDPQTEAIVMIGEIGGSAEEEAAAYIKEHVTKPVVGYIAGVTAPKGKRMGHAGAIIAGGKGTADEKFAALEAAGVKTVRSLADIGEALKTVLK

SEQ ID NO: 43351 - protein, 432 aa, Escherichia coli
MKAILIPFLSLLIPLTPQSAFAQSEPELKLESVVIVSRHGVRAPTKATQLMQDVTPDAWPTWPVKLGWLTPRGGELIAYLGHYQRQRLVADGLLAKKGCPQSGQVAIIADVDERTRKTGEAFAAGLAPDCAITVHTQADTSSPDPLFNPLKTGVCQLDNANVTDAILSRAGGSIADFTGHRQTAFRELERVLNFPQSNLCLKREKQDESCSLTQALPSELKVSADNVSLTGAVSLASMLTEIFLLQQAQGMPEPGWGRITDSHQWNTLLSLHNAQFYLLQRTPEVARSRATPLLDLIKTALTPHPPQKQAYGVTLPTSVLFIAGHDTNLANLGGALELNWTLPGQPDNTPPGGELVFERWRRLSDNSQWIQVSLVFQTLQQMRDKTPLSLNTPPGEVKLTLAGCEERNAQGMCSLAGFTQIVNEARIPACSL

SEQ ID NO: 43352 - protein, 372 aa, Escherichia coli
MHNQAPIQRRKSTRIYVGNVPIGDGAPIAVQSMTNTRTTDVEATVNQIKALERVGADIVRVSVPTMDAAEAFKLIKQQVNVPLVADIHFDYRIALKVAEYGVDCLRINPGNIGNEERIRMVVDCARDKNIPIRIGVNAGSLEKDLQEKYGEPTPQALLESAMRHVDHLDRLNFDQFKVSVKASDVFLAVESYRLLAKQIDQPLHLGITEAGGARSGAVKSAIGLGLLLSEGIGDTLRVSLAADPVEEIKVGFDILKSLRIRSRGINFIACPTCSRQEFDVIGTVNALEQRLEDIITPMDVSIIGCVVNGPGEALVSTLGVTGGNKKSGLYEDGVRKDRLDNNDMIDQLEARIRAKASQLDEARRIDVQQVEK

SEQ ID NO: 43353 - protein, 337 aa, Escherichia coli
MNTEATHDQNEALTTGARLRNAREQLGLSQQAVAERLCLKVSTVRDIEEDKAPADLASTFLRGYIRSYARLVHIPEEELLPGLEKQAPLRAAKVAPMQSFSLGKRRKKRDGWLMTFTWLVLFVVIGLSGAWWWQDRKAQQEEITTMADQSSAELSSNSEQGQSVPLNTSTTTDPATTSTPPASVDTTATNTQTPAVTAPAPAVDPQQNAVVSPSQANVDTAATPAPTAATTPDGAAPLPTDQAGVTTPVADPNALVMNFTADCWLEVTDATGKKLFSGMQRKDGNLNLTGQAPYKLKIGAPAAVQIQYQGKPVDLSRFIRTNQVARLTLNAEQSPAQ

SEQ ID NO: 43354 - protein, 747 aa, Escherichia coli
MARSKTAQPKHSLRKIAVVVATAVSGMSVYAQAAVEPKEDTITVTAAPAPQESAWGPAATIAARQSATGTKTDTPIQKVPQSISVVTAEEMALHQPKSVKEALSYTPGVSVGTRGASNTYDHLIIRGFAAEGQSQNNYLNGLKLQGNFYNDAVIDPYMLERAEIMRGPVSVLYGKSSPGGLLNMVSKRPTTEPLKEVQFKAGTDSLFQTGFDFSDSLDDDGVYSYRLTGLARSANAQQKGSEEQRYAIAPAFTWRPDDKTNFTFLSYFQNEPETGYYGWLPKEGTVEPLPNGKRLPTDFNEGAKNNTYSRNEKMVGYSFDHEFNDTFTVRQNLRFAENKTSQNSVYGYGVCSDPANAYSKQCAALAPADKGHYLARKYVVDDEKLQNFSVDTQLQSKFATGDIDHTLLTGVDFMRMRNDINAWFGYDDSVPLLNLYNPVNTDFDFNAKDPANSGPYRILNKQKQTGVYVQDQAQWDKVLVTLGGRYDWADQESLNRVAGTTDKRDDKQFTWRGGVNYLFDNGVTPYFSYSESFEPSSQVGKDGNIFAPSKGKQYEVGVKYVPEDRPIVVTGAVYNLTKTNNLMADPEGSFFSVEGGEIRARGVEIEAKAALSASVNVVGSYTYTDAEYTTDTTYKGNTPAQVPKHMASLWADYTFFDGPLSGLTLGTGGRYTGSSYGDPANSFKVGSYTVVDALVRYDLARVGMAGSNVALHVNNLFDREYVASCFNTYGCFWGAERQVVATATFRF

SEQ ID NO: 43355 - protein, 265 aa, Escherichia coli
MQEYTNHSDTTFALRNISFRVPGRTLLHPLSLTFPAGKVTGLIGHNGSGKSTLLKMLGRHQPPSEGEILLDAQPLESWSSKAFARKVAYLPQQLPPAEGMTVRELVAIGRYPWHGALGRFGAADREKVEEAISLVGLKPLAHRLVDSLSGGERQRAWIAMLVAQDSRCLLLDEPTSALDIAHQVDVLSLVHRLSQERGLTVIAVLHDINMAARYCDYLVALRGGEMIAQGTPAEIMRGETLEMIYGIPMGILPHPAGAAPVSFVY

SEQ ID NO: 43356 - protein, 646 aa, Escherichia coli
MMSYVDWPPLILRHTYYMAEFETTFADLGLKAPILEALNDLGYEKPSPIQAECIPHLLNGRDVLGMAQTGSGKTAAFSLPLLQNLDPELKAPQILVLAPTRELAVQVAEAMTDFSKHMRGVNVVALYGGQRYDVQLRALRQGPQIVVGTPGRLLDHLKRGTLDLSKLSGLVLDEADEMLRMGFIEDVETIMAQIPEGHQTALFSATMPEAIRRITRRFMKEPQEVRIQSSVTTRPDISQSYWTVWGMRKNEALVRFLEAEDFDAAIIFVRTKNATLEVAEALERNGYNSAALNGDMNQALREQTLERLKDGRLDILIATDVAARGLDVERISLVVNYDIPMDSESYVHRIGRTGRAGRAGRALLFVENRERRLLRNIERTMKLTIPEVELPNAELLGKRRLEKFAAKVQQQLESSDLDQYRALLSKIQPTAEGEELDLETLAAALLKMAQGERTLIVPPDAPMRPKREFRDRDDRGPRDRNDRGPRGDREDRPRRERRDVGDMQLYRIEVGRDDGVEVRHIVGAIANEGDISSRYIGNIKLFASHSTIELPKGMPGEVLQHFTRTRILNKPMNMQLLGDAQPHTGGERRGGGRGFGGERREGGRNFSGERREGGRGDGRRFSGERREGRAPRRDDSTGRRRFGGDA

SEQ ID NO: 43357 - protein, 610 aa, Escherichia coli
MNVAQAEVLNLESGAKQVLQETFGYQQFRPGQEEIIDTVLSGRDCLVVMPTGGGKSLCYQIPALLLNGLTVVVSPLISLMKDQVDQLQANGVAAACLNSTQTREQQLEVMTGCRTGQIRLLYIAPERLMLDNFLEHLAHWNPVLLAVDEAHCISQWGHDFRPEYAALGQLRQRFPTLPFMALTATADDTTRQDIVRLLGLNDPLIQISSFDRPNIRYMLMEKFKPLDQLMRYVQEQRGKSGIIYCNSRAKVEDTAARLQSKGISAAAYHAGLENNVRADVQEKFQRDDLQIVVATVAFGMGINKPNVRFVVHFDIPRNIESYYQETGRAGRDGLPAEAMLFYDPADMAWLRRCLEEKPQGQLQDIERHKLNAMGAFAEAQTCRRLVLLNYFGEGRQEPCGNCDICLDPPKQYDGSTDAQIALSTIGRVNQRFGMGYVVEVIRGANNQRIRDYGHDKLKVYGMGRDKSHEHWVSVIRQLIHLGLVTQNIAQHSALQLTEAARPVLAESSLQLAVPRIVALKPKAMQKSFGGNYDRKLFAKLRKLRKSIADESNVPPYVVFNDATLIEMAEQMPITASEMLSVNGVGMRKLERFGKPFMALIRAHVDGDDEE

SEQ ID NO: 43358 - protein, 303 aa, Escherichia coli
MRLFNWRRQAVLNAMPLVKPDQVRTPWHEFWRRFRRQHMAMTAALFVILLIVVAIFARWIAPYDAENYFDYDNLNNGPSLQHWFGVDSLGRDIFSRVLVGAQISLAAGVFAVFIGAAIGTLLGLLAGYYEGWWDRLIMRICDVLFAFPGILLAIAVVAVLGSGIANVIIAVAIFSIPAFARLVRGNTLVLKQQTFIESARSIGASDMTVLLRHILPGTVSSIVVFFTMRIGTSIISAASLSFLGLGAQPPTPEWGAMLNEARADMVIAPHVAVFPALAIFLTVLAFNLLGDGLRDALDPKIKG

SEQ ID NO: 43359 - protein, 96 aa, Escherichia coli
MKITPEQAREALDAWICRPGMTQEQATILITEAFWALKERPNIDVQRVTYEGGAIDQRALGVNRVKIFERWKAIDTRDKREKFTALVPAIMEATTG

SEQ ID NO: 43360 - protein, 76 aa, Escherichia coli
MLKTDALLYFGSKTKLAQAAGIRLASLYSWKGDLVPEGRAMRLQEASGGELQYDPKVYDEYRKTKRAGRLNNENHS

SEQ ID NO: 43361 - protein, 305 aa, Escherichia coli
MIKQRTLKRIVQATGVGLHTGKKVTLTLRPAPANTGVIYRRTDLNPPVDFPADAKSVRDTMLCTCLVNEHDVRISTVEHLNAALAGLGIDNIVIEVNAPEIPIMDGSAAPFVYLLLDAGIDELNCAKKFVRIKETVRVEDGDKWAEFKPYNGFSLDFTIDFNHPAIDSSNQRYAMNFSADAFMRQISRARTFGFMRDIEYLQSRGLCLGGSFDCAIVVDDYRVLNEDGLRFEDEFVRHKMLDAIGDLFMCGHNIIGAFTAYKSGHALNNKLLQAVLAKQEAWEYVTFQDDAELPLAFKAPSAVLA

SEQ ID NO: 43362 - protein, 139 aa, Escherichia coli
MFEFYIAAREQKETGHPGIFSRQKHSTIIYVICLLLICLWFAGMVLVGGYARQLWVLWIVKAEVTVEAETPAFKQSTQHYFFKKQPLPVVESVEEEDDPGVAVENAPSSSEDEENTVEESEEKAGLRERVKNALNELER

SEQ ID NO: 43363 - protein, 489 aa, Escherichia coli
MSTRREVILSWLCEKRQTWRLCYLLGEAGSGKTWLAQQLQKDKHRRVITLSLVVSWQGKAAWIVTDDNAAEQGCRDSAWTRDEMAGQLLHALHRTDSRCPLIIIENAHLNHRRILDDLQRAISLIPDGQFLLIGRPDRKVERDFKKQGIELVSIGRLTEHELKASILEGQNIDQPDLLLTARVLKRIALLCRGDRRKLALAGETIRLLQQAEQTSVFTAKQWRMIYRILGDNRPRKMQLAVVMSGTIIALTCGWLLLSSFTATLPVPAWLIPVTPVVKQDMTKDIAHVVMRDSEALSVLYGVWGYEVPADSAWCDQAVRAGLACKSGNASLQTLVDQNLPWIASLKVGDKKLPVVVVRVGEASVDVLVGQQTWTLTHKWFESVWTGDYLLLWKMSPEGESTITRDSSEEEILWLETMLNRALHISTEPSAEWRPLLVEKIKQFQKSHHLKTDGVVGFSTLVHLWQVAGESAYLYRDEANISPETTVKGK

SEQ ID NO: 43364 - protein, 503 aa, Escherichia coli
MRCLMIYKNEALNMVPVVALVGRPNVGKSTLFNRLTRTRDALVADFPGLTRDRKYGRAEIEGREFICIDTGGIDGTEDGVETRMAEQSLLAIEEADVVLFMVDARAGLMPADEAIAKHLRSREKPTFLVANKTDGLDPDQAVVDFYSLGLGEIYPIAASHGRGVLSLLEHVLLPWMEDLAPQEEVDEDAEYWAQFEAEENGEEEEEDDFDPQSLPIKLAIVGRPNVGKSTLTNRILGEERVVVYDMPGTTRDSIYIPMERDGREYVLIDTAGVRKRGKITDAVEKFSVIKTLQAIEDANVVMLVIDAREGISDQDLSLLGFILNSGRSLVIVVNKWDGLSQEVKEQVKETLDFRLGFIDFARVHFISALHGSGVGNLFESVREAYDSSTRRVGTSMLTRIMTMAVEDHQPPLVRGRRVKLKYAHAGGYNPPIVVIHGNQVKDLPDSYKRYLMNYFRKSLDVMGSPIRIQFKEGENPYANKRNTLTPTQMRKRKRLMKHIKKNK

SEQ ID NO: 43365 - protein, 392 aa, Escherichia coli
MQLRKLLLPGLLSVTLLSGCSLFNSEEDVVKMSPLPTVENQFTPTTAWSTSVGSGIGNFYSNLHPALADNVVYAADRAGLVKALNADDGKEIWSVSLAEKDGWFSKEPALLSGGVTVSGGHVYIGSEKAQVYALNTSDGTVAWQTKVAGEALSRPVVSDGLVLIHTSNGQLQALNEADGAVKWTVNLDMPSLSLRGESAPTTAFGAAVVGGDNGRVSAVLMEQGQMIWQQRISQATGSTEIDRLSDVDTTPVVVNGVVFALAYNGNLTALDLRSGQIMWKRELGSVNDFIVDGNRIYLVDQNDRVMALTIDGGVTLWTQSDLLHRLLTSPVLYNGNLVVGDSEGYLHWINVEDGRFVAQQKVDSSGFQTEPVAADGKLLIQAKDGTVYSITR

SEQ ID NO: 43366 - protein, 314 aa, Escherichia coli
MSRPRRRGRDINGVLLLDKPQGMSSNDALQKVKRIYNANRAGHTGALDPLATGMLPICLGEATKFSQYLLDSDKRYRVIARLGQRTDTSDADGQIVEERPVTFSAEQLAAALDTFRGDIEQIPSMYSALKYQGKKLYEYARQGIEVPREARPITVYELLFIRHEGNELELEIHCSKGTYIRTIIDDLGEKLGCGAHVIYLRRLAVSKYPVERMVTLEHLRELVEQAEQQDIPAAELLDPLLMPMDSPASDYPVVNLPLTSSVYFKNGNPVRTSGAPLEGLVRVTEGENGKFIGMGEIDDEGRVAPRRLVVEYPA

SEQ ID NO: 43367 - protein, 120 aa, Escherichia coli
MESLPGQIDKSLDEASLSLRAGSLRTITHILLPLLRPAILSALIYSFVRAITTVSAIVFLVTPDTRVATAYILNRVEDGEYGVAIAYGSILIVVMLAIIFIFDWLIGESRTSRSKAKNQA

SEQ ID NO: 43368 - protein, 308 aa, Escherichia coli
MLPPYFLFKEMTDTQYIGRFAPSPSGELHFGSLIAALGSYLQARARQGRWLVRIEDIDPPREVPGAAETILRQLEHYGLHWDGDVLWQSQRHDAYREALAWLHEQGLSYYCTCTRARIQSIGGIYDGHCRVLHHGPDNAAVRIRQQHPVTQFTDQLRGIIHADEKLAREDFIIHRRDGLFAYNLAVVVDDHFQGVTEIVRGADLIEPTVRQISLYQLFGWKVPDYIHLPLALNPQGAKLSKQNHAPALPKGDPRPVLIAALQFLGQQAEAHWQDFSVEQILQSAVKNWRLTAVPESAIVNSTFSNASC

SEQ ID NO: 43369 - protein, 151 aa, Escherichia coli
MQEGQNRKTSSLSILAIAGVEPYQEKPGEEYMNEAQLAHFRRILEAWRNQLRDEVDRTVTHMQDEAANFPDPVDRAAQEEEFSLELRNRDRERKLIKKIEKTLKKVEDEDFGYCESCGVEIGIRRLEARPTADLCIDCKTLAEIREKQMAG

SEQ ID NO: 43370 - protein, 524 aa, Escherichia coli
MLSTLRRTLFALLACASFIVHAAAPDEITTAWPVNVGPLNPHLYTPNQMFAQSMVYEPLVKYQADGSVIPWLAKSWTHSEDGKTWTFTLRDDVKFSNGEPFDAEAAAENFRAVLDNRQRHAWLELANQIVDVKALSKTELQITLKSAYYPFLQELALPRPFRFIAPSQFKNHETMNGIKAPIGTGPWILQESKLNQYDVFVRNENYWGEKPAIKKITFNVIPDPTTRAVAFETGDIDLLYGNEGLLPLDTFARFSQNPAYHTQLSQPIETVMLALNTAKAPTNELAVREALNYAVNKKSLIDNALYGTQQVADTLFAPSVPYANLGLKPSQYDPQKAKALLEKAGWTLPAGKDIREKNGQPLRIELSFIGTDALSKSMAEIIQADMRQIGADVSLIGEEESSIYARQRDGRFGMIFHRTWGAPYDPHAFLSSMRVPSHADFQAQQGLADKPLIDKEIGEVLATHDETQRQALYRDILTRLHDEAVYLPISYISMMVVSKPELGNIPYAPIATEIPFEQIKPVKP

SEQ ID NO: 43371 - protein, 80 aa, Escherichia coli
MALVAGERKPPHVAGMHLTTPRGLILNLDHSRIAAKRCHYNTGGYMTLAELGMAFWHDLAAPVIAGILASMIVNWLNKRK

SEQ ID NO: 43372 - protein, 230 aa, Escherichia coli
MQSITPPLIAVIGSDGSGKSTVCEHLITVVEKYGAAERVHLGKQAGNVGRAVTKLPLMGKSLHKTIERNQVKTAKKLPGPVPALVITAFVARRLLRFRHMLACRRRGLIVLTDRYPQDQIPGAYDGTVFPPNVEGGRFVSWLASQERKAFHWMASHKPDLVIKLNVDLEVACARKPDHKRESLARKIAITPQLTFGGAQLVDIDANQPLEQVLVDAEKAITDFMTARGYH

SEQ ID NO: 43373 - protein, 153 aa, Escherichia coli
MTTQVRKNVMDMFIDGARRGFTIATTNLLPNVVMAFVIIQALKITGLLDWVGHICEPVMALWGLPGEAATVLLAALMSMGGAVGVAASLATAGALTGHDVTVLLPAMYLMGNPVQNVGRCLGTAEVNAKYYPHIITVCVINALLSIWVMQLIV

SEQ ID NO: 43374 - protein, 284 aa, Escherichia coli
MIENEFGEVSVDDQLIGDRATQIKTLTNGCICCSRSNELEDALLDLLDNLDKGNIQFDRLVIECTGMADPGPIIQTFFSHEVLCQRYLLDGVIALVDAVHADEQMNQFTIAQSQVGYADRILLTKTDVAGEAEKLHERLARINARAPVYTVTHGDIDLGLLFNTNGFMLEENVVSTKPRFHFIADKQNDISSIVVELDYPVDISEVSRVMENLLLESADKLLRYKGMLWIDGEPNRLLFQGVQRLYSADWDRPWGDEKPHSTMVFIGIQLPEEEIRAAFAGLRK

SEQ ID NO: 43375 - protein, 328 aa, Escherichia coli
MMQDLRLILIIVGAIAIIALLVHGFWTSRKERSSMFRDRPLKRMKSKRDDDSYDEDVEDDEGVGEVRVHRVNHAPANAQEHEAARPSPQHQYQPPYASAQPRQPVQQPPEAQVPPQHAPHPAQPVQQPAYQPQPEQPLQQPVSPQVAPAPQPVHSAPQPAQQAFQPAEPVAAPQPEPVAEPAPVMDKPKRKEAVIIMNVAAHHGSELNGELLLNSIQQAGFIFGDMNIYHRHLSPDGSGPALFSLANMVKPGTFDPEMKDFTTPGVTIFMQVPSYGDELQNFKLMLQSAQHIADEVGGVVLDDQRRMMTPQKLREYQDIIREVKDANA

SEQ ID NO: 43376 - protein, 464 aa, Escherichia coli
MVRSQLSRADAPCLLTSLRRQLMAMFGFPHWQLKSTSTESGVVAPDERLPFAQTAVMGVQHAVAMFGATVLMPILMGLDPNLSILMSGIGTLLFFFITGGRVPSYLGSSAAFVGVVIAATGFNGQGINPNISIALGGIIACGLVYTVIGLVVMKIGTRWIERLMPPVVTGAVVMAIGLNLAPIAVKSVSASAFDSWMAVMTVLCIGLVAVFTRGMIQRLLILVGLIVACLLYGVMTNVLGLGKAVDFTLVSHAAWFGLPHFSTPAFNGQAMMLIAPVAVILVAENLGHLKAVAGMTGRNMDPYMGRAFVGDGLATMLSGSVGGSGVTTYAENIGVMAVTKVYSTLVFVAAAVIAMLLGFSPKFGALIHTIPAAVIGGASIVVFGLIAVAGARIWVQNRVDLSQNGNLIMVAVTLVLGAGDFALTLGGFTLGGIGTATFGAILLNALLSRKLVDVPPPEVVHQEP

SEQ ID NO: 43377 - protein, 1166 aa, Escherichia coli
MSYYLTGARNAQIHTKHIPLSLGLAVMPMVEAAPTAQQQLLEQVRLGEATHREDLVQQSLYRLELIDPNNPDVVAARFRSLLRQGDIDGAQKQLDRLSQLAPSSNAYKSSRTTMLLSTPDGRQALQQARLQATTGHAEEAVASYNKLFNGAPPEGDIAVEYWSTVAKIPARRGEAINQLKRINADAPGNTGLQNNLALLLFSSDRRDEGFAVLEQMAKSNAGREGASKIWYGQIKDMPVSDASVSALKKYLSIFSDGDSVAAAQSQLAEQQKQLADPAFRARAQGLAAVDSGMAGKAIPELQQAVRANPKDSEALGALGQAYSQKGDRANAVANLEKALALDPHSSNNDKWNSLLKVNRYWLAIQQGDAALKANNPDRAERLFQQARNVDNTDSYAVLGLGDVAMARKDYPAAERYYQQTLRMDSGNTNAVRGLANIYRQQSPEKAEAFIASLSASQRRSIDDIERSLQNDRLAQQAEALENQGKWAQAAALQRQRLALDPGSVWITYRLSQDLWQAGQRSQADTLMRNLAQQKSNDPEQVYAYGLYLSGHDQDRAALAHINSLPRAQWNSNIQELVNRLQSDQVLETANRLRESGKEAEAEAMLRQQPPSTRIDLTLADWAQQRRDYTAARAAYQNVLTREPANADAILGLTEVDIAAGDKAAARSQLAKLPATDNASLNTQRRVALAQAQLGDTAAAQRTFNKLIPQAKSQPPSMESAMVLRDGAKFEAQAGDPTQALETYKDAMVASGVTTTRPQDNDTFTRLTRNDEKDDWLKRGVRSDAADLYRQQDLNVTLEHDYWGSSGTGGYSDLKAHTTMLQVDAPYSDGRMFFRSDFVNMNVGSFSTNADGKWDDNWGTCTLQDCSGNRSQSDSGASVAVGWRNDVWSWDIGTTPMGFNVVDVVGGISYSDDIGPLGYTVNAHRRPISSSLLAFGGQKDSPSNTGKKWGGVRADGVGLSLSYDKGEANGVWASLSGDQLTGKNVEDNWRVRWMTGYYYKVINQNNRRVTIGLNNMIWHYDKDLSGYSLGQGGYYSPQEYLSFAIPVMWRERTENWSWELGASGSWSHSRTKTMPRYPLMNLIPTDWQEEAARQSNDGGSSQGFGYTARALLERRVTSNWFVGTAIDIQQAKDYAPSHFLLYVRYSAAGWQGDMDLPPQPLIPYADW

SEQ ID NO: 43378 - protein, 368 aa, Escherichia coli
MNVLRSGIVTMLLLAAFSVQAACTWPAWEQFKKDYISQEGRVIDPSDARKITTSEGQSYGMFSALAANDRAAFDNILDWTQNNLAQGSLKERLPAWLWGKKENSKWEVLDSNSASDGDVWMAWSLLEAGRLWKEQRYTDIGSALLKRIAREEVVTVPGLGSMLLPGKVGFAEDNSWRFNPSYLPPTLAQYFTRFGAPWTTLRETNQRLLLETAPKGFSPDWVRYEKDKGWQLKAEKTLISSYDAIRVYMWVGMMPDSDPQKARMLNRFKPMATFTEKNGYPPEKVDVATGKAQGKGPVGFSAAMLPFLQNRDAQAVQRQRVADNFPGSDAYYNYVLTLFGQGWDQHRFRFSTKGELLPDWGQECANSH

SEQ ID NO: 43379 - protein, 166 aa, Escherichia coli
MRKFTLNIFTLSLGLAVMPMVEAAPTAQQQLLEQVRLGEATHREDLVQQSLYRLELIDPNNPDVVAARFRSLLRQGDIDGAQKQLDRLSQLAPSSNAYKSSRTTMLLSTPDGRQALQQARLQATTGHAEEAVANCSTVRRRKVTLLSSTGVRWRKFRLAVAKRLIS

SEQ ID NO: 43380 - protein, 200 aa, Escherichia coli
MSDKFGEGRDPYLYPGLDIMRNRLNIRQQQRLEQAAYEMTALRAATIELGPLVRGLPHLRTIHRQLYQDIFDWAGQLREVDIYQGDTPFCHFAYIEKEGNALMQDLEEEGYLVGLEKAKFVERLAHYYCEINVLHPFRVGSGLAQRIFFEQLAIHAGYQLSWQGIEKEAWNQANQSGAMGDLTALQMIFSKVVSEAGESE

SEQ ID NO: 43381 - protein, 172 aa, Escherichia coli
MILKSAISADSLLAKDAFRASFHLHFLRNHGITNKISLVSYIVWQERYATDITDPQSGEFMTIKNKMLLGALLLVTSAAWAAPATAGSTNTSGISKYELSSFIADFKHFKPGDTVPEMYRTDEYNIKQWQLRNLPAPDAGTHWTYMGGAYVLISDTDGKIIKAYDGEIFYHR

SEQ ID NO: 43382 - protein, 471 aa, Escherichia coli
MKIKTRFAPSPTGYLHVGGARTALYSWLFARNHGGEFVLRIEDTDLERSTPEAIEAIMDGMNWLSLEWDEGPYYQTKRFDRYNAVIDQMLEEGTAYKCYCSKERLEALREEQMAKGEKPRYDGRCRHSHEHHADDEPCVVRFANPQEGSVVFDDQIRGPIEFSNQELDDLIIRRTDGSPTYNFCVVVDDWDMEITHVIRGEDHINNTPRQINILKALKAPVPVYAHVSMINGDDGKKLSKRHGAVSVMQYRDDGYLPEALLNYLVRLGWSHGDQEIFTREEMIKYFTLNAVSKSASAFNTDKLLWLNHHYINALPPEYVATHLQWHIEQENIDTRNGPQLADLVKLLGERCKTLKEMAQSCRYFYEDFAEFDADAAKKHLRPVARQPLEVVRDKLAAITDWTAENVHHAIQATADELEVGMGKVGMPLRVAVTGAGQSPALDVTVHAIGKTRSIERINKALDFIAERENQQ

SEQ ID NO: 43383 - protein, 581 aa, Escherichia coli
MAGRIPRVFINDLLARTDIVDLIDARVKLKKQGKNFHACCPFHNEKTPSFTVNGEKQFYHCFGCGAHGNAIDFLMNYDKLEFVETVEELAAMHNLEVPFEAGSGPSQIERHQRQTLYQLMDGLNTFYQQSLQQPVATSARQYLEKRGLSHEVIARFAIGFAPPGWDNVLKRFGGNPENRQSLIDAGMLVTNDQGRSYDRFRERVMFPIRDKRGRVIGFGGRVLGNDTPKYLNSPETDIFHKGRQLYGLYEAQQDNAEPNRLLVVEGYMDVVALAQYGINYAVASLGTSTTADHIQLLFRATNNVICCYDGDRAGRDAAWRALETALPYMTDGRQLRFMFLPDGEDPDTLVRKEGKEAFEARMEQAMPLSAFLFNSLMPQVDLSTPDGRARLSTLALPLISQVPGETLRIYLRQELGNKLGILDDSQLERLMPKAAESGVSRPVPQLKRTTMRILIGLLVQNPELATLVPPLENLDENKLPGLGLFRELVNTCLSQPGLTTGQLLEHYRGTNNAATLEKLSMWDDIADKNIAEQTFTDSLNHMFDSLLELRQEELIARERTHGLSNEERLELWTLNQELAKK

SEQ ID NO: 43384 - protein, 99 aa, Escherichia coli
MTELAQLQASAEQAAALLKAMSHPKRLLILCMLSGSPGTSAGELTRITGLSASATSQHLARMRDEGLIDSQRDAQRILYSIKNEAVNAIIATLKNVYCP

SEQ ID NO: 43385 - protein, 284 aa, Escherichia coli
MKQKVVSIGDINVANDLPFVLFGGMNVLESRDLAMRICEHYVTVTQKLGIPYVFKASFDKANRSSIHSYRGPGLEEGMKIFQELKQTFGVKIITDVHEPSQAQPVADVVDVIQLPAFLARQTDLVEAMAKTGAVINVKKPQFVSPGQMGNIVDKFKEGGNEKVILCDRGANFGYDNLVVDMLGFSIMKKVSGNSPVIFDVTHALQCRDPFGAASGGRRAQVAELARAGMAVGLAGLFIEAHPDPEHAKCDGPSALPLAKLEPFLKQMKAIDDLVKGFEELDTSK

SEQ ID NO: 43386 - protein, 117 aa, Escherichia coli
MSFLLPIQLFKILADETRLGIVLLLSELGELCVCDLCTALDQSQPKISRHLALLRESGLLLDRKQGKWVHYRLSPHIPAWAAKIIDEAWRCEQEKVQAIVRNLARQNCSGDSKNICS

SEQ ID NO: 43387 - protein, 370 aa, Escherichia coli
MNYSHDNWSAILAHIGKPEELDTSARNAGALTRRREIRDAATLLRLGLAYGPGGMSLREVTAWAQLHDVATLSDVALLKRLRNAADWFGILAAQTLAVRAAVTGCTSGKRLRLVDGTAISAPGGGSAEWRLHMGYDPHTCQFTDFELTDSRDAERLDRFAQTADEIRIADRGFGSRPECIRSLAFGEADYIVRVHWRGLRWLTAEGMRFDMMGFLRGLDCGKNGETTVMIGNSGNKKAGAPFPARLIAVSLPPEKALISKTRLLSENRRKGRVVQAETLEAAGHVLLLTSLPEDEYSAEQVADCYRLRWQIELAFKRLKSLLHLDALRAKEPELAKAWIFANLLAAFLIDDIIQPSLDFPPRSAGSEKKN

SEQ ID NO: 43388 - protein, 372 aa, Escherichia coli
MPMNYSHDNWSAILAHIGKPEELDTSARNAGALTRRREIRDAATLLRLGLAYGPGGMSLREVTAWAQLHDVATLSDVALLKRLRNAADWFGILAAQTLAVRAAVTGCTSGKRLRLVDGTAISAPGGGSAEWRLHMGYDPHTCQFTDFELTDSRDAERLDRFAQTADEIRIADRGFGSRPECIRSLAFGEADYIVRVHWRGLRWLTAEGMRFDMMGFLRGLDCGKNGETTVMIGNSGNKKAGAPFPARLIAVSLPPEKALISKTRLLSENRRKGRVVQAETLEAAGHVLLLTSLPEDEYSAEQVADCYRLRWQIELAFKRLKSLLHLDALRAKEPELAKAWIFANLLAAFLIDDIIQPSLDFPPRSAGSEKKN

SEQ ID NO: 43389 - protein, 199 aa, Escherichia coli
MGKTEENSVQREDVLGEALKLLELQGIANTTLEMVAERVDYPLDELRRFWPDKEAILYDALRYLSQQIDVWRRQLMLDETQTAEQKLLARYQALSECVKNNRYPGCLFIAACTFYPDPGHPIHQLADQQKSAAYDFTHELLTTLEVDDPAMVAKQMELVLEGCLSRMLVNRSQADVDTAHRLAEDILRFARCRQGGALT

SEQ ID NO: 43390 - protein, 834 aa, Escherichia coli
MSQTIDLTLDGLSCGHCVKRVKESLEQRPDVEQADVSITEAHVTGTASAEQLIETIKQAGYDASVSHPKAKPLAESSIPSEALTAVSEALPAATADDDDSQQLLLSGMSCASCVTRVQNALQSVPGVTQARVNLAERTALVMGSASPQDLVQAVEKAGYGAEAIEDDAKRRERQQETAVATMKRFRWQAIVALAVGIPVMVWGMIGDNMMVTADNRSLWLVIGLITLAVMVFAGGHFYRSAWKSLLNGAATMDTLVALGTGVAWLYSMSVNLWPQWFPMEARHLYYEASAMIIGLINLGHMLEARARQRSSKALEKLLDLTPPTARLVTDEGEKSVPLAEVQPGMLLRLTTGDRVPVDGEITQGEAWLDEAMLTGEPIPQQKGEGDSVHAGTVVQDGSVLFRASAVGSHTTLSRIIRMVRQAQSSKPEIGQLADKISAVFVPVVVVIALVSAAIWYFFGPAPQIVYTLVIATTVLIIACPCALGLATPMSIISGVGRAAEFGVLVRDADALQRASTLDTVVFDKTGTLTEGKPQVVAVKTFADVDEAQALRLAAALEQGSSHPLARAILDKAGDMQLPQVNGFRTLRGLGVSGEAEGHALLLGNQALLNEQQVGTKAIEAEITAQASQGATPVLLAVDGKAVALLAVRDPLRSDSVAALQRLHKAGYRLVMLTGDNPTTANAIAKEAGIDEVIAGVLPDGKAEAIKHLQSEGRQVAMVGDGINDAPALAQADVGIAMGGGSDVAIETAAITLMRHSLMGVADALAISRATLHNMKQNLLGAFIYNSIGIPVAAGILWPFTGTLLNPVVAGAAMALSSITVVSNANRLLRFKPKE

SEQ ID NO: 43391 - protein, 420 aa, Escherichia coli
MATVFIYRKEHMTFSLITDAWICPVTNKILDTAFKGLTPYLPTHISFEHLTLAQYDTFVAQKVTMPEIWKLDRSQEDYAEGLAKARDWVSHDPLIAQLRSENVWTDINDRVVEGGFYYRTAEHSAQQSSERLQSYEKMFKNGQLNVLNCSTTMEMGVDTDRVMTLASRSQQATIPGPEWHLNDELVVRSLGYKTVELNEFILPAKATNAVERVKDIQIHKQLNGPLSQFGQRFWDVLFNDHEEAQSLMNNTRITGVHYTDRYLQNPVALALLGSILRPLKTKLTDGAEVTLDTLFKDKDRPGNRPFHDWMSIADFQDFADQWFAAALGRPVELTVFDSPRDIPHHRKLTVTFEDGQVLKIRFDQGMGYWRINFSSQWHYFDFRDDVSFQLVKMAQACKEGNVANSEESWATDVLVEVIAS

SEQ ID NO: 43392 - protein, 396 aa, Escherichia coli
MTTNTVSRKVAWLRVVTLAVAAFIFNTTEFVPVGLLSDIAQSFHMQTAQVGIMLTIYAWVVALMSLPFMLMTSQVERRKLLICLFVVFIASHVLSFLSWSFTVLVISRIGVAFAHAIFWSITASLAIRMAPAGKRAQALSLIATGTALAMVLGLPLGRIVGQYFGWRMTFFAIGIGALITLLCLIKLLPLLPSEHSGSLKSLPLLFRRPALMSIYLLTVVVVTAHYTAYSYIEPFVQNIAGFSANFATALLLLLGGAGIIGSVIFGKLGNQYASALVSTAIALLLVCLALLLPAANSEIHLGVLSIFWGIAMMIIGLGMQVKVLALAPDATDVAMALFSGIFNIGIGAGALVGNQVSLHWSMSMIGYVGAVPAFAALIWSIIIFRRWPVTLEEQTQ

SEQ ID NO: 43393 - protein, 277 aa, Escherichia coli
MDNAVDRHVFYISDGTAITAEVLGHAVMSQFPVTISSITLPFVENESRARAVKDQIDAIYHQTGVRPLVFYSIVLPEIRAIILQSEGFCQDIVQALVAPLQQEMKLDPTPIAHRTHGLNPNNLNKYDARIAAIDYTLAHDDGISLRNLDQAQVILLGVSRCGKTPTSLYLAMQFGIRAANYPFIADDMDNLVLPASLKPLQHKLFGLTIDPERLAAIREERRENSRYASLRQCRMEVAEVEALYRKNQIPWINSTNYSVEEIATKILDIMGLSRRMY

SEQ ID NO: 43394 - protein, 447 aa, Escherichia coli
MSNLSLDFSDNTFQPLAARMRPENLAQYIGQQHLLAAGKPLPRAIEAGHLHSMILWGPPGTGKTTLAEVIARYANADVERISAVTSGVKEIREAIERARQNRNAGRRTILFVDEVHRFNKSQQDAFLPHIEDGTITFIGATTENPSFELNSALLSRARVYLLKSLSTEDIEQVLTQAMEDKTRGYGGQDIVLPDETRRAIAELVNGDARRALNTLEMMADMAEVDDSGKRVLKPELLTEIAGERSARFDNKGDRFYDLISALHKSVRGSAPDAALYWYARIITAGGDPLYVARRCLAIASEDVGNADPRAMQVAIAAWDCFTRVGPAEGERAIAQAIVYLACAPKSNAVYTAFKAALADARERPDYDVPVHLRNAPTKLMKEMGYGQEYRYAHDEANAYAAGEVYFPPEIAQTRYYFPTNRGLEGKIGEKLAWLAEQDQNSPIKRYR

SEQ ID NO: 43395 - protein, 469 aa, Klebsiella pneumoniae
MQSTTQQQGGQLKRTMKTRHLIMLSLGGVIGTGLFFNTGYIISTTGAAGTLLAYLIGALVVWLVMQCLGELSVAMPETGAFHVYAARYLGPATGYTVAWLYWLTWTVALGSSFTAAGFCMQYWFPQVPVWIWCVVFCAVIFGLNIISTRFFAEGEFWFSLVKVITIVAFIILGGAAIFGIIPMQDGSPAPGLRNITAEGWFPHGGLPILMTMVAVNFAFSGTELIGIAAGETENPHKVIPVAIRTTIARLIIFFIGTVFVLAALIPMQQAGVEKSPFVLVFEKVGIPYAADMFNFVILTAILSAANSGLYASGRMLWSLSNEKTLPACFAKVNKRGVPVTALSVSMLGGVLALFSSVVAPDTVFVALSAISGFAVVAVWLSICASHFMFRRRHLQQGKALSDLQYRAPWYPVVPVLGFVLCLVACVGLAFDPSQRIALWCGIPFVALCYGAWYLTRSRNMTQEPQHVAD

SEQ ID NO: 43396 - protein, 494 aa, Klebsiella pneumoniae
MNKEILAVVEAVSNEKALPREKIFEALESALATATKKKYEQEIDVRVEIDRKSGDFDTFRRWLVVEEVTQPTREITLEAARFEDESMNVGDYVEDQIESVTFDRITTQTAKQVIVQKVREAERAMVVDQFREHEGEIITGVVKKVNRDNITLDLGNNAEAVILREDMLPRENFRPGDRIRGVLYAVRPEARGQLFVTRSKPEMLIELFRIEVPEIGEEVLEIKAAARDPGSRAKIAVKTNDKRIDPVGACVGMRGARVQAVSTELGGERIDIVLWDDNPAQFVINAMAPADVASIVVDEDKHTMDIAVEAGNLAQAIGRNGQNVRLASQLSGWELNVMTVDDLQAKHQAEAHAAIDTFTKYLDIDEDFATVLVEEGFSSLEELAYVPMKELLEIDGLDEATVEALRERAKNALTTLALAQEESLGDNKPADDLLNLEGLDRALAFKLAARGVCTLEDLAEQGVDDLADIEGMTDEKAGELIMAARNICWFGDEA

SEQ ID NO: 43397 - protein, 896 aa, Klebsiella pneumoniae
MTDVTIKALASEIQTSVDRLIQQFADAGIRKSADDSVTSQEKQTLLTHLNREHGSAPDKLTLQRKTRSTLNIPGTGGKSKSVQIEVRKKRTFVKRDPQEAERLAAEEQAQREAEEQARREAEEAAKREAQLKAEREAAEQAKREVADKAKREAAEKDKVSNQHTDEMTKTAQAEKIRRENEAAELKRKSEEEARRKLEEEARRVAEEARRMAEENEKNWSETSDSPEDSSDYHVTTSQHARQAEDDNDREVEGGRGRSRSSKAARPAKKGNKHAESKADREEARAAVRGGKGGKHRKGSALQQGFQKPAQAVNRDVVIGETITVGELANKMAVKGSQVIKAMMKLGAMATINQVIDQETAQLVAEEMGHKVILRRENELEEAVMSDRDTGAAAEPRAPVVTIMGHVDHGKTSLLDYIRSTKVASGEAGGITQHIGAYHVETDNGMITFLDTPGHAAFTSMRARGAQATDIVALVVAADDGVMPETIEAIQHAKAAQVPVVVAVNKIDKPEADPDRVKNELSQYGILPEEWGGESQFVHVSAKAGTGIDDLLDAILLQAEVLELKAVRNGMASGAVIESFLDKGRGPVATVLVREGTLHKGDIVLCGFEYGRVRAMRDELGREVLEAGPSIPVEILGLSGVPAAGDEVTVVRDEKKAREVALYRQGKFREVKLARQQKSKLENMFANMTEGEVHEVNIVLKADVQGSVEAISDSLLKLSTDEVKVKIIGSGVGGITETDATLAAASNAILVGFNVRADASARKVIEAESLDLRYYSVIYNLIDEVKAAMSGMLSPELKQQIIGLAEVRDVFKSPKFGAIAGCMVTEGTIKRHNPIRVLRDNVVIYEGELESLRRFKDDVNEVRNGMECGIGVKNYNDVRVGDMIEVFEIIEIQRSID

SEQ ID NO: 43398 - protein, 119 aa, Klebsiella pneumoniae
MTDVTIKALASEIQTSVDRLIQQFADAGIRKSADDSVTSQEKQTLLTHLNREHGSAPDKLTLQRKTRSTLNIPGTGGKSKSVQIEVRKKRTFVKRDPQEAERLAAEEQAHRETEEQARR

SEQ ID NO: 43399 - protein, 276 aa, Klebsiella pneumoniae
MFVPFLIMLREGLEAALIVSLIASYLKRTQRGNWIGVMWIGVILAAALCLGLGIFINETTGEFPQREQELFEGIVAVIAVVILTWMVFWMRNVSRNVKQQLEQAVDKALQRGNHHGWALVMMVFFAVAREGLESVFFLLAAFQQDVGIWPPLGALLGLATAIVLGFLIYWGGIRLNLGVFFKWTSLFILLVAAGLAAGAIRAFHEAGLWNLFQDTAFDLSNVLSTHTLFGTLLEGIFGYQETPSVSEVAVYLLYLIPALVLFALPPRNNTTASRAA

SEQ ID NO: 43400 - protein, 375 aa, Klebsiella pneumoniae
MKFELDTTDGRARRGRLVFERGVVETPAFMPVGTYGTVKGMTPEEVEATGAQIILGNTFHLWLRPGQEIMKLHGDLHDFMQWKGPILTDSGGFQVFSLGDIRKITEQGVHFRNPINGDPIFLDPEKSMEIQYDLGSDIVMIFDECTPYPADWDYAKRSMEMSLRWAKRSRDRFDSLGNKNALFGIIQGSVYEDLRDISVKGLVEIGFDGYAVGGLAVGEPKEDMHRILEHVCPQIPADKPRYLMGVGKPEDLVEGVRRGIDMFDCVMPTRNARNGHLFVTDGVVKIRNAKHKSDTAPLDAECDCYTCRNYSRAYLHHLDRCNEILGARLNTIHNLRYYQRLMAGLRKAIEEGKLESFVTDFYQRQGRTVPPLNVD

SEQ ID NO: 43401 - protein, 124 aa, Klebsiella pneumoniae
AEAPMCWKDAVLAAKARGNRVIAVGTTSVRSLESAAQAAKDALIAPFFDDTQIFIYPGYQYQVIDALVTNFHLPESTLIMLVSAFAGYQHTMNAYKVAVEQKYRFFSYGDAMFITYNPQAISER

SEQ ID NO: 43402 - protein, 354 aa, Klebsiella pneumoniae
MRVTDFAFELPESLIAHYPMPERSSCRLLSLDGPTGALTHGTFTDILDKLNPGDLLVFNNTRVIPARLFGRKASGGKIEVLVERMLDDKRILAHIRASKAPKPGAELLLGDDESIKATMLARHGALFEVEFNDERPVLEILNGIGHMPLPPYIDRPDEDADRELYQTVYGTRPGAVAAPTAGLHFDEPLLDKLRAKGVEMAFVTLHVGAGTFQPVRVDSIEEHTMHSEYAEVPQEVVDAVLAAKARGNRVIAVGTTSVRSLESAAQAAKDALIAPFFDDTQIFIYPGYQYQVIDALVTNFHLPESTLIMLVSAFAGYQHTMNAYKVAVEQKYRFFSYGDAMFITYNPQAISERP

SEQ ID NO: 43403 - protein, 205 aa, Klebsiella pneumoniae
MNSYKHPLRVGVGGPVGSGKTALLEALCKAMRDTWQLAVVTNDIYTKEDQRILTEAGALAPERIVGVETGGCPHTAIREDASMNLAAVEALSEKFGNLDLIFVESGGDNLSATFSPELADLTIYVIDVAEGEKIPRKGGPGITKSDFLVINKTDLAPYVGASLEVMASDTQRMRGDRPWTFTNLKQGDGLSTIIAFLEDKGMLGK

SEQ ID NO: 43404 - protein, 535 aa, Klebsiella pneumoniae
MSSLDLNPELPATTRTSGSRETLEDYTLRYAPLSFRRWGPGVVAVTALGGIAYLADFSIGASIGMAWGTSNAIYSILVAALVIFLTGIPLAITAARYNIDLDLITRSAGFGYFGSVITSIIFAGFTFIFFALEGSIMAQGLLVGLGIPLWMGYLIATLMVLPLVVYGMKALTRLQVWTTPLWLVLMVVPVVWLIVKDPQLVDGFLHFAGKNSASTVDITAIMLGAGVCLSLIMQIGEQIDYLRFMPPKTAENRKSWWLAVFSAGPGWVVLGAIKQIIGAFLGFYLLTRFPAVHNTEPVQQFVSVFDNLVPGWLALTLAVVLVVISQIKINVTNAYSGSLAWTSAWTRTTKRYPGRIIFVVVNLAIALALMEGDMFSALSWILGFYSNFAIAWVVVVATDITFNKGLLKLAPAQPEYRRGMIYNVNPVGVVSFGLAAGLSICAFFGLLGATLAPFSPLIALVVAFVMTPLMGLLTRGRYYIKQVDDGIAEPRYDAAGNASTTVYQCVSCEEEYERPDVMHSHKHQGAICSLCKSME

SEQ ID NO: 43405 - protein, 339 aa, Klebsiella pneumoniae
MAIFDGHNDLLLNLWLHHREDPVSAFFAGIENGHLDYPRMLQGGFAGGLFALFVPPQEYIARMTPQYASQRWDPIDILWQQLAILKQLIAHSAGRLRLCLSAADIERCREDKVLAMVAHIEGAGGFDGEGRDLQAFYAAGVRSIGPFWNIANRFGSGVNGSFPGSPDTGPGLTAAGIDLIKQANALKMQIDVSHMNEKAFWDTAHHSTSPLVATHSNAHALCPQPRNLTDQQLRAIRDSGGVVGVNFGNAFLRADGRRDSDTPLTTIVRHIDYLINIMGEDHVALGSDFDGITLPDELGDVAGLPRLINTLRASGYDQLVLDKLLWRNWLRVLKNVWQQ

SEQ ID NO: 43406 - protein, 427 aa, Klebsiella pneumoniae
MSLRSLRALCLTSFFIADVRDGLGPFLGIFLTQRHWQAEDIGLLMSVGGIAGLLATLSAGFITDSSRHKRLLLAGVCLVITLTTLLLWFSQKTSVVALSQVASGICAAFVGPLIAGITLGLARQRGFSAQMGKNEAFNHAGNFFTALMAGAIAWYWGIGGIFILMACTTLLTLVALLAIRGGDIDDDAARGIEAASTPSLPGFAILFRHTPLLIAGVTLMLFHLANAALLPMLSMRIAAAPGHLNPGLFAAATVIISQVVMIPVAIRVAGSIDKYGYWRCILLALLIMPIRAALAASSDAPAMMVPVQILDGLAAGILGVAVPSFIVSLLRGSGHVNAGQSVVMLMQGAGAAMSPALTGSIAGHYSYATAFGVLSVIAIVALMVWWRSVRCSPSPRHASRRERAVTTAQRPGERGNRQPGSSPLLPA

SEQ ID NO: 43407 - protein, 190 aa, Klebsiella pneumoniae
MSVQPVEISKAYRLLQVGSTTMISAKYDGVENVMSAAWVGLAGERKVVAYIGTQAFTRQLVEKSGYFVVQIPVVSQMATVLYAGGRSSADAPDKNDTIPFFYQPEFDLPLVAGCAGWLVCKVMPYPDIQQQHNLFMGDIVAAWSDDRVFRNGHWIFDDAPDELRTVHYVAGGQFYAIGKGSKFDHGPGQD

SEQ ID NO: 43408 - protein, 250 aa, Klebsiella pneumoniae
MTPMLDWHGVLSGQPLQWIISGFLTTVWVSVAGILLATLLAVLLLALRLGGGRAGRGLVAAWVSLFRNTPLLVQLLFWYFAAWNLLPLAVKEVVNDEHAWSILPGNVWWLTPEFLCSMWGLGVFTSAFLVEEIASGLRAVSHGQREAALSQGFTPWQELRFILLPQGLANAWQPIVGQYLNLMKLSSLASGIGFAELTYQVRQIESYNAHALEAFAVGTALYLALGVAMGVALTRLGPGRKLQRSARHER

SEQ ID NO: 43409 - protein, 96 aa, Klebsiella pneumoniae
  MISC_FEATURE (19)..(19): X=any amino acid
  MISC_FEATURE (25)..(25): X=any amino acid
MLSALISSAFSYRAVPLAXQPEHQXCVHSGPLVLGAAPLNSPAPRQDRDRTVSRRSKPSSRTTLNGEQPYPWDLLQPQDVMSRHRGANTAVRYELL

SEQ ID NO: 43410 - protein, 122 aa, Klebsiella pneumoniae
  MISC_FEATURE (19)..(19): X=any amino acid
  MISC_FEATURE (25)..(25): X=any amino acid
MLSALISSAFSYRAVPLAXQPEHQXCVHSGPLVLGAAPLNSPAPTADRDRTVSRRSKPSSRTTLNGEQPYPWDLLQPQDVMSRHRGAKHRRRYELLGGISLLSPEYLLSVERWPFHSEPPDH

SEQ ID NO: 43411 - protein, 122 aa, Klebsiella pneumoniae
  MISC_FEATURE (19)..(19): X=any amino acid
  MISC_FEATURE (25)..(25): X=any amino acid
MLSALISSAFSYRAVPLAXQPEHQXCVHSGPLVLGAAPLYSPAPTADRDRTVSRRSKPSSRTTLNGEQPYPWDLLQPQDVMSRHRGAKHRRRYELLGGISLLSPEYLLSVERWPFHSEPPDH

SEQ ID NO: 43412 - protein, 102 aa, Klebsiella pneumoniae
  MISC_FEATURE (19)..(19): X=any amino acid
  MISC_FEATURE (25)..(25): X=any amino acid
MLSALISSAFSYRAVPLAXQPEHQXCVHSGPLVLGAAPLNSPAPTADRDRTVSRRSKPSSRTTLNGEQPYPWDLLQPQDVMSRHRGAKHRRRYELLGGINLL

SEQ ID NO: 43413 - protein, 78 aa, Klebsiella pneumoniae
  MISC_FEATURE (19)..(19): X=any amino acid
  MISC_FEATURE (25)..(25): X=any amino acid
MLSALISSAFSYRAVPLAXQPEHQXCVHSGPLVLGAAPLNSPAPTADRDRTVSRRSKPSSRTTLNGEQPYPWDLLQPR

SEQ ID NO: 43414 - protein, 506 aa, Klebsiella pneumoniae
MVSNNSERSGEYLLEMSNINKSFPGVKALDNVNLKVRPHSIHALMGENGAGKSTLLKCLFGIYQKDSGSILFQGKEIDFHSTKEALENGISMVHQELNLVLQRSVMDNMWLGRYPTKGMFVDQDKMYRDTKAIFDELDIDIDPRARVGTLSVSQMQMIEIAKAFSYDAKIVIMDEPTSSLTEKEVNHLFKIIRKLKDRGCGIVYISHKMEEIFQLCDEITILRDGQWIATQPLEGLDMDKIIAMMVGRSLNQRFPDRENTPGEVILQVRNLTSLRQPSIRDVSFDLHKGEILGIAGLVGAKRTDIVETLFGIREKASGTITLHGKKINNHSANEAINHGFALVTEERRSTGIYAYLDIGFNSLISNIKKYKNSIGLLDNSRMKSDTQWVIDSMRVKTPGQHTQIGSLSGGNQQKVIIGRWLLTQPEILMLDEPTRGIDVGAKFEIYQLIAELAKKDKGIIIISSEMPELLGITDRILVMSNGLVAGIVETKTTTQNEILRLASLHL

SEQ ID NO: 43415 - protein, 341 aa, Klebsiella pneumoniae
MMPRSLSQTGPEKRRFTWPKGTPQIIALLLVLLVDSLVAPHFYQVVLQDGRLFGSPIDILNRAAPVALLAIGMTLVIATGGIDLSVGAVMAIAGATAASMTVAGHSLPVVLLAALAAGALAGLWNGILVAVLKIQPFVATLILMVAGRGVAQLITAGQIVTFDSPALAWLGSGSFLLFPTPVIVAAATLLLFWLFTRKTALGMFIEAVGINIRAAKNAGVNTRIVVMLAYVLSGVCAAIAGIIVAADIRGADANNAGLWLELDAILAVVIGGASLMGGRFNLLLSVVGALIIQGMNTGILLSGFPPELNQVVKAVVVLCVLIVQSPRFIGLLKGVRGHDKT

SEQ ID NO: 43416 - protein, 667 aa, Klebsiella pneumoniae
MRLDRLTNKFQLALADAQSLALGHDNQFIEPLHLMSALLNQEGGSVRPLLTSAGVNAGKLRTDIEQALSRLPQVEGTGGDVQPSQDLVRILNLCDKLAQKKKDNFISSELFVLAALESRGTLTDLLKSAGATTANVTQAIEQMRGGESVNDQGAEDQRQALKKFTVDLTERAEQGKLDPVIGRDEEIRRTIQVLQRRTKNNPVLIGEPGVGKTAIVEGLAQRIVNGEVPEGLKGRRVLALDMGALVAGAKYRGEFEERLKGVLTDLSKQEGNVILFIDELHTMVGAGKADGAMDAGNMLKPALARGELHCVGATTLDEYRQYIEKDAALERRFQKVFVAEPSVEDTIAILRGLKERYELHHHVQITDPAIVAAATLSHRYIADRQLPDKAIDLIDEAASSIRMQIDSKPEELDRLDRRIIQLKLEQQALKKESDEASLKRLDMLNEELADKERQYSVLEEEWKAEKASLSGTQTIKAELEQAKIAIEQARRVGDLARMSELQYGKIPELEKQLAAATQSEGKTMRLLRNKVTDAEIAEVLARWTGIPVSRMMESERDKLLRMEQELHHRVIGQDEAVEAVSNAIRRSRAGLSDPNRPIGSFLFLGPTGVGKTELCKTLANFMFDSDDAMVRIDMSEFMEKHSVSRLVGAPPGYVGYEEFHHMELSAE

SEQ ID NO: 43417 - protein, 173 aa, Klebsiella pneumoniae
MVEQNGEDLIMRRILSVLLENESGALSRVIGLFSQRGYNIESLTVAPTDDPTLSRMTIQTVGDEKAIEQIEKQLHKLVDVLRVSELGQGAHVEREIMLVKVQASGYGREEVKRNTEIFRGQIIDVTPSIYTVQLAGTSDKLDAFLASLRDVARIVEVARSGVVGLSRGDKIMR

SEQ ID NO: 43418 - protein, 419 aa, Klebsiella pneumoniae
MHRAERSFPKDTPDMKEIALPLHPAPARVWIAVVALGICAFSIVTSELAPVGMLSALAADFHQTESGVGLAVTAYGWVGALAALLSGAMPTRISRKALLVGLMLILALSCLAATRSYSMFALMSARMIGALAHGAFWALIGIVAAQLVPPHRLGLATAIIFGGVSAASVVGVPLASFIATLAGWRLAFMSMALLSLAAAAVLCSTLPPLAAPAPVRLRVYRDIFRNPLLGGLYGATACIITAHFAAFTYIEPLLINLQGVPATALSGLLLLSGVSGLLGNVIAGKLIDRHLKGLIFAALLLSGGALALLGAARLAPLPFCFSGLLLALWGAGIAIVFVGLQTWLLRSAGAVAQPASAIYVAIFNAAIGTGAFVGGQLIASAGLSGMVWLAAGIMVGSTLLIALLKAPLPGQVSAATAGA

SEQ ID NO: 43419 - protein, 712 aa, Klebsiella pneumoniae
LATTTAERITAAVDFHALNAMLNLYDSEGRIPFEKDRQAVEAFMATQVQPNALTFPSQEDKLSWLVSEGYYDPQVLAGYDRGFVLALFAHARRAPFRFQTFLGAWKFYTSYALKTFDGKHYLEDFAERSVMVALTLARGDEQQARQLTEEILSGRFQPATPTFLNAGKQQRGELISCFLLRIEDNMESIGRAVNSALQLSKRGGGVAFLLSNLREAGAPIKRIENQSSGVVPVMKMLEDAFSYANQLGARQGAGAVWLHVHHPDILRFLDTRRENADEKIRIKTLSLGVVIPDITFQLAKEDAQMALFSPYDVERLYGKPFADCAIGDLYPQLVADERVRKRWIRARDLFQRLAEIQFESGYPYIMFEDTVNRASPVAGRVTMSNLCSEILQVSTPSAYNEDLSYAHIGEDISCNLGSLNIAHTMDSPDFGRTIATAVRALTAVSDMSHIQSVPSVAAGNAASHAIGLGQMNLHGYLAREGIAYGSPEGLDFTNIYFYTVTWHALHTSMQLARERGQRFAGFEQSRYASGAYFDKYLQEEWQPKTERVRTLFARAGISLPDRESWRQCRDDVMRYGIYNRYLQAVPHRARISYINHATSSIHPIVSKIEIRKEGKTGRVYYPAPFMNNDNLALYQDAYEIGPEKIIDTYAEATRHVDQGLSLTLFFPDTATTRDINKAQIYAWKKGIKTLYYIRLRHGAGGTEIEGCVSCAL

SEQ ID NO: 43420 - protein, 298 aa, Klebsiella pneumoniae
MKRLKYLSTLLVAAVALIAAWLLWNFYTQSPWTRDGKVRAEQVGITPQVSGSILQLNVTDNQRVKAGEVLFTIDDTPYRIAVLNAQAQLAKAQAEVAKAQAEQSKAASEARRRRSLSQNAISAEDLENVNTALNTATTTLAAARAGVGVTEAALKHAQWQLSQTVVKAPVDGWVTNLSTRVGDYATTGHPVFALVDSHSFYVLGYFEETKLRHIRIGDPAQIILYSNQQTLKGHVASIGRAIVDQSVEQGTGLVANIKPNIPWVRLAQRVPVRIAFDTLPADVTLVSGTTCTVSIGGQ

SEQ ID NO: 43421 - protein, 78 aa, Klebsiella pneumoniae
MKLSLNTSGLPLQDLVFGASVYFPPLFKAVLLGFFIWLFLHRQLRDWMYAGDIWHPLLMDLSLFALSVCLALVLLIAW

SEQ ID NO: 43422 - protein, 297 aa, Klebsiella pneumoniae
MKILLTGGTGLIGRHLIPRLLELGHSVTVSTRHPDTARARLDPRVTLWRDFEGHHHLNDIDAVINLAGEPIADKRWTAEQKQRLCHSRWDLTQRLVGLIHASDTPPSVLISGSAIGYYGDLGEVVVTEEEPPHNEFTHKLCARWEQIACEAQSERTRVCLLRTGVVLAPRGGILGKMTPAFKLGLGGPIGNGRQYLAWIHIDDMVNGILWLLDNDLRGPFNMVSPYPVHNEQFAHALGHALHRPAIFRVPAAAIRLLMGESAVLVLGGQRALPKRLEAAGFAFRWYDLDEALKDVLS

SEQ ID NO: 43423 - protein, 227 aa, Pseudomonas aeruginosa
MAELAPLLVSALILGLLGGGHCLGMCGGLMGALTLAIPAEQRGRRLRLLLAYNLGRILSYACAGLLLGLAGWAVARTPLAGALRVVAGLLLIAMGLYLAGWWSGLTRVEALGRGLWRHLEPFARRLLPVSSLPRALLLGAIWGWLPCGLVYSTLLWATSQGSALDSALLMLAFGLGTWPVLLATGMAAERVTALLRRRGVRIVGGLMVILFGLWTLPGPHQAWLMGH

SEQ ID NO: 43424 - protein, 4342 aa, Pseudomonas aeruginosa
MMDAFELPTTLVQALRRRAVQEPERLALRFLAEDDGEGVVLSYRDLDLRARSIAAALQAHAQLGDRAVLLFPSGPDYVAAFFGCLYAGVIAVPAYPPESARRHHQERLLSIIADAEPRLVLTTADLREPLLQMNAQLSAANAPQLLCVDQLDPAVAEAWDEPQVRPEHIAFLQYTSGSTALPKGVQVSHGNLVANEVLIRRGFGIGADDVIVSWLPLYHDMGLIGGLLQPIFSGVPCVLMSPRYFLERPVRWLEAISQYGGTVSGGPDFAYRLCSERVAESALQRLDLSGWRVAFSGSEPIRQDSLERFAEKFAASRFDASSFFACYGLAEATLFVTGGQRGQGIPALAVDGEALARNRIAEGEGSVLMCCGRSQPEHAVLIVDAASGEVLGDDNVGEIWAAGPSIAHGYWRNPEASAKAFVERDGRTWLRTGDLGFLRDGELFVTGRLKDMLIVRGHNLYPQDIERTVESEVPSARKGRVAAFAVTVDGEEGIGIAAEIGRGVQKSVPAQELIDSIRQAVAEAYQEAPKVVALLNPGALPKTSSGKLQRSACRLRLEDGSLDSYALFPGLQAVQEAQPPAGDDELLARIGEIWKARLGVAQVAPRDHFFLLGGNSIGAAQVVAQVRDSLGVALDLRQLFEAPTLQAFSATVARQLAAGLPAEAPMAHLPRGVDLPQSAAQQRLWLTWQIDPQSAAYNIPGGLRLRGELDEAALRASFQRLVERHEALRTRFLERDGAALQRIDERGEFAWQFVDLAALAEHERAAAAAQRREAEAQQPFDLEKGPLLRVSLVRLDEQEHQLWVTLHHIVADGWSLNLLLDEFSRLYAEACGGQPADLAPLELHYAEFAAWQRQWLDAGEGARQLAYWRERLGDTAPVLELATDHPRTARQASPAARYSLRVDEALARAIREAALDHEASVFMWLLAAFQALLHRHSGQGEIRIGVPSANRQRLETQGLVGFFINTLVLRGTPRARQPFAALLGEAREATLGAQANQDLPFDQVLAACGQGGQLFQVLFNHQQRDLSALRRLPGLLADELPWHSREAKFDLQLQSEEDARGRLTLNFDYAADLFDEASIRRFAAQYLELLRQVAEDPQRCLGDIALVDAEQAAHLAEWGSAPCEPARAWLPELLERQLAQSAERVALEWDGGSLGYAELHARANRLAHYLRDKGVGPDVRVAICAERSPQLLVGLLAIVKAGGAYVPLDPDYPSERLAYMLADSGVELLLTQAHLFERLPGAEGVTPICLDSLKLDNWPSQAPGLHLHGDNLAYVIYTSGSTGQPKGVGNTHAALAERLQWMQATYTLDGDDVLMQKAPVSFDVSVWECFWPLVTGCRLVLAAPGEHRDPARLVELVRQFGVTTLHFVPPLLQLFIDEPGVAACGSLRRLFSGGEALPAELRNRVLQRLPAVALHNRYGPTETAINVTHWQCRAEDGERSPIGRPLGNVVCRVLDAEFNLLPAGVAGELCIGGLGLARGYLGRPALSAERFVADPFSAAGERLYRTGDRARWNADGVLEYLGRLDQQVKLRGFRIEPEEIQARLLAQPGVAQAVVVIREGVAGSQLVGYYTGAVGAEAEAEQNQRLRAALQAELPEYMVPTQLMRLAQMPLGPSGKLDTRALPEPVWQQREHVEPRTELQRRIAAIWSEVLGLPRVGLRDDFFELGGHSLLATRIVSRTRQACDVELPLRALFEASELEAFCEQVRAAQAAGRTDSHGAIRRIDREQPVPLSYSQQRMWFLWQLEPDSPAYNVGGLARLSGPLDVARFEAALQALVQRHETLRTTFPSVDGVPVQRVHGDGGLHMDWQDFSALDRDSRQQHLQTLADSEAHRPFDLESGPLLRVCMVKMAEREHYLVVTLHHIVTEGWAMDIFARELGALYEAFLDDRESPLEPLPVQYLDYSVWQREWLESGERQRQLDYWKAQLGNEHPLLELPGDRPRPPVQSHQGDLYRFDLSPELAERVRRFNAARGLTMFMTMTATLAALLYRYSGQQDLRIGAPVANRIRPESEGLIGAFLNTQVLRCRLDGQMSVGELLEQVRQTVIDGQSHQDLPFDHLVEALQPPRSAAYNPLFQVMCNVQRWEFQQTRQLAGMTVEYIANDARATKFDLNLEVTDLDQRLGCCLTYSRDLFDEPRIARMAGHWQNLLEALLGDPQRRIAELPLFAAEERKQLLLAGTAGEAGLQDTLHGLFAARVAASPQAPALTFAGQTLSYAELDARSNRLARVLRSHGVGPEVRVGLALERSLEMVVGLLAILKAGGAYVPLDPEYPLERLQYMIEDSGVRLLLSHAALFEALGELPAGVARWCLEEDGPALDAEDPAPLAALSGPQHQAYLIYTSGSTGKPKGVAVSHGEIAMHCAAVIECFGMRAEDCELHFYSINFDAASERLLAPLLCGARVVLRAQGQWGAEEICELIRAEGVSILGFTPSYGSQLAQWLESQGRQLPVRMCITGGEALTGEHLQRIRQAFAPASFFNAYGPTETVVMPLACLAPERLEEGAASVPIGSVVGARVAYILDADLALVPQGATGELYVGGAGLARGYHERPALSAERFVPDPFAAEGGRLYRTGDLVRLCDNGQVEYVGRIDHQVKIRGFRIELGEIEARLLEHPQVREALVLALDSPSGKQLAGYVASAVAEQDEDAQAALREALKTHLKQQLPDYMVPAHLLLLASLPLTANGKLDRRALPAPDPALNRQAYEAPRSVLEQQLAGVWREVLNVERVGLGDNFFELGGDSILSIQVVSRARQLGIHFSPRDLFQHQTVQSLAAVARHSQASQAEQGPVQGDSALTPIQHWFFDLPLARREHWNQALLLQPRQAIDLGLLRKSLQRLVEQHDALRLAFRQVDGEWLAQHRPLREQELLWHVPVQSFDECAELFAKAQRSLDLEQGPLLRAVLVDGPAGEQRLLLAIHHLVVDGVSWRVLLEDLQQVYRQFAEGAEPALPAKTSAFRDWAGRLQAYAGSESLREELGWWQARLGGQPVEWPCDRPQGDNREALAESVSLRLDPQRTRQLLQQAPAAYRTQVNDLLLTALARVLCRWSGQPSTLVQLEGHGREALFDDIDLTRSVGWFTSAYPLRLTPAQSPGESIKAIKEQLRAVPHKGLGYGVLRYLADPAVRQAMAALPTAPITFNYLGQFDQSFADALFQPLDQPTGPIHDEQAPLPNELSVDGQVYGGELVLRWTYSRERYDARTVNELAQAYLAELQALIEHCLEDGAGGLTPSDFPLAQLSQAQLDALAVPAGEIEDVYPLTPMQEGLLLHTLLEPGTGIYYMQDRYRIDSPLDPERFAAAWQAVVARHEALRASFVWNAGETMLQVIHKPGRTRIEFLDWSELPEDGHEERLQALHKREREAGFDLLEQPPFHLRLIRLGEARYWFMMSNHHILIDAWCRGLLMNDFFEIYSALGESRPANLPTPPRYRDYIAWLQRQDLEQSRRWWSESLRGFERPTLVPSDRPFLREHAGESGGMIVGDRYTRLDAADGARLRELAQRYQLTVNTFAQAAWALTLRRFSGERDVLFGVTVAGRPVGMPEMQRTVGLFINSIPLRVQMPAAGQRCTVREWLNRLFERNLELREHEHLPLVAIQESSELPKGQPLFDSLFVFENAPVEVSVLDRAQSLNASSDSGRTHTNFPLTVVCYPGDDLGLHLSYDQRYFEAPTVERLLGEFKRLLLALADGFHGELEALPLLGEDERDFLLDGCNRSARDYPLEQGYVRLFEAQVAAHPQRIAASCLEQRWSYAELNRRANRLGHALRAAGVGIDQPVALLAERGLDLLGMIVGSFKAGAGYLPLDPGHPTQRLTRIVELSRTLVLVCTQACREQALALFDELGCVDRPRLLVWDEIQQGEGAEHDPQVYSGPQNLAYVIYTSGSTGLPKGVMVEQAGMLNNQLSKVPYLELDENDVIAQTASQSFDISVWQFLAAPLFGARVAIVPNAVAHDPQGLLAHVGEQGITVLESVPSLIQGMLAEERQALDGLRWMLPTGEAMPPELARQWLKRYPRIGLVNAYGPAECSDDVAFFRVDLASTESTYLPIGSPTDNNRLYLLGAGADDAFELVPLGAVGELCVAGTGVGRGYVGDPLRTAQAFVPHPFGAPGERLYRTGDLARRRADGVLEYVGRIDHQVKIRGFRIELGEIEARLHERADVREAAVAVQEGANGKYLVGYLVPGETPRSSADSPAGLMVEQGAWFERIKQQLRADLPDYMVPLHWLVLDRMPLNANGKLDRKALPALDIGQMQNQAYQAPRNELEETLARIWAEVLKVERVGVFDNFFELGGHSLLATQIASRVQKALQRNVPLRAMFECTTVEELASYIESLAPSEISEQKAERLNDLMSKLEML

SEQ ID NO: 43425 - protein, 1043 aa, Pseudomonas aeruginosa
RHEALRASFVWNAGETMLQVIHKPGRTRIEFLDWSELPEDGHEERLQALHKREREAGFDLLEQPPFHLRLIRLGEARYWFMMSNHHILIDAWCRGLLMNDFFEIYSALGESRPANLPTPPRYRDYIAWLQRQDLEQSRRWWSESLRGFERPTLVPSDRPFLREHAGESGGMIVGDRYTRLDAADGARLRELAQRYQLTVNTFAQAAWALTLRRFSGERDVLFGVTVAGRPVGMPEMQRTVGLFINSIPLRVQMPAAGQRCTVREWLNRLFERNLELREHEHLPLVAIQESSELPKGQPLFDSLFVFENAPVEVSVLDRAQSLNASSDSGRTHTNFPLTVVCYPGDDLGLHLSYDQRYFEAPTVERLLGEFKRLLLALADGFHGELEALPLLGEDERDFLLDGCNRSARDYPLEQGYVRLFEAQVAAHPQRIAASCLEQRWSYAELNRRANRLGHALRAAGVGIDQPVALLAERGLDLLGMIVGSFKAGAGYLPLDPGHPTQRLTRIVELSRTLVLVCTQACREQALALFDELGCVDRPRLLVWDEIQQGEGAEHDPQVYSGPQNLAYVIYTSGSTGLPKGVMVEQAGMLNNQLSKVPYLELDENDVIAQTASQSFDISVWQFLAAPLFGARVAIVPNAVAHDPQGLLAHVGEQGITVLESVPSLIQGMLAEERQALDGLRWMLPTGEAMPPELARQWLKRYPRIGLVNAYGPAECSDDVAFFRVDLASTESTYLPIGSPTDNNRLYLLGAGADDAFELVPLGAVGELCVAGTGVGRGYVGDPLRTAQAFVPHPFGAPGERLYRTGDLARRRADGVLEYVGRIDHQVKIRGFRIELGEIEARLHERADVREAAVAVQEGANGKYLVGYLVPGETPRSSADSPAGLMVEQGAWFERIKQQLRADLPDYMVPLHWLVLDRMPLNANGKLDRKALPALDIGQMQNQAYQAPRNELEETLARIWAEVLKVERVGVFDNFFELGGHSLLATQIASRVQKALQRNVPLRAMFECTTVEELASYIESLAPSEISEQKAERLNDLMSKLEML

SEQ ID NO: 43426 - protein, 603 aa, Pseudomonas aeruginosa
MSDSPQNPGPSSLKIYFRLLGYVKPYIGMFLLSIVGFLIFASTQPMLAGILKYFVDGLSNPDAALFPNVQWPWLRDLHLVYAVPLLIILIAAWQGLGSFLGNFFLAKVSLGLVHDLRVALFNKLLVLPNRYFDTHSSGHLISRITFNVTMVTGAATDAIKVVIREGLTVVFLFLYLLWMNWKLTLVMLAILPVIAVMVTTASRKFRKQSKKIQVAMGDVTHVASETIQGYRVVRSFGGEAYEEKRFLDASQSNTDKQLRMTKTGAVYTPMLQLVIYVAMAILMFLVLWLRGDASAGDLVAYITAAGLLPKPIRQLSEVSSTVQRGVAGAESIFEQLDEAAEEDQGTVEKERVSGRLEVRNLSFRYPGTDKQVLDDISFIAEPGQMIALVGRSGSGKSTLANLVPRFYQHNDGKILLDGVEVEDYRLRNLRRHIALVTQQVTLFNDSVANNIAYGDLAGAPREEIERAAKAANAKEFIDNLPQGFDTEVGENGVLLSGGQRQRLAIARALLKDAPLLILDEATSALDTESERHIQAALDEVMKGRTTLVIAHRLSTIEKADLILVMDQGQIVERGSHAELLAQNGHYARLHAMGLDEQAPAPVG

SEQ ID NO: 43427 - protein, 126 aa, Pseudomonas aeruginosa
MSEGKDPADGRPSLRRFGAAFLGLLHGHVELFGIELQEQKANTLRLLLFAGLALVFALLLLVGLSLLVLIVFWDTNRLAAALGLCLFYVIGSLFCGWRLYQSINDESSPFSATLEELANDRERLLP

SEQ ID NO: 43428 - protein, 109 aa, Pseudomonas aeruginosa
MPRKTTANAAKDELLAEFQALVADTEKLLQSTADVAGDQAEEIRGKIHDSLKRARDTLRDTKDSLKDNVRERSQAAVDATEVYVGEHPWQSIGIAAGVGFLLGLLVSRR

SEQ ID NO: 43429 - protein, 103 aa, Pseudomonas aeruginosa
MQNQQIRIRLKAFDHRLIDQSTQEIVETAKRTGAQVRGPIPLPTRKERFTVLISPHVNKDARDQYEIRTHKRVLDIVQPTDKTVDALMKLDLAAGVEVQISLG

SEQ ID NO: 43430 - protein, 232 aa, Pseudomonas aeruginosa
MRKSWLTASLLALTVASPFAAADIQGHKAGDFIIRGGFATVDPDDSSSDIKLDGAKQRGTKATVDSDTQLGLTFTYMFADKWGVELVAATPFNHQVDVKGLGPGLDGKLADIKQLPPTLLLQYYPMGGTNSAFQPYGGLGVNYTTFFDEDLASNRKAQGFSSMKLQDSWGLAGELGFDYMLNEHALFNMAVWYMDIDTKASINGPSALGVNKTKVDVDVDPWVYMIGFGYKF

SEQ ID NO: 43431 - protein, 122 aa, Pseudomonas aeruginosa
MALTNEDIINAVSEMSVMQVVELIKAMEEKFGVTAAAATVAAAGPAAAAAEEQTEFTIVLAEAGDKKVNVIKVVRELTGLGLKEAKAVVDGAPGVVKEGASKEEAEAAKKALEEAGAKVELK

SEQ ID NO: 43432 - protein, 166 aa, Pseudomonas aeruginosa
MAIKLEDKKAIVAEVNEAAKAALSAVVADARGVTVGAMTGLRKEAREAGVYVKVVRNTLLKRAVEGTQFDVLNDVFKGPTLIAFSNEHPGAAARIFREFAKGQDKFEIKAAAFEGQFLAANQIDVLASLPTYDEAVSQLMSVIQGATSKLARTLAAIRDQKEAAAA

SEQ ID NO: 43433 - protein, 476 aa, Pseudomonas aeruginosa
MFKSLRTLAFATLLPFALPTLAQVNATLPANVQKALQTNKLTGNDLSLVLIPLDGPGNPTYYNADVSVNPASTMKLFTTYAALEMLGPTYQWKTEFYTDGQLKNGVLNGNLYLKGGGDPKLNMEKLWLLMRDLRANGVTKVTGDLVLDRSYFNIPQLPVFNDDGGDDTKPFLVGPDSLLVNLKSVRMVVRTDGNKVNVQMDPPLANVRIDNQVKMTAPATCPAWPKLRFSPVTQFDGTTLLATGQIPQGCSAQTYMSLLDHPGYTAGAVRGIWQELGGSILGKDRQGSVPRNATLIAKAFSPDLVEIIRDINKYSNNTMARQLFLSIGAQFRNSADGDDAQAAQRVVRQWLARKGITAPRLVMENGSGLSRQERVSAREMAAMLQAAWHSPYAAEYISSLPLAGLDGTMRKRLRRTALVGEAHVKTGTLNTVRALAGFSRDASGHNWVVVAILNSPRPWGASAILDQVLLSLHARK

SEQ ID NO: 43434 - protein, 101 aa, Pseudomonas aeruginosa
MAKESMKNRELKRQLTVAKYAKKRAELKAIIANPNSSAEERWNAQVALQKQPRDASASRLRNRCRLTGRPHGFYRKFGLSRNKLREAAMRGDVPGLVKASW

SEQ ID NO: 43435 - protein, 179 aa, Pseudomonas aeruginosa
MARLKEIYRKEIAPKLKEELQLANVMEVPRVTKITLNMGLGEAVGDKKIIENAVADLEKITGQKPVVTYARKSIAGFKIREGWPIGVKVTLRSDRMYEFLDRLLSISLPRVRDFRGLNAKSFDGRGNYSMGVKEQIIFPEIDYDKIDALRGLDITLTTTARTDDEGRALLRAFKFPFRN

SEQ ID NO: 43436 - protein, 619 aa, Pseudomonas aeruginosa
MGLPLGLGKPNRLVNALYQRLRTLPERQLTLYTALSLGRPAAGGDLQRRFLEPFAERVFADYPELDYLHALRRDELPANIRVEEFYLQPGSLLDSAPAQQHYISCNYSHVARDINAKGVNAVAQLVARHPERPGKLSLACNPDITLDLLPMLEKRRAAGETIVAIGVVHDDLPYLPGDAEVEESVFDLLIDAPAESSRLFSTPNMPVNLQDHCIGLHASALVRDGGTLQIGIGSMGDALTAALLLRQRDNATYRALIDELGVRARWAETIERDGGLEPFRRGLYGCSEMFVPGLLALAEAGVLSRRVYPDEARQRAAERGEAPVEGGVWLHGGFFLGPLAFYRRLREMSLEERAGIGMTGIGFVNNLYRQEELKRLQRRDARFINSAFTVTLLGAGVADQLEDGRVLSGVGGQYNFVAQAHELEGARSILMLRSWRESGGEVSSNIVWQYAHTTIPRHLRDMVVTEYGIADLRGKNDAEVIAALLAIADSRFQQALAEQAQSAGKLPKDFVLPERYRNNTPERLQALHQAHAAALPEFPLGSDFDEVEQDLLRALGWLKRKLKLSEILELGKATLDAPEPEAYPAHLRRMDLDDPQGLREELYQRLLLAGLRASQEERG

SEQ ID NO: 43437 - protein, 204 aa, Pseudomonas aeruginosa
MQHIIGMPLQLIIIGMPHSIIFAISMQQFLNISMSMPCIGIILQCMASPCMEHSIMHFIGAMPIIGMPIPMPIVGIIAMQAWDMPIIARLPHCIIMGMPQFIIIAIISALLRNWPMSIPIAGIILHSMPSSIVSHCMVAIIIGMPIMGIIGMAAFMFIGICMAFIMAVTPVGEAGVGANGADSRQRRRTGKMPVQQPSRALHGG

SEQ ID NO: 43438 - protein, 348 aa, Pseudomonas aeruginosa
MTDEIQKHGGVAGDIDLVELVRGLWEEKWIVLIFSLLGILFAAIYAFLSTPVYEARIAILPPSLSDVAGFNQGRTRETGLGPFKVQDVYSVFVRNLQADGTRHRFFNETYLPSLDEELRSVSRDALYKRFTDQISISLPGKDFPGRYLVAIEQEDPERAASWVRRYIADAAEISIQEMLNNAHREIEVKARDIEQRIQNLRENAKARREDRIVQLKEALKVAGALKLEEPPLISGQSSEELSAIMNGSLMYMRGSKAIMAEIQTLEARSSDDPFIPALRTLQEQQLLLSSLRVNSERVSVFRQDGPIETPDSPVRPRRAMILIFGLIIGGVLGGFLALCRIFLKKYAR

SEQ ID NO: 43439 - protein, 370 aa, Pseudomonas aeruginosa
MNRPASPAMRDDRELTPEQLAAFGAELDALRLRTLADLGADDARYIRRVRAAVRVCCWSGRALLMFGWLPPTWLLGSLLLGLGKILENMELGHNVMHGQYDWMNDPEFAGRAYEWDIAGPSDFWRHTHNHIHHTYTNVLGKDDDVGYGVVRLFPEQRWKPFYRWQPLWVTLQALLFQYAVAIQHLRLDKYAKGRLDKAELMPLLRRLRAKLGRQWTKDYLLFPLLGLFAGGFGAVFVGNLLANVLRNLWTFTVIFCGHFTEKAVVFPPSVLEGETRGHWYLRQLRGSSNLEGGPLFHILTGNLSHQIEHHLYPDLPARRYAALSREVREIARRYGQTYNSGRLGRQFLTVLRRIWVYRLPPREPLPAGRG

SEQ ID NO: 43440 - protein, 366 aa, Pseudomonas aeruginosa
MALLPLALLTPLLAPLRRLAARGWLREADVDGLLRHAHPLASLNRHYARVEARYWVADDMLALALRTAPGWPPVRPGQHIQLLAERDGVRVGRSYSLTRVVGERLEIAVKRHPDGLLSPWLCEHLAVGQRVELQPAQGDLRWPMQAEAVCLLAAGSGLTPLLGLLREALENGYRGPVLWLHYVRHPGQRAWLGELEALAARHPNLELRWSLTRGARADGCLEGHFQPRHLDGWAADLARSQALACGPAAFVEAVGEQLGARFAGLQTESFSVPRWRSGEAPREVRLRFARSQREVSGDSAASLLEQAEAHGLRPAHGCRQGICASCTCVLLSGCVRDLRSGALCSEPGQPIRLCVSAAHGDLALDL

SEQ ID NO: 43441 - protein, 411 aa, Pseudomonas aeruginosa
MSAAFINRVARVLVGTLGAQLITIGVTLLLVRLYSPAEMGAFSVWLSFATIFAVVVTGRYELAIFSTREEGELQAIVKLILQLTLLIFVAVAIAVVIGRHLIESMPVVIGEYWFALAVASLGLGINKLVLSLLTFQQSFNRLGVARVSLAACIAVAQVSAAYLLEGVSGLIYGQLFGVVVATALAALWVGKSLILNCIETPWRMVRQVAVQYINFPKFSLPADLVNTVASQVPVILLAAKFGGDSAGWFALTLKIMGAPISLLAASVLDVFKEQAARDYREFGNCRGIFLKTFRLLAVLALPPFIIFWFIGEWAFGLVFGEAWAESGRYAVLMVPLFYMRFVVSPLSYTIYIAQRQSMDLLWQLALLLLTFICFTLPDSVDSVLWFYSIAYAVMYFVYFWMSFQCAKGDAK

SEQ ID NO: 43442 - protein, 438 aa, Pseudomonas aeruginosa
MYILARVDRSILLNTVLLFAFFSATVWVNNNYIYHLYDYMGSAKKTVDFGLYPYLMVLALICALLCGGAIRRPGDLLVTLLVVILVPHSLVLNGANQYSPDAQPWAGVPLAIAFGILIIGIVNKIRFHPLGALQRENQGRRMLVLLSVLNIVVLVFIFFKSAGYFSFDFAGQYARRALAREVFAAGSANGYLSSIGTQAFFPVLFAWGVYRRQWFYLVLGIVNALVLWGAFGQKYPFVVLFLIYGLMVYFRRFGQVRVSWVVCALLMLLLLGALEHEVFGYSFLNDYFLRRAFIVPSTLLGAVDQFVSQFGSNYYRDTLLGALLGQGRTEPLSFRLGTEIFNNPDMNANVNFFAIAYMQLGYVGVMAESMLVGGSVVLMNFLFSRYGAFMAIPVALLFTTKILEQSLLTVMLGSGVFLMLLFLALISFPLKMSLGKTL

SEQ ID NO: 43443 - protein, 391 aa, Pseudomonas aeruginosa
MSLNPRDVVIVDFGRTPMGRSKGGMHRNTRAETMSAHLISKLLERNPKVDPAEVEDVIWGCVNQTLEQGWNIARMASLMTQIPHTSAAQTVSRLCGSSMSALHTAAQAIQTGNGDVFVIGGVEHMGHVGMMHGVDPNPHLSLYAAKASGMMGLTAEMLGKMHGISREAQDKFGARSHQLAWKATQEGKFKDEIIPMEGYDENGFLKVFDFDETIRPETTVETLAELKPAFNPKGGTVTAGTSSQITDGASCMIVMSAQRAQDLGIQPMAVIRSMAVAGVDPAIMGYGPVPSTNKALKRAGLTIADIDFVELNEAFAAQALPVLKDLKLLDKMDEKVNLHGGAIALGHPFGCSGARISGTLLNVMKQNGGTLGVSTMCVGLGQGITTVFERI

SEQ ID NO: 43444 - protein, 215 aa, Pseudomonas aeruginosa
MAEINIYQNPGQSLANIYKGFARQCNPGFVFPEAQTIEAWDIPLRLHPEFIPGGDISKADQQYSTLLAQEIANGVTIGFRMVNEKERVCNVEILPLLTSMAQNLDRIKARFGSGYLDRFKGSPNVYPTDVGFSTDASGGISQESGLLVSYGVNLRTLTPGTWQAMTLPEDIKALVGPGVGLRLDAPNFSDVFNTIKSGLRYTTAVTLLLAYFAAI

SEQ ID NO: 43445 - protein, 318 aa, Pseudomonas aeruginosa
MKKRPLEDLFFAMYRGKQSFEHFANCSVEGLYEPVMVNGRLVYKTDKDLRAYHRFLNKFLFERLPVVDDVVFSYRKGVNAVDAVEKHAGSKFYFQTDLRDFFSSLTKSDVRRTLEWAKDVCVISDLDVWVERILKLVTIGDSLPMGFSTSPAISNACLYSLDGILKTHCLSNGVIYTRYADDLIFSSSNKQALDPLFGVVCRTLQSEFSGRMGINSQKTKYLRKGGKIKLLGLNVLPNGRVTVDMRHKKEIEVRLFYYVKDRARFLKIMGEVDDEKAIKKFSGLINYVNTVDPAYLDKLRKKYGLTIVDMFIHKSPKL

SEQ ID NO: 43446 - protein, 93 aa, Pseudomonas aeruginosa
MFPQQWRYRLMRVETISYLKRHAADLDLSEPMVVTQNGVPAYVVESYAERKQRDEAIALVKLLAIGSRQYAEGKHRSVDDLKARLSRRFAQPE

SEQ ID NO: 43447 - protein, 43 aa, Pseudomonas aeruginosa
MRWFKFGLNSDYDVGADGRQTADARIPLVAWIWSVVEFEHRRT

SEQ ID NO: 43448 - protein, 868 aa, Pseudomonas aeruginosa
MGKSLVIVESPAKAKTINKYLGSQYVVKSSIGHIRDLPTSGSSSSKEPAAKGRKSASEAPALSPKEKARRQLVSRMGVDPEHGWKAKYEILPGKEKVIDELRRLAKDADTVYLATDLDREGEAIAWHLREAIGGDESRYKRVVFNEITKKAIQEAFSQPGELDINRVNAQQARRFLDRVVGYMVSPLLWQKIARGLSAGRVQSVAVKLVVEREREIRAFVPEEYWEVHADLGTAKGANVRFEVTREKGEAFKPLNEAQAMAALEKLKASAYSVAKREDRPTSSRPSAPFITSTLQQAASNRLGFGVKKTMMMAQRLYEAGYITYMRTDSTNLSADAIGMVRGFIEDEFGQKYLPGKANVYSSKEGAQEAHEAIRPSDVNLKPTQLSGMERDAERLYDLIWRQFVACQMTPAEYLSTSVSVTAGDFELRAKGRILKFDGYTRVLPQQSKPGEDDVLPEMKEGENLKLIKLDPSQHFTKPPARYSEASLVKELEKRGIGRPSTYAAIISTIQERGYVTTHNRRFYAEKMGDIVTDRLNESFANLMDYGFTAGMEEHLDDVAQGERDWKHLLDEFYGDFKKKLEVAEVSEKGMRANQPTLTNIPCRECGRPMMIRTASTGVFLGCSGYSLPPKERCKATVNLIPGDEIAADDEGESESRVLRGKHRCPICSTAMDAYLLDEKHKLHICGNNPDCPGYEIEEGQYRIKGYEGPSLECDKCGSEMQLKTGRFGKFFGCTNPTCKNTRKLLKNGEAAPPKMDAIRMPELKCEKVDDIYVLRDGASGMFLAASQFPKNRETRAPLVSEIIPHKAELDPKYHYLCDAPQKDPDGRPAVIRFSRKTKEQYVQSEVDGKPTGWRAFYDGGKWKVEDKR

SEQ ID NO: 43449 - protein, 228 aa, Pseudomonas aeruginosa
MGQKVHPNGIRLGIVKEHTSVWYADRKNYADYLFADLKVREYLQDKLKSASVSRIDIHRPAQTARITIHTARPGIVIGKKGEDVEKLRQDLTKQMGVPVHINIEEIRKPELDAMLVAQSVAQQLERRVMFRRAMKRAVQNAMRIGAKGIKIQVSGRLGGAEIARTEWYREGRVPLHTLRADIDYATYEAHTTYGVIGVKVWIFKGEVIGGRQEELKPVAPAPRKKAAR

SEQ ID NO: 43450 - protein, 211 aa, Pseudomonas aeruginosa
MTIGVVGRKCGMTRIFTEEGVSIPVTVIEVEPNRVTQFKTEETDGYRAVQVTAGERRASRVTKAQAGHFAKANVAAGRGVWEFRLGEEQYAAGDQITVDLFQAGQMVDVTGESKGKGFAGTIKRWNFRGQDNTHGNSVSHRVPGSIGQCQTPGRVFKGKKMSGHLGAERVTVQSLEIVRVDAERNLLLVKGAVPGATGGDVIVRPAAKARG

SEQ ID NO: 43451 - protein, 186 aa, Pseudomonas aeruginosa
MNIPNLLTLLRVLLIPIFILLFYLPTSWSYLTASAVFALAAATDWLDGYLARRLGQSTPFGAFLDPVADKLMVAVALVLLVEEHANLWLTLPAVIIIGREIVVSALREWMAELGARAQVAVSNLGKWKTAAQMLALVILLANPPLMTFWVILGYVLLIISAALTLWSMVHYLLAAWPHLSTTPKEK

SEQ ID NO: 43452 - protein, 1041 aa, Pseudomonas aeruginosa
MNCAATGGASMGASERSTNDPSELQPCSLPASASPRKSRLRQRLMLIGFALPILAAVGIVVLHEAHTSRLQARELARYAATLDYEVRQGPSEAILFPADGPFDRRLGYQLLPSFMQRLYDRDYAITRQAHFSPALMRYAEHRLFPPYAEKAQAGLDIADCRGVPIYDFRYPQRRYANFASLPPLVVQSLLFIENRDLLDHERPYLNPAVDWGRFTQAALSQVGKMLGFSAHSSGGSTLATQIEKYRHSAEGRTGSIGDKLRQMLSASVRSYREGPANFAARQDIVLTYLNSVPLSAAPGYGEVTGLADGLWVWYGADYRQVGEALDGKAGLAAQGLALRQVLALMIAHRRPSFYLAPRGRDELDRMTDSHLRVLTQAGVIEAPLRDAALAQKLAFRDPRSQPTVQPLPTNKGVTLARTRLAGMLGVPLYDLDRLDLRANTTLQHELQESVTAYLQKLADPDYAAQLGLIGERLLTPTSTRSVRYSFTLFERTPSGNQVRVQTDNTDQPFDINEGSKLELGSTAKLRVLASYLETVAQIHRDYGGMSVAELRKVEVEPLDFILRWGIDYLVASRDRDLSAMLQAAMERRYSASPYESFFTGGGLHTFNNFRKEDNGRRPMLLEALRESINLPFVRLLRDLIRHDIYQNAGSKVQLLADDKDPRRADYLDRFVDKESQVYLRRFWVKYRDKDANQRLETFLDGLRPWPVRLAAIHRYLQPQADLASFSAFLRERLPRGSLTDKRAAELYERYGPGKFNLNDQGYVARVHPLELWLLGYLQKQPQATFGEAVAASGAERKEVYGWLFKSRHKNARDKRIRILLEVEAFLDLHQQWKKLGYPFDHLVPSYATALGSSGDRPAALAELMGIIVNDGVRMPTLRLEHLDFALGTPYETRFAPEATLGQRVMTSEVATTLRNALSQVVDAGTARRLQGTFSRPDGAPLVMGGKTGTGDNRLQTFSAGGHVRSSKALNRTATFVFYIGPRHFGTLTAYVDGSESSQFKFTSALPVQVLKGMAPLLRDYLDPRTATRCQVPLSPQQIGRL

SEQ ID NO: 43453 - protein, 327 aa, Pseudomonas aeruginosa
MKPLERLEPLFADETEEDIDHRAAYWFSRRRSGHFSAACRAELEDWLRADPRHREALEGMERLWREFDGLPRPALDDIPEPVPAWRLPRALAAAFFVFCALLVATLFWRDQSLGPNLAYGTAPGEQREVVLADGSKLFLDVDTQVQVRYAERTRDVLLKKGEVFFVVSHDPARPFRVGSGDSRVTVLGTQFSVRRNAQALAVAVKQGRVALQPSLEKDAEHVLLAGDSARLDLAEQRLELGHVAPEQVASWRDGQLVFRDKPLGELVEELSRYRAAPIRLGDPRLAGKRVSGTVRIARPDDFLLALPALLPVRVQPQAGGEVLILAR

SEQ ID NO: 43454 - protein, 612 aa, Pseudomonas aeruginosa
MPDYRSKTSTHGRNMAGARALWRATGMKDEDFKKPIIAIANSFTQFVPGHVHLKDLGQLVAREIEKAGGVAKEFNTIAVDDGIAMGHDGMLYSLPSREIIADSVEYMVNAHCADAIVCISNCDKITPGMLMAALRLNIPVVFVSGGPMEAGKTKLASHGLDLVDAMVVAADDSCSDEKVAEYERSACPTCGSCSGMFTANSMNCLTEALGLSLPGNGSTLATHADREQLFLRAGRLAVELCQRYYGEGDDSVLPRNIANFKAFENAMTLDIAMGGSTNTILHLLAAAQEAEVPFDLRDIDRLSRKVPQLCKVAPNIQKYHMEDVHRAGGIFSILGELARGGLLHTDVPTVHSPSMADAIAQWDITQTRDEAVHTFFKAGPAGIPTQTAFSQNTRWPSLDDDRAEGCIRSVEHAYSKEGGLAVLYGNIALDGCVVKTAGVDESIHVFEGSAKIFESQDAAVKGILGDEVKAGDIVIIRYEGPKGGPGMQEMLYPTSYLKSKGLGKQCALLTDGRFSGGTSGLSIGHASPEAAAGGAIGLVQDGDKVLIDIPNRSINLLVSDEELAARRAEQDKKGWKPAAPRARRVSTALKAYALLATSADKGAVRNKALLDG

SEQ ID NO: 43455 - protein, 483 aa, Pseudomonas aeruginosa
MQLKDAKLFRQQAYVDGAWVDADNGQTIKVNNPATGEIIGSVPKMGAAETRRAIEAADKALPAWRALTAKERANKLRRWFDLMIENQDDLARLMTIEQGKPLAEAKGEIAYAASFLEWFGEEAKRIYGDTIPGHQPDKRIIVIKQPIGVTAAITPWNFPSAMITRKAGPALAAGCTMVLKPASQTPYSALALAELAERAGIPKGVFSVVTGSAGEVGGELTSNPIVRKLTFTGSTEIGRQLMAECAQDIKKVSLELGGNAPFIVFDDADLDAAVEGALISKYRNNGQTCVCANRLYVQDGVYDAFVDKLKAAVAKLNIGNGLEAGVTTGPLIDAKAVAKVEEHIADAVSKGAKVVSGGKPHALGGTFFEPTILVDVPKNALVSKDETFGPLAPVFRFKDEAEVIAMSNDTEFGLASYFYARDLARVFRVAEQLEYGMVGINTGLISNEVAPFGGIKASGLGREGSKYGIEDYLEIKYLCLGGI

SEQ ID NO: 43456 - protein, 304 aa, Pseudomonas aeruginosa
MHIRILGSAAGGGFPQWNCNCRNCRGVRDGSVAAQPRTQSSIALSDDGERWILCNASPDIRAQIAAFPALQPARRPRDTAIGAIVLLDSQIDHTTGLLSLREGCPHEVWCTQMVHQDLSEGFPLFPMLSHWNGGLRHRPIALDGEPFAIPACPRLRFTAIPLRSSAPPYSPHRGDPHPGDNIGLFVEDLDSAGALFYAPGLGEVDEALLEWMRRADCLLVDGTLWRDDEMLVCEVGDKLGRQMGHLAQSGPGGMLEVLAKVPAARKVLIHINNTNPILDTASAERAELDASGIEVAWDGMHIQL

SEQ ID NO: 43457 - protein, 1620 aa, Pseudomonas aeruginosa
MAFFTAASKADFQHQLQTALAQHLGDKALPQVTLFAEQFFSLISLDELTQRRLSDLVGCTLSAWRLLERFDRDQPEVRVYNPDYEKHGWQSTHTAVEVLHPDLPFLVDSVRMELNRRGYSIHTLQTNVLSVRRSAKGELKEILPKGSQGKDVSQESLMYLEIDRCAHAGELRALEKAILEVLGEVRVTVADFEPMKAKARELLTWLGKAKLKVPAEELKEVRSYLEWLLDNHFTFLGYEEFSVADEADGGRMVYDEKSFLGLTRLLRAGLSKDDLHIEDYAVAYLREPVLLSFAKAAHPSRVHRPAYPDYVSIRELDGKGRVIRECRFMGLFTSSVYNESVNDIPFIRGKVAEVMRRSGFDTKAHLGKELAQVLEVLPRDDLFQTPVDELFSTALAIVRIQERNKIRVFLRKDPYGRFCYCLAYVPRDVYSTETRLKIQQVLMERLQASDCEFWTFFSESVLARVQFILRVDPKSRIDIDPARLEEEVIQACRSWQDDYSSLVVENLGEAKGTNVLADFPKGFPAGYRERFAPHFAVVDLQHLLSLSEQRPLVMSFYQPLAQGEQQLHCKLYHADTPLALSDVLPILENLGLRVLGEFPYRLRHQNGREYWIHDFAFTYAEGLDVDIQQLNEILQDAFVHIVSGDAENDAFNRLVLTANLPWRDVALLRAYARYLKQIRLGFDLGYIASALNAHTDIARELVRLFKTRFYLARKLTAEDLEDKQQKLEQAILGALDEVQVLNEDRILRRYLDLIKATLRTNFYQPDGNGQNKSYFSFKFNPKAIPELPRPVPKYEIFVYSPRVEGVHLRGGKVARGGLRWSDREEDFRTEVLGLVKAQQVKNAVIVPVGAKGGFVPRRLPLGGSRDEIQAEAIACYRIFISGLLDITDNLKEGEVVPPANVVRHDEDDPYLVVAADKGTATFSDIANGIAAEYGFWLGDAFASGGSAGYDHKGMGITAKGAWVSVQRHFRERGIDVQKDNISVIGIGDMAGDVFGNGLLMSDKLQLVAAFNHMHIFIDPNPDAASSFVERQRLFNLPRSSWADYDAKLISAGGGIFLRSAKSIAITPEMKARFDIQADRLAPTELIHALLKAPVDLLWNGGIGTYVKSSKETHADVGDKANDGLRVDGRELRAKVVGEGGNLGMTQLARVEFGLHGGANNTDFIDNAGGVDCSDHEVNIKILLNEVVQAGDMTEKQRNALLVKMTDAVGALVLGNNYKQTQALSLAQRRARERIAEYKRLMGDLEARGKLDRALEFLPSDEELAERISAGQGLTRAELSVLISYSKIDLKESLLKSLVPDDDYLTRDMETAFPALLAEKFGDAMRRHRLKREIVSTQIANDLVNHMGITFVQRLKESTGMSAANVAGAYVIVRDVFHLPHWFRQIENLDYQVPADIQLTLMDELMRLGRRATRWFLRSRRNELDAARDVAHFGPRIAALGLKLNELLEGPTRELWQARYQTYVDAGVPELLARMVAGTSHLYTLLPIIEASDVTGQDTAEVAKAYFAVGSALDLTWYLQQITNLPVENNWQALAREAFRDDLDWQQRAITVSVLQMQDGPKEVEARVGLWLEQHLPLVERWRAMLVELRAASGTDYAMYAVANRELMDLAQSSQHGVCIP

SEQ ID NO: 43458 - protein, 511 aa, Pseudomonas aeruginosa
MRWISRPGWPGHLLALAAGALTPLALAPFDYWPLAILSIALLYLGLRGLPGKSALWRGWWYGFGAFGAGTSWIYVSIHDYGAASVPLASLLMLGFTAGVAFFFALPAWLWARCLRRDNAPLGDALAFAALWLALELFRSWFLTGFPWLYAGYSQLQGPLAGLVPVGGVWLSSFVIALSAALLVNLPRLFPHGASLLLGLVLLLGPWAAGLYLKGHAWTHSAGEPLRVVAIQGNIAQELKWDPNQVRAQLDLYRDLSLPQQDVDLIVWPETAVPILQDMASGYLGAMGQVADEKNAALITGVPVRERLADGKSRYFNGITVVGEGAGTYLKQKLVPFGEYVPLQDLLRGLIAFFDLPMSDFARGPADQPLLKAKGYQIAPYICYEVVYPEFAAALAAQSQVLLTVSNDTWFGTSIGPLQHLQMAQMRALESGRWMIRATNNGVTGLIDPYGRIVRQIPQFQQGILRGEVIPMQGLTPYLQYRVWPLAGLAGVLLLWALLGRQLRPQERRLFG

SEQ ID NO: 43459 - protein, 233 aa, Pseudomonas aeruginosa
MAQSETVERILDAAEQLFAEKGFAETSLRLITSKAGVNLAAVNYHFGSKKALIQAVFSRFLGPFCASLEKELDRRQAKPEAQHATLEDLLHLLVSQAMAVKPRSGNDLSIFMRLLGLAFSQSQGHLRKYLEEVYGKVFRRYMLLVNEAAPKLPPIELFWRVHFMLGAAAFSMSGIKALRAMAETDFGVNTSTEQVMHLMVPFFAAGMRAESGIDDPLLAGAQLRPRNKTPAKA

SEQ ID NO: 43460 - protein, 332 aa, Pseudomonas aeruginosa
MQGSLMLDIGGTWLTAEDRQILRHPEVGGLIIFARNIEHPAQVRELCAAIRAIRPDLLLAVDQEGGRVQRLRQGFVRLPAMRAIADNPNAEELAEHCGWLMATEVQAVGLDLSFAPVLDLDHQRSAVVGSRAFEGDPERAALLAGAFIRGMHAAGMAATGKHFPGHGWAEADSHVAIPEDARSLEEIRRSDLVPFARLAGQLDALMPAHVIYPQVDPQPAGFSRRWLQEILRGELKFDGVIFSDDLSMAGAHVVGDAASRIEAALAAGCDMGLVCNDRASAELALAALQRLKVTPPSRLQRMRGKGYANTDYRQQPRWLEALSALRAAQLID

SEQ ID NO: 43461 - protein, 144 aa, Pseudomonas aeruginosa
MQLNDLRSAPGARREKHRPGRGIGSGLGKTGGRGHKGLTSRSGGKVAPGFEGGQQPLHRRLPKFGFVSLKAMDRAEVRTSELAKVEGDVVSLQTLKDANLINQHVQRVKVMLSGEVGRAVTLKGIAATKGARAAIEAAGGKFED

SEQ ID NO: 43462 - protein, 58 aa, Pseudomonas aeruginosa
MATVKVTLVKSLNGRLANHKACVKGLGLRRINHTVEVQDTPENRGMINKAYYLLRVEG

SEQ ID NO: 43463 - protein, 177 aa, Pseudomonas aeruginosa
MSRVAKNPVKLPAGVEIKLAGQQLSIKGAKGALELKVHPSVEVIQDSGELRFAARNGDQQTRAMAGTTRALVNNMVVGVSQGFERKLQLVGVGYKAQAKGQVLSLSLGFSHPVDYELPAGIVAETPSQTDILIKGIDKQLVGQVAAEIRDFRPPEPYKGKGVRYADEVVRRKEAKKK

SEQ ID NO: 43464 - protein, 130 aa, Pseudomonas aeruginosa
MSMQDPLADMLTRIRNAQMAEKTVVSMPSSKLKAAVAKVLKDEGYIADFQISSEVKPQLSIELKYFEGKPVIEEVKRISRPGLRQYKSVEQLPKVRGGLGVSIVSTNKGVMTDRAARAAGVGGEVLCTVF

SEQ ID NO: 43465 - protein, 88 aa, Pseudomonas aeruginosa
MAEAQKTVRTLTGRVVSDKMDKTVTVLIERRVKHPIYGKYVKRSTKLHAHDESNQCRIGDLVTIRETRPLAKTKAWTLVDIVERAVEV

SEQ ID NO: 43466 - protein, 63 aa, Pseudomonas aeruginosa
MKANELREKSVEQLNEQLLGLLRDQFNLRMQKATGQLGQSHLLSQVKRDIARVKTVLNQQAGK

SEQ ID NO: 43467 - protein, 266 aa, Pseudomonas aeruginosa
MKKYLASLVLGVCALVGVASVQAAGAVEDAVKRGTLRVGMDPTYMPFEMTNKRGQIIGFEVDLLKAMAKSMGVKLELVSTSYDGIIPALLTDKFDMIGSGMTLTQERNLRLNFSEPFIVVGQTLLVRKELEGKIKSYKDLNDPQYSITSKIGTTGEIVARKLISKAKYHGFDNEPEAVMDVVNGKADAFIYDSPYNVVAVSKFGAGKLVYLDQPFTYEPLAFGLKKGDYDSINFINNFLHQIREDGTYQRIHDKWFKNTEWLKEME

SEQ ID NO: 43468 - protein, 854 aa, Pseudomonas aeruginosa
MRIDRLTSKLQLALSDAQSLAVGHDHPAIEPVHLLSALLEQQGGSIKPLLMQVGFDIAALRSGLNKELDALPKIQSPTGDVNLSQDLARLLNQADRLAQQKGDQFISSELVLLAAMDENTRLGKLLLGQGVSRKALENAVANLRGGEAVNDPNVEESRQALDKYTVDMTKRAEEGKLDPVIGRDDEIRRTIQVLQRRTKNNPVLIGEPGVGKTAIVEGLAQRIINGEVPDGLKDKRLLALDMGALIAGAKFRGEFEERLKAVLNELGKQEGRVILFIDELHTMVGAGKAEGAMDAGNMLKPALARGELHCVGATTLDEYRQYIEKDAALERRFQKVLVDEPSEEDTIAILRGLKERYEVHHGVSITDGAIIAAAKLSHRYITDRQLPDKAIDLIDEAASRIRMEIDSKPEELDRLDRRLIQLKIEREALKKEDDEATRKRLAKLEEDIVKLEREYADLEEIWKSEKAEVQGSAQIQQKIEQAKQEMEAARRKGDLESMARIQYQTIPDLERSLQMVDQHGKTENQLLRNKVTDEEIAEVVSKWTGIPVSKMLEGEREKLLRMEQELHRRVIGQDEAVVAVSNAVRRSRAGLADPNRPSGSFLFLGPTGVGKTELCKALAEFLFDTEEALVRIDMSEFMEKHSVARLIGAPPGYVGFEEGGYLTEAIRRKPYSVVLLDEVEKAHPDVFNILLQVLEDGRLTDSHGRTVDFRNTVVVMTSNLGSAQIQELAGDREAQRAAVMDAVNAHFRPEFINRIDEVVVFEPLAREQIAGIAEIQLGRLRKRLAERELSLELSQEALDKLIAVGFDPVYGARPLKRAIQRWIENPLAQLILAGKFAPGASISAKVEGDEIVFA

SEQ ID NO: 43469 - protein, 259 aa, Pseudomonas aeruginosa
MKKLLLLTALASVISVSASAAEKLIVAATPIPHAEILELIKPTLAKEGVDLQIKVFTDYVQPNVQVAEKRLDANYFQTLPYLENFNKGKGTNLVTVVGVHVEPFGGYSRKYKSLAELPDGATVAIPNEGSNSGRALLLLQKAGLLKLKDPNNALATPKDIAENPKNLKFKELESALLPRVLDQVDLDLINTNYALEAKLNPAKDALVLEDRDSPYVNYLVARPDNKDSDALKKLSAALTSPEVKAFIEKKYAGAVVPAF

SEQ ID NO: 43470 - protein, 422 aa, Pseudomonas aeruginosa
MSLIADHGFAFLVLACLFGFFMAWGVGANDVANAMGTSVGSRALTIRQAILVAMVFEFCGAYFAGGEVTETIRSGIVDPQYMTPDLLVFGMLSALLAAGVWLLLATIKGWPVSTTHSIVGAIIGFASVGVSVHAVHWGAIGPIVASWVVTPVLSGLLAFALFRSVQWLVLHAEDPFRSARRYVPLYMFLAGFMVALMTVGKGLKHVGLELSGLQTLGLALLAGGLVMGLGIVLLLRIRPTGGADPRGGFASVERVFAVLMIFTACSMAFAHGANDVANAIGPVAAVVAVVQAGGDLDLVSRSPVPSWVLLLGAVGIVIGLATYGYRVIATIGREITELTPSRGFAAELATASTVVGASAIGLPVSTTHTLVGAVLGIGMARGIGALNLRVIGSIFLSWVVTLPAGAVLAILFFLVLRALFGA

SEQ ID NO: 43471 - protein, 345 aa, Pseudomonas aeruginosa
MSQSTQVNRRIVLASRPHGAPTRDNFRIEQVPLPEPGAGQVLLRTVYLSLDPYMRGRMSDAPSYAPPVELGAVMVGGTVSRVEASNHPGFKVGDWVLSANGWQDYALSDGSGLARLGESPEHPSYALGLLGMPGFTAYMGLLDIGKPQAGETLVVAAATGPVGATVGQIGKLKGCRVVGVAGGAEKCRHAVQVLGFDACLDHHAADFAERLAEACPDGIDIYYENVGGKVFDAVFPLLNAKARIPVCGIVAHYNDTELPPGPDRLPALMGTILRKRIKVQGFIIFDDYGHRYDEFQRDMSKWFADGLIQYREERVDGLENAPEAFFGLLQGRNFGKLVVRVGADA

SEQ ID NO: 43472 - protein, 316 aa, Pseudomonas aeruginosa
MHTLSSAHNSFEAWNQALRQVCGRFESQPALNRTLFIGDISRQDLGGLELAQIRTNAGRIARQATHADHDDDRHCFLVVQRSGHAQLRQGGDSIELAPGEMALMDSAGGCEIIPHGLIEHTSFHLSREEVCRHLPPSQRAFGKLSPNCASGRLLSLLVQQVCAGELQPWAVADEGGALQEALIALLGPALQHAGEELEGPLAGLYGYSLRRHAERLIEQSLQEPRLSPDMLAGRLRISVRQLYRLFEEQGDSVCRYILRQRLSRSAADLGNPRLRGESITSIAFKWGFSDSAHFSRAFKKQFEVSPKDYRAGALPA

SEQ ID NO: 43473 - protein, 452 aa, Pseudomonas aeruginosa
MQKEGVLRVITRNSPATYFQDRNGETGFEYELAKRFAERLGVELKIETADNLDDLYAQLSREGGPALAAAGLTPGREDDASVRYSHTYLDVTPQIIYRNGQQRPTRPEDLVGKRIMVLKGSSHAEQLAELKKQYPELKYEESDAVEVVDLLRMVDVGDIDLTLVDSNELAMNQVYFPNVRVAFDFGEARGLAWALPGGDDDSLMNEVNAFLDQAKKEGLLQRLKDRYYGHVDVLGYVGAYTFAQHLQQRLPRYESHFKQSGKQLDTDWRLLAAIGYQESLWQPGATSKTGVRGLMMLTNRTAQAMGVSNRLDPKQSIQGGSKYFVQIRSELPESIKEPDRSWFALAAYNIGGAHLEDARKMAEKEGLNPNKWLDVKKMLPRLAQKQWYAKTRYGYARGGETVHFVQNVRRYYDILTWVTQPQMEGSQIAESGLHLPGVNKTRPEEDSGDEKL

SEQ ID NO: 43474 - protein, 455 aa, Pseudomonas aeruginosa
MQAATETIVAIATAQGRGGVGIVRVSGPLAGQMAVAVSGRQLKARHAHYGPFLDAGGQVIDEGLSLYFPGPNSFTGEDVLELQGHGGPVVLDLLVQRCLELGARQARPGEFSERAFLNDKLDLAQAEAIADLIEASSEQAARNALRSLQGEFSRRVHALTEQLISLRIYVEAAIDFPEEEIDFLADGHVLGLLEKVRTELSTVQREASQGALLRDGMTVVIAGRPNAGKSSLLNALAGREAAIVTDIAGTTRDVLREHIHIDGMPLHVVDTAGLRDTEDHVEKIGVERALKAIGEADRVLLVVDATAPEAADPFSLWPEFLDQRPEPGKVTLIRNKADLSTESIGLEESADGHVTITLSARTGAGLELLREHLKACMGFEQTAESGFSARRRHLEALRLAGQALEHGHSQLIHNGAGELLAEDLRQAQQHLGEITGAFTPDDLLGRIFSSFCIGK

SEQ ID NO: 43475 - protein, 251 aa, Pseudomonas aeruginosa
MDERLRQQQFSLARHLRDPLGNAPPPDIEERRLRVYRELFYNAIEGLLASGFPRLRGLLGEQQWHGLVREFYREERSHTPLFTRIAGVFVDYLRQRGEYRPAWQAELAHFEWSETRLYLAEPDDPPYRREGDLLDGVPLLSSLALPLGYRWPVHRLEEDVALAEAPAEPTLLLMHRDSSHRVHTARLTPLACRLLESLARRRLSGREHLAALALEARSAPGALDAAGLELLAALRTQGVVLGTLERDWAGG

SEQ ID NO: 43476 - protein, 276 aa, Pseudomonas aeruginosa
MTLIDNAAGLGLRRGLLPQLLAMAPGAVDFLECAPDNWIGVGGAFGADLERLVERIPLTCHGLSLSLGGSTPLDAAFIEQTRRFLVRHRVALYSEHLSYCSDDGHLYDLLPLPFTEAAVRHVAARIREAQERLERRIAVENISYYAAPYREMSEIEFVNAVLDEADCDLLLDVNNLFVNACNHGYDALDFLVRLPPGRVAAYHVAGHYDEAPDLKIDTHGAAVKPGVWALLGAAYRRFGVRPTLLERDFNYPPLGELLLEVEQIRQWQRDEGRRHG

SEQ ID NO: 43477 - protein, 774 aa, Pseudomonas aeruginosa
MRPLSRWLSSCGSLLALAALFLVVPLAGRYWLGWSTPFGYLSDLALGSLLVLLLHRRSLWFALPVMLLWCLFLIGNAELVAAVGRMPEPSDLKYLLDPQFVSSSTQGGGLAHLPLALGLGGATLLCVLLWRRRGPRLPRYAYALPAAFLAAHVGLQYLRPSDADQWQQYNLPHKLLASALSSGQLAVEDWLADDRPDTPPDVAGLNQLDLSGTPLLAGGGRARNVLIVAMEGIPGAYIAANRAAINSSYHEAPMPRLSGWAERAMTTPDYVLHSHQTIRGLYAMLCGDYSKLDSGTPKGVELLNNPARARECLPAQLRQHGFSTHFLQGAGLRFMAKDKVMPQMGFDKTLGRDWFRNTSYLEFPWGMDDKAFFEGAATYVKQLRQQKKPWMLTLLTVGTHQPYSAPADYLARYPSAKQAAVAYLDDAIDAFLADLEKQGVLRDTLVVLTSDESHGVDQVRLASAWGFNLVLAPEQAALPPIKSGVYGHVDLAASVLDYFGYRVPAGISGRSLFRDYASGREMMSYTNGMLRHHDGKDTFVECDFQQVCRRYRSEGFIADEAEFLGRFSGRQARLVSQRAAVLDHSVQQAGQLGQEFQFATHERIRLKPETHNDWTDNLIGAQYLEMPKNSRTTVTLKIRALQMDRNGARVTLKTKEFERDVPIPVPDIPRLLKGKPLDMSFTFDNPEARKAFSFHLLAEGRGIIEISDFHVVTAANPEPVESRSQVAEAAKEQPLLSTLKSLFANRPETEEAERADAPRERTVIPEQKALILSH

SEQ ID NO: 43478 - protein, 243 aa, Pseudomonas aeruginosa
MAAPFFQAKPRMLRSLFRRLFKYLLWFMAASVVLVAVLRWVPPPGTMVMVERKVGSWVDGQPIDLQRDWRSWEQLPDSLKVAVIAGEDQHFAEHHGFDLPAIQQALAHNERGGSIRGASTLSQQVAKNVFLWSGRSWLRKGLEAWFTLLIETLWTKQRILEVYLNSAEWGPGVFGAQAAARYHFGLDAERLSRTQASQLAAVLPSPLKWSAARPGPYVRQRAAWIRQQMWQLGGDDYLLRLER

SEQ ID NO: 43479 - protein, 454 aa, Pseudomonas aeruginosa
MQKETEIKLRVSRATLEALQEHPLLKKRNKSGWERRELYNQYYDTPGRELARAKVALRMRRDGEQYIQTLKSRGQSVAGLSERNEWDWYLEKNKLDLKKLDDKCWPAALKDLDKKQLKPIFSTDFVRQRAEIAWGRGKARVVVEAALDLGKVVAGDNQEEICELELELRQGDAAALLELAAELAADLPLMPCDISKAERGYRLFDPNSYEVDPPAQKLLAETPLDGAFAAIAWYLLGSSQRLAEQYRFNGHWRLLEDWLQHLQNLRTLLGSLGQAVPRASSRELREALDALLADWAPRIERGRDDETLRQQAPQLFRGELDETRWGLFSLNASRWLLAKAWTESRNERGNRQGSAALGKWLLRSLAEEAQATPLARAHQHPELLPDQAPRLQRMLTWLRLARGVLDLPEADRLYGELAKLLELLRQPVDAERLAARAAQAHTVLTLKPWKALMK

SEQ ID NO: 43480 - protein, 183 aa, Pseudomonas aeruginosa
MTRTSNPCAVVLAFAAIAASGTAMAANTITFSGEVTDQTCQVAVNGFTDPTVILDSVPVSALDGAVGRSAGETAFTLQLTDCVAPTADEHFTTLFQATNPSAAGNLVNTAASGATGVALQLLDSVGGNPVDLAGGAAVPAGDIVLANGATSTSYDYAVQYVSEAATVTPGPVLGVVTYTLRYE

SEQ ID NO: 43481 - protein, 815 aa, Pseudomonas aeruginosa
MPAPHGLSPLSKAFLMRRAFQRRILPHSLAMALSLPLAGYVQAQEVEFDIPPQALGSALQEFGRQADIQVLYRPEEVRNKRSSAIKGKLEPNQAITELLRGTGASVDFQGNAITISVAEAADSSVDLGATMITSNQLGTITEDSGSYTPGTIATATRLVLTPRETPQSITVVTRQNMDDFGLNNIDDVMRHTPGITVSAYDTDRNNYYARGFSINNFQYDGIPSTARNVGYSAGNTLSDMAIYDRVEVLKGATGLLTGAGSLGATINLIRKKPTHEFKGHVELGAGSWDNYRSELDVSGPLTESGNVRGRAVAAYQDKHSFMDHYERKTSVYYGILEFDLNPDTMLTVGADYQDNDPKGSGWSGSFPLFDSQGNRNDVSRSFNNGAKWSSWEQYTRTVFANLEHNFANGWVGKVQLDHKINGYHAPLGAIMGDWPAPDNSAKIVAQKYTGETKSNSLDIYLTGPFQFLGREHELVVGTSASFSHWEGKSYWNLRNYDNTTDDFINWDGDIGKPDWGTPSQYIDDKTRQLGSYMTARFNVTDDLNLFLGGRVVDYRVTGLNPTIRESGRFIPYVGAVYDLNDTYSVYASYTDIFMPQDSWYRDSSNKLLEPDEGQNYEIGIKGEYLDGRLNTSLAYFEIHEENRAEEDALYNSKPTNPAITYAYKGIKAKTKGYEAEISGELAPGWQVQAGYTHKIIRDDSGKKVSTWEPQDQLSLYTSYKFKGALDKLTVGGGARWQGKSWQMVYNNPRSRWEKFSQEDYWLVDLMARYQITDKLSASVNVNNVFDKTYYTNIGFYTSASYGDPRNLMFSTRWDF

SEQ ID NO: 43482 - protein, 339 aa, Pseudomonas aeruginosa
MSRACLLAALLAAPFAHAEMTALDDEQLSDVQGAGIGFVLDSAMVDGNKATIAINGVTNTATGQNVPITVKELYVAATGSNKGSTLAPVTLGRLNFPFKLNLAKGSVLTTQLDDGRVVSTLPDTADVIELAFPSLVSGAGGQPCIAGYAGAGSNCSSRASEKVDAGIRFDFGVTSTRTDVLNLDFSELAMDGSYLRFWGANARSQLVGEIRLNLYAKTFEIMSCGAGSPSCVSAAEQAARTVYLTNAYASVALGYGKSQPLLFSVTADGNFTFELPKLTLANAADFYANAPRTSLVIENLNIGGTRPGYGQVPTGGYNMGRNEISGLSFNYLKVTSHNL

SEQ ID NO: 43483 - protein, 104 aa, Pseudomonas aeruginosa
MQKIRRDDEVIVIAGKDKGKRGKVLKVLADDRLVVGGVNLIKRHTKPNPMLGQQGGIVEKEAPLHVSNVAIFNTETSKADRVGFKVEDGKKIRVFKSTQKPVQA

SEQ ID NO: 43484 - protein, 122 aa, Pseudomonas aeruginosa
MIQTQSMLDVADNSGARRVMCIKVLGGSHRRYAGIGDIIKVTVKEAIPRGKVKKGQVMTAVVVRTKHGVRRTDGSIIRFDGNAAVLLNNKQEPIGTRIFGPVTRELRTEKFMKIVSLAPEVL

SEQ ID NO: 43485 - protein, 262 aa, Pseudomonas aeruginosa
MAITIPYFWNLICGGQGMSEYGVLVRNGLGQTVIDGEFHNLSLLLERNIEVETSQWFSLDFPYAVTSAAPPVLAVQAWKNKILYFDSVQYRGGPGNWTGATLSFSGYGTHTSGSVRIRVYAYALPLLRGYGLRVRNSAGSVVFDSLRLPLVFSAELGGAPEDWVRVSGEPIIGAGRIDIYRPATWGQPADSYIAVGMALDVEFGRVAVSGGTANAIIYIRWGFTEEGVPRLMQHAYTGLPSSYPGIPAAVYYAMPSIPIIKA

SEQ ID NO: 43486 - protein, 471 aa, Pseudomonas aeruginosa
MKRYEKFADEIAELIRTGVLAPGQKVPSVRHASRTYGVSASTVFQAYYLLESRGLIMARARSGYFVCQHVQRPLPEPEISPRQADATEVDVSELVFSVLSSIKDPDTVPFGSAFPSPQLFPLPRLARSMAHAVRDMDPQSVVADMTPGNHGLRRQIALRYMVGGLLLPVEELVISNGALEALNLCLQVVTRPGDLVAIEAPAFYATLQVLERLKLKAVEIPVHPREGIDLEVLADSLERLPIKACWFMSNFQNPMGASMDDEKKRALAELLARHQVPMIEDDVYAELYFGQQAPKPVKAYDQEGLVMHCSSFSKSLAPGYRVGWVAGGRYAEQIERLKLMTSLSASIPAQAAIADYLQHGGYDRHLRKLRYALETQQNAMLAAVARYFPEQTRVSRPSGGYFLWLELPEAVDSLRLFQLALAQGISLAPGPIFSATRRFAHCARLNYGHPWSARQEKAMETLGRITQSLAG

SEQ ID NO: 43487 - protein, 475 aa, Pseudomonas aeruginosa
MNKATTEPAYNYKVVRQFAIMTVVWGVIGMGLGVLIASQLVWPQMNFDLPWTSFGRLRPLHTNLVIFAFGGCALFATSYYTVQRTCQVRLFSDTLAAFTFWGWQAVAVILLVSLPLGNTTTKEYAEIEFTGAIWLAIVWVAYAVVFFGTLIKRKVKHIYVGNWFFGSFILTTAMLHIVNHMSLPVSWFKSYSMYSGATDAMVQWWYGHNAVGFFLTTGFLGMMYYFVPKQAGRPVYSYRLSIVHFWALITLYIWAGPHHLHYTALPDWAQSLGMVMSLILLAPSWGGMINGMMTLSGAWHKLRDDPILRFLVVSLAFYGMSTFEGPMMAIKTVNALSHYTDWTIGHVHAGALGWVAMITIGSLYHLIPKVYGVEKMHSVGLINAHFWLATIGTVLYIASLWVNGITQGLMWRAVNEDGTLTYSFVESLVASHPGFIVRLVGGGFFLTGMLLMSYNTWRTVRQARPEGILAAARMA

SEQ ID NO: 43488 - protein, 262 aa, Pseudomonas aeruginosa
MKVWAVANQKGGVGKTTSSIALAGLLADAGKRVVVVDLDPHGSMTSYFGYDPDTLEHSAFDLFLHQGNVPEGLPASLLRSTSNERISLLPSSTALATLERQSPGKSGLGLVVSKSLAQLWQDFDHAIIDSPPLLGVLMVNALAASQHLVIPVQTEFLAVKGLERMVNTLAMINRSRKQALPYTIVPTLFDRRTQASLSTLRILNENYPDNLWQAFIPIDTRLRDASRAGVTPSQHDGKSRGVIAYRALLKHLLAQQPATRVA

SEQ ID NO: 43489 - protein, 359 aa, Pseudomonas aeruginosa
MISDGARRHAASARSSGFVLVGVVWFLAIMTLLASAAVLWVGRSLDATENRRKVLLRELEEHALLARVQWLVATQRYTVAGLSVPGNAGAAPSKVDMDTSILPIGGELPLDGREFCMANGWCVALLDRSARLSLSGIDPRVLSRLLAGLGVPAEQVQVMVAQWFSYLYPGAAPRLGSAAQASDRSSPGQARRRPLRSVMEVFRLEAWRPWEAHLLDAGWRDLVAADEAALNINTADARILSLAWGLPEDAVGRLLQARWQRPFTRMSDLHDVLGGHARLVPEDGWARLASPVLSIRLYPPGAEQGTEYEVRFNSEHRLLPPWQLLSKRSVKINDRYSNPPLHPDIAPGVLAAPLVARPW

SEQ ID NO: 43490 - protein, 172 aa, Pseudomonas aeruginosa
MSAGDVSNSEFVGSLYRDHRGWLLAWLNRNLGCRQRAEDLSQDTFVRLLGRPELPGLREPRAFLAKVARGLMIDHFRRAALEQAYLAELALVPEAEQPSAEEQYLILEDLREIDRLLGTLSLKARSAFLYSRLDGMPHAEIAERLGVSVPRVRQYLAQGLRQCYIALYGEPR

SEQ ID NO: 43491 - protein, 204 aa, Pseudomonas aeruginosa
MVDFILNAQVRSDLGKGASRRLRRNAGLVPAVVYGGDKEPQSVTLELREIAKLLENEAAFSHVIALNVGGAKETVLIKALQRHPAKGFVMHADFLRVVADHKLTAHVPLHFINEEVAVGVKQAGGEISHTISEVEVSCLPKDLPEFIEVDMAKVELGQIVHLSDLKAPKGVELVQLAHGNDLAVANIHASRVVKEEGSEEGAAE

SEQ ID NO: 43492 - protein, 323 aa, Pseudomonas aeruginosa
METVLTARDLTRHYEVSRGLFKGHAQVRALNGVSFELEAGKTLAVVGESGCGKSTLARALTLIEEPTSGSLKIAGQEVKGASKDQRRQLRRDVQMVFQNPYASLNPRQKIGDQLAEPLLINTALSREERREKVQQMMRQVGLRPEHYQRYPHMFSGGQRQRIALARAMMLQPKVLVADEPTSALDVSIQAQVLNLFMDLQQQFRTAYVFISHNLAVVRHVADDVLVMYLGRPAEMGPADKLYENPLHPYTRALLSATPAIHPDPTKPKIRIQGELPNPLNPPEGCAFHKRCPYATERCRSEVPELRLLDQRQVACHHAEQFLG

SEQ ID NO: 43493 - protein, 110 aa, Pseudomonas aeruginosa
MEVAAKLSGARISAQKARLVADQIRGKKVGEALNLLAFSSKKAAEIMKKVLESAVANAEHNEGADVDDLKVSTVFVNEGRSLKRIMPRAKGRADRIVKRSCHITVKVADK

SEQ ID NO: 43494 - protein, 91 aa, Pseudomonas aeruginosa
MPRSLKKGPFIDLHLLKKVEVAVEKNDRKPIKTWSRRSMILPHMVGLTIAVHNGRQHVPVLVNEDMVGHKLGEFAATRTYRGHAADKKAKR

SEQ ID NO: 43495 - protein, 1317 aa, Pseudomonas aeruginosa
MSGLPVSHVGEKVSGGVISTGSPTVHVGSSAVGLADRVSACVPLVGKPVNPMLGSKLLPEEVDFALAAPDTFTFARGYLSSNPRIGRLGRGWWLPGESMHLELSEDACVLVDAQGRRIGFPALAPGAQHYSGSEELWLRRGGSSGGEAQAWRGRWAAVPAELQTQEGSVLVLSGHSYLHFQRCPDGIWRLQASFGRAGYRTEFRWSGRGLLTGVRDSAGRSYALVYQQACEPSEGDDGLRLFGVILASHDGPPPDYIDPQSPGLDWLVRYQFSDSGDLIAVRDRLGQVVRVFAWREHMLVAHGEPGGLEVRYEWDVHAPHGRVVKQIEAGGLTRTFRYLRDATEVSDSLGRVERYEFAGEGGQRRWTALVRADGSRSEFDYDLFGRLVAMRDPLGRETRRRRDGQGRMLEEESPGKARYRKRVDEETGLLVELEDAMQRRWTFERDERGNATTVRGPAGSTRYAYEDPRLPDRPTRIVDPRGGERRLEWNRFGLLAALTDCSGQVWRYDYDNEGRLVASSDPLGQLTRRRYDPLGQLIGLELADGSALSYEYDALGRQTRIADAEGHATLFSWGHGDLLARVSDAGGGELSYLHDEAGRLVALTNENGVQAQFRYDLLDRLVEETGFDGRRQRYRYNAADELIAREDADGRETTYAYDRDGRLASIRVPATEHAPALVERYRWLADGRLASAGGADCEVRYTYDEVGNLRLESQVHADGWVYSVEHSHDALGVRQTSRYGDAPPVAWLTYGPGHLHGALVGAVELAFERDALHREVRRDARRDGQDDALFTQERQHAPLGRLQRSRLRLAGGFDWQRGYRYDGLGQLVGIDDNQYPSVRYEYDLGGRLLASRRAGAAASTYRYDAAGNRLEGVGEHAREDARQAFAENELYRSGFSRSETRASQAGEGPARWAGNRVERIAGNRYRFDALGNLVERIGADGERLRLAYDGAQRLVHLTRDYADGTRLEARYRYDALSRRIAKVVLRDGVEQQVRFGWDGDRQCAEAFARELRTTVHEPGGFVPLLRLEQACEPDPPELLQLRQAFAAEGQPLPAQCVPALGEARIAFFHTDHLGTPLQLSDERGQLRWQGVPDDWRAVAPERQPGAQPIRFQGQYHDEESGLYYNRYRYYLPEAGRYASQDPLGLGGGPNPYAYALNAPTLAYDPTGLIIPLVVIGAFAARAAIGAALGAGIELGMQTGKQVLGQMKDNWDSDRDLTDIKWKCIDINWKHVGASAAIGTVAPGMLSTGKTVVQSAKAIRTLSGQAANTANRAAKLAARKAAHADTIKKAVATQAAWQTGKQIVKCPLKDEEEECPPQ

SEQ ID NO: 43496 - protein, 297 aa, Pseudomonas aeruginosa
MGSRTWHWPGVLLGLLLATAGAQADTLRVATLDWAPYVGPDLPGKGLASRILDEALALDGHRAELVFLPWQRALKEAAEGRFDALMPAYLSPERRELFHATIPLLDSQLGFFRQRERLLPVNPAHLESLRPYRIGVVRGYVNREDFDADRSLTKDAVTNDWQNLEKLLRGRIDLAVVDRYTGYHLLARNVPALKDRLVFIEPPLEVKPLYVLVPKRHARGAALAASLDRNLRLMRRSGRLEQLIAEAHLERSGQTRTLAVDPLTGQADQQRSPGQEQDQGQHAPLQPAWREDPLGMR

SEQ ID NO: 43497 - protein, 813 aa, Pseudomonas aeruginosa
MHFSLRSRHLRPSLLASSLLLAVSAQGQEKLDVDLPAAPLGQAINALAQQSSVQILFAGDLGAGRQAPALKGRFTPEEALRQLLRDSGLKAQARDEHTFIVVPASEAAVPATQARSEPLDMEQMEITASRTSSDLVSATRQSTVIEHAQLEELRQGSDSLATVLAKAVPGMSDSSRTITEYGQTLRGRSMLVMVDGVPLNTNRDSSRNLANIDPALIERIEVIRGSSAIYGSGATGGIISITTRPAGGENRAETRLSATSPLTRLGSDGLGGQFQQYFAGSLGALDYSFDFGTRHVGASYDAHGDRIAPEPSQGDLFDSNVYNIGGKLGLRIDENQRVQLALSHYDARQDTDYATDPRVARLPPGSVPANAIKGLELDEQNRIRNTLANLEYENLDILGSRLSAQLYYRDYFTRFTPFDARAVSTRGGNVDQIMQNSEVFGSRLTLRTPLGESGNTELVWGGDYNQERSDMPLDVFDPAAYDASGGLVFDKIGKLTYMPPLRTRSAGAFAQLQHRFDEHWSIDGGLRYEYSTAEFDDFIPLSESKAASPVTVKGGDLDYDAVLSNLGIVYSPVAGQEIYASFSQGFQLPDVGIQLRNARRGFDIGSSNLEPVKTNNYELGWRGAIGGNTLGSLALFYTTSKLGDVQSFNNGLILTRTKERIYGVEASADWLSDDEVWGAGGSATWMRGREKPDGKDWQDMTGYRVPPLKLTAYLQYKPDADWNNRLQATFFDSKDYRLDGVESFGRRQVSTYTTVDLVSQYRITPDDQLSLGIQNLFNRDYYPLYSQLLRNNNNTSHLPAPGTVLTASYTHNW

SEQ ID NO: 43498 - protein, 442 aa, Pseudomonas aeruginosa
MPSSQLPGASPSEIDLVQLFQQLWASKWLIALIAALATAAALAYALLAVPTYQVDVLLRPIQTKALEAVNVNGLYALTPREALDRVGNELAAYSGRLEYFEAHPELFQQLNAEGLSPEQAFWKFNQDAFSMQQADLKKDPQAAPFFRLSMQYPQGMDGAAILNGMLASTIENERQRILDDLQARIDGRLQFLEQDIEGKRASYQATKEGKIARLLEADSIRRAGLEDELKALRGRLKMVRDSRIQQLNEAIQIATRLGIVKPTTPGALGEVGQDGSRSVFRTEVNNQQIPLYFMGVDALTAERDTLLKRKGDDFTEPRVAKIQQELKQLENNREVQYLQARKGEERFFENIDKLRGEQARLKTLKASELKIELVRIDQKASTPLKPIKPRKALVVALGLLGGLVFGVLVALVRAMLRTPRQRVQEDSLPPGVVSLDRSLSGT

SEQ ID NO: 43499 - protein, 113 aa, Pseudomonas aeruginosa
MRSPLATIACACLLLGGCSKSAEDSANPLLGKDAECLELFARSNALYCDIREDERESQANGTPRRHTDYEVADAAYLLKATGERCAIDTTYVTECSAKAGQWLQKARAKAAKP

SEQ ID NO: 43500 - protein, 679 aa, Pseudomonas aeruginosa
MAKPSFFSSDLVQVLLCPRLHELQFAVKALLAGGLALYLAFGLELEQPQWALMTVFVVSQPYSGMVLAKGMFRLIGTCAGALVSIGMVALYGQASLPFLLLMALWLAFCTAGASLLHNHASYGFVLAGYTAAIVALPASADPATVFDQAVARCSEIGLGILCAALVNVLLWPRRLERQLANQGKAAWEAGLQAAAAELRGADERGELLAALGRIAAADAQRDHAWFEGALGRARSQALRVLGLDLLGLLRAARKVARERRLLDPASAHALQPWLEELEALLREGRQAEFEACRQRLRLALDAAHGQLHLCLVCLERLLGEARAAGRSVEALVYGAPTRQAPGAIAWHRDIERGVLFGLRSALAFLCVAAFWLASAWPSGLGAVSITGVVLSLFASRDNPAQAGLNFLRGILLSIPLAGFVALFYLPGVDGFPLLCLGLGVPLFFAALCVNRASLAGIASPFCIFFVKNVAPSNSMSYDLAHFLNNALSTVLGVAFAVLVFNLVSLRPGERHYRRMLQATLGDLARLTLRSPAQAEAWFGGRTADRLIRLAQRYDRLPEGRRQPWSDGLMGLDFGDELLYLRQCLEEVPASLAQARDRYLRRLRLALLGDGPRAEREHALDPPTARLLKALAASPLAGSERGELAGAALVQLQATWRQWCRSHAPAGTALRADPLPGAGR

SEQ ID NO: 43501 - protein, 471 aa, Pseudomonas aeruginosa
MIKKILIANRGEIAVRIVRACAEMGIRSVAVYSEADRHALHVKRADEAHSIGADPLAGYLNPRALVNLAVESGCDALHPGYGFLSENAELAEICAERGIKFIGPSAQVIRRMGDKTEARRSMIAAGVPCTPGTEGNVADLAEALREAERIGYPVMLKATSGGGGRGIRRCNSREELEQAFPRVISEATKAFGSAEVFLEKCIVNPKHIEAQILADSFGNTVHLFERDCSIQRRNQKLIEIAPSPQLTPEQRAYIGDLAVRAAKAVGYENAGTVEFLLADGEVYFMEMNTRVQVEHTITEEITGIDVVREQIRIASGLELSVKQDDIVHRGYALQFRINAEDPKNNFLPSFGKITRYYAPGGPGVRTDTAIYTGYTIPPYYDSMCLKLIVWALTWEEALDRGLRALDDMRVQGVKTTAPYYQEILRNPEFRSGQFNTSFVESHPELTQYSIKRNPSHLAIAIATAIAAHAGL

SEQ ID NO: 43502 - protein, 217 aa, Pseudomonas aeruginosa
MFSLPHHSPRDLPFGRRQTAILFVDMQRAWVEPGRDPHVDPQAAGYFYERVQNQVIPNQQRLLRAMRAVDENVLHTVIESLTADGRDRSLDHKLSEMHLPKGSPDARVIDALEPTANEIVLPKTSSGVFNSTAIDYVLRNLGTRHLIVCGVVTDQCVDMAVRDAADRGYLVTLVEDACATHTPERHQACLEAIKGYCWISDTETVLQRIAALGRSNL

SEQ ID NO: 43503 - protein, 332 aa, Pseudomonas aeruginosa
MKRLFSASLLAAGLALGGAAHAAQPLLNVSYDVMRDFYKEYNPAFQKYWKAEKGENITIQMSHGGSSKQARSVIDGLPADVITMNQATDIDALADNGGLVPKDWATRLPNNSAPFTSATVFIVRKGNPKALKDWPDLLKDGVQVVVPNPKTSGNGRYTYLSAWGYVLKNGGDENKAKEFVGKLFKQVPVLDTGGRAATTTFMQNQIGDVLVTFENEAEMIAREFGRGGFEVVYPSVSAEAEPPVAVVDKVVEKKGSRAQAEAYLKYLWSDEGQTIAANNYLRPRNPEILAKFADRFPKVDFFSVEKTFGDWRSVQKTHFIDGGVFDQIYSPN

SEQ ID NO: 43504 - protein, 241 aa, Pseudomonas aeruginosa
MRNDGGFLLWWDGLRSEMQPIHDSQGVFAVLEKEVRRLGFDYYAYGVRHTIPFTRPKTEVHGTYPKAWLERYQMQNYGAVDPAILNGLRSSEMVVWSDSLFDQSRMLWNEARDWGLCVGATLPIRAPNNLLSVLSVARDQQNISSFEREEIRLRLRCMIELLTQKLTDLEHPMLMSNPVCLSHREREILQWTADGKSSGEIAIILSISESTVNFHHKNIQKKFDAPNKTLAAAYAAALGLI

SEQ ID NO: 43505 - protein, 531 aa, Pseudomonas aeruginosa
MSAYQNEIKAVAALKEKNGSSWSAINPEYAARMRIQNRFKTGLDIAKYTAAIMRKDMAEYDADSSVYTQSLGCWHGFIGQQKLISIKKHLKTTNKRYLYLSGWMVAALRSDFGPLPDQSMHEKTAVSGLIEELYTFLRQADARELDLLFTGLDAARAAGDKAKEAELLAQIDNFETHVVPIIADIDAGFGNAEATYLLAKKMIEAGACCIQIENQVSDEKQCGHQDGKVTVPHIDFLAKINAVRYAFLELGVDDGVIVARTDSLGAGLTKQIAVTNEPGDLGDLYNSFLDCEEISESELGNGDVVIKREGKLLRPKRLASNLFQFRKGTGEDRCVLDCITSLQNGADLLWIETEKPHVGQIKAMVDRIREVIPNAKLVYNNSPSFNWTLNFRQQVFDAFVAEGKDVSAYDRNKLMSVEYDDTELAKVADEKIRTFQRDGSAHAGIFHHLITLPTYHTAALSTDNLAKGYFADEGMLAYVKGVQRQELRQGIACVKHQNMAGSDIGDNHKEYFAGEAALKASGKDNTMNQFH

SEQ ID NO: 43506 - protein, 297 aa, Pseudomonas aeruginosa
MTSTSRGLAGTLLPVGLLLIAMASIQSGASLAKSMFPLVGAQGTTALRLFFAALILLLLLRPWRKRLSLQSLRSVVVYGIALGGMNLLFYLSVRTVPLGIAVALEFTGPLLVAILSSRRLLDFLWIGLAVFGIWLLLPLGNSAEPLDLVGAAYALGAGVCWALYILFGQRAGADHGAQGAALGVLVAAILVVPIGVAHAGADLLDPALIPLALGVAVLSTALPYTLEMVALTRLPARTFGTLMSIEPAFGALSGLLFLGERLSPTQWLAIGAIILASVGTTLSVKSRGAAPALPAKD

SEQ ID NO: 43507 - protein, 212 aa, Pseudomonas aeruginosa
MELSLSRVHFPVTTLGPGRRLGIWFQGCSIRCPGCISADTWGPGRRRIALARLLADIQPWLEQAEGITVSGGEPFEQFAALLALLGELRRRSRADILVYSGYPLEHLHAQLEQAAGLIDALISDPYQQHAEQSLALRGSDNQRLSLLTELGRARLGGYQRPLREDDKALDLMFDHDGSVWMAGIPRRDDLLRLQDLLREQGHQLSVSAHRPR

SEQ ID NO: 43508 - protein, 442 aa, Pseudomonas aeruginosa
MAKQGALSALSNGGLSELWARLRFLFLAIIVYRIGAHIPVPGINPDRLAALFRQNEGTILSLFNMFSGGALERMSIFALGIMPYISASIIMQLMTAISPQLEQLKKEGESGRRKISQYTRYGTVVLALVQAIGMSVGLGSQGVAFSNDFGFYFVAVTTFVAGAMFMMWLGEQITERGVGNGISMLIFAGIVAGLPRAIGQSFESARQGDINIFALIGVGLLAVAIIAFVVFIERGQRRIAVHYAKRQQGRKVFAAQTSHLPLKVNMAGVIPAIFASSILLFPASLGSWFGQSEGLGWLQDVAQAIAPGQPLNILLFTAGIVFFCFFYTALMFNPKDVAENLKKSGAFIPGIRPGEQSARYIDGVLTRLTMFGALYMTAVCLLPQFLVVAAHVPFYLGGTSLLIVVVVVMDFMAQVQSHLVSHQYESLMKKANLKGYGSGMLR

SEQ ID NO: 43509 - protein, 1053 aa, Pseudomonas aeruginosa
MTFPRFFIDRPIFAIVLSVLMMIGGIVSFFQLPLSEYPAVTPPTVQVTTAYPGANPDVIAQTVATPLEQAITGVEGMLYMSSQSATDGRMILTITFDQHIDPDMAQIQVQNRVSRVLSRLPDEVQRQGVVTQKTSPDILMVVHLLSPEQRYDPLYISNYAYLQVRDELLRLPGISDVVVWGAGEYSMRLWLDPDLIAARGLTAGEVIAAVREQNVQVAAGAVGQAPDSTAAFQVTVNTLGRLSDEEQFGDIIVRTGADGQVTRLRDVARIEMGGDAYALRSLLDGEPAVALQIIQSPGANALDTAEAVRATVARLEGNFPAGLSARIAYDPTVFVRASLQTVATTLLEAILLVVVVVVLFLRSWRASLIPLMAVPVSLVGTFAVMHLMGFSLNTLSLFGLVLSIGIVVDDAIVVVENVERHIENGEPPLQAARRAMDEVTGPIMAITSVLAAVFIPTAFLSGLQGEFYRQFALTIAISTILSALNSLTLSPALAGLLLRPRPAGGAVAGRFQRLLQVLGRPLRNAPEAYGNAVRKVVRVSGLALVVYGGLLGLTWVGFQAVPPGFVPMQDKYYLVGIAQLPNGASLERTDAVVRQMSRIGLDEPGVESVVAFPGLSVNGFVNVPNAAVMFFMLDPFESRTSADLGALAIAGRLQARFASIPDGFLGVFPPPPVPGLGTIGGFKMQVEDRGGAGLEALARQTQVLMMKATESGQLGGLMTSFDINAPQLEVVVDRTKVKSQGVRLADVFEALQVYLGSLYINDFNRFGRTYKVTAQADAPHRMQAEAIGRLQVRNAAGAMLPLSSFVTVTPSSGPDRVIHYNGYPSADISGGALPGVSSGQAVALMERLAGEVLPEGMTFEWTDLTYQQKLAGNSALFIFPLCVLLAYLILAAQYNSWLLPLAVLLIVPMCLLSAIAGVWLVGGDNNVFVQIGLVVLVGLAAKNAILIVEFARTLEAEGARALEAVVEACRLRLRPILMTSLAFIAGVVPLVMASGAGAEMRQAMGVAVFAGMLGVTLFGLFLTPVFYVLVRALAARLERRAGGSLAHLEGGRP

SEQ ID NO: 43510 - protein, 474 aa, Pseudomonas aeruginosa
MAGKTLYDKLWDMHLVKQRDDGSALIYIDRHILHEVTSPQAFEGLRLAGRKPWRIDANIATPDHNVPTTRTERKGGIAAIADEVSRLQVQTLDENCDDFGITEFKMNDVRQGIVHVVGPEQGATLPGMTVVCGDSHTSTHGAFGALAHGIGTSEVEHVLATQCLVAKKMKNMLVKVEGRLPAGVTAKDIVLAVIGRIGTAGGNGHAIEFAGSAIRDLSIEGRMTICNMSIEAGARVGLVAVDQKTIDYVKGRPFAPSAEQWDQAVACWQGLVSDADARFDTVVELDAAQIKPQVSWGTSPEMVLAVDQNVPDPARESDPIKRGSIERALKYMGLRPNQAITDIQLDRVFIGSCTNSRIEDLRAAAEVARGRKVAATIKQALVVPGSGLVKEQAEKEGLDRIFIEAGFEWREPGCSMCLAMNPDRLESGEHCASTSNRNFEGRQGAGGRTHLVSPAMAAAAAVNGRFIDVRELLA

SEQ ID NO: 43511 - protein, 344 aa, Pseudomonas aeruginosa
MLTIYSDDHRLHHGRHELIGGQFTPCFEKPSRADMVLDRVKAVGLGEVRAPRDFGLEPIRRVHSEGFVRFLQNAWQDWLATGRSHDMLPIAWPTRRLRQTEPDNIDGRLGYYSFDAGAPITAGTWQAITSSANVALSGQSELANGARSVFSLCRPPGHHAAADYMGGYCFFNNAAIAAQAFLDRGAGRVAILDVDYHHGNGTQDIFYDRADVLFTSIHGDPRFEYPYFLGYADEKGNGVGTGYNFNYPLAAGSDWATWSQALQAAIRQIQAYAADALIVSLGVDTFKEDPISQFRLDSPDYLRMGEAIGKLGLATLFVMEGGYAVEEIGINAVNVLQGFEGVHR

SEQ ID NO: 43512 - protein, 200 aa, Pseudomonas aeruginosa
MKRWLGVALGCSGLAIALACAGVLLAPADMAASSSSPSPARTVAALPAVDDRPPPPAPVRSQAAAPAYEAEPPVAELDREQAIQFMQMLRDEGDPRSPPLGGLQPRQGATAQELADPKQYQAFEERQTRELVQAYTSGVQQIPEIRARIEAAEQGGERSAEEIDEARAALGQLEMMRDKLQRESPQLLPGDSAPTSPAAP

SEQ ID NO: 43513 - protein, 166 aa, Pseudomonas aeruginosa
MANNEQKRDEGYIEKLVQVNRVAKTVKGGRIFAFTALTVVGDGKGRVGFGRGKAREVPAAIQKAMEAARRNMIQVDLNGTTLQYPTKSAHGASKVYMQPASEGTGIIAGGAMRAVLEVAGVQNVLAKCYGSTNPVNVVYATFKGLKNMQAPEAVAAKRGKSVEEIL

SEQ ID NO: 43514 - protein, 116 aa, Pseudomonas aeruginosa
MSVKKETRLRRARKARLKMRELETVRLCVYRSSQHIYAQVIAADGGKVLASASTLDKDLREGATGNIDAAKKVGQLVAERAKAAGVTQVAFDRSGFKYHGRVKALADAAREGGLEF

SEQ ID NO: 43515 - protein, 400 aa, Pseudomonas aeruginosa
MTQSHRPRPLDGITVVSLEHAIAAPFCTRQLADLGARVIKIERPGVGDFARGYDERVNGLSSHFVWTNRSKQSLSLDLKQAEALPLLEKLLAGADVLVQNLAPGAAARLGLSYEALRERFPRLIVCDISGYGEGGPYEKKKAYDLLIQSEGGFLSVTGGAGPNEMAKAGCSIADIAAGMYAYSSILSALLLRERTGEGSRIDVSMLESLVEWMGYPMYYAYQDAPPPPRAGASHSTIYPYGPFPAGDGGTVMLGLQNEREWRAFCDKVLRRPELADDERFSANFKRSANREELRALIVEAFAALPAAEVVARLEQAQIASAHVNDMAGVWAHPQLQARQRWTSIDSPAGRLPALLPPASSSAFVPRMDAVPALGGDSDALLAELGCTAADIQRLRATGTV

SEQ ID NO: 43516 - protein, 1043 aa, Pseudomonas aeruginosa
MSEFFIKRPNFAWVVALFISLAGLLVISKLPVAQYPNVAPPQITITATYPGASAKVLVDSVTSVLEESLNGAKGLLYFESTNNSNGTAEIVVTFEPGTDPDLAQVDVQNRLKKAEARMPQAVLTQGLQVEQTSAGFLLIYALSYKEGAQRSDTTALGDYAARNINNELRRLPGVGKLQFFSSEAAMRVWIDPQKLVGFGLSIDDVSNAIRGQNVQVPAGAFGSAPGSSAQELTATLAVKGTLDDPQEFGQVVLRANEDGSLVRLADVARLELGKESYNISSRLNGTPTVGGAIQLSPGANAIQTATLVKQRLAELSAFFPEDMQYSVPYDTSRFVDVAIEKVIHTLIEAMVLVFLVMFLFLQNVRYTLIPSIVVPVCLLGTLMVMYLLGFSVNMMTMFGMVLAIGILVDDAIVVVENVERIMAEEGISPAEATVKAMKQVSGAIVGITLVLSAVFLPLAFMAGSVGVIYQQFSVSLAVSILFSGFLALTFTPALCATLLKPIPEGHHEKRGFFGAFNRGFARVTERYSLLNSKLVARAGRFMLVYAGLVAMLGYFYLRLPEAFVPAEDLGYMVVDVQLPPGASRVRTDATGEELERFLKSREAVASVFLISGFSFSGQGDNAALAFPTFKDWSERGAEQSAAAEIAALNEHFALPDDGTVMAVSPPPINGLGNSGGFALRLMDRSGVGREALLQARDTLLGEIQTNPKFLYAMMEGLAEAPQLRLLIDREKARALGVSFETISGTLSAAFGSEVINDFTNAGRQQRVVIQAEQGNRMTPESVLELYVPNAAGNLVPLSAFVSVKWEEGPVQLVRYNGYPSIRIVGDAAPGFSTGEAMAEMERLASQLPAGIGYEWTGLSYQEKVSAGQATSLFALAILVVFLLLVALYESWSIPLSVMLIVPIGAIGAVLAVMVSGMSNDVYFKVGLITIIGLSAKNAILIVEFAKELWEQGHSLRDAAIEAARLRFRPIIMTSMAFILGVIPLALASGAGAASQRAIGTGVIGGMLSATFLGVLFVPICFVWLLSLLRSKPAPIEQAASAGE

SEQ ID NO: 43517 - protein, 78 aa, Pseudomonas aeruginosa
MSRVCQVTGKGPVTGNNISHAHNKTRRRFLPNLQHHRFWVESEKRFVRLRVSAKGMRIIDKRGIEAVLADLRARGEKF

SEQ ID NO: 43518 - protein, 200 aa, Pseudomonas aeruginosa
MQLNVNGAQAIEVSERTFGGEFNETLVHQAVVAYMAGGRQGSKAQKTRSEVSGGGKKPWRQKGTGRARAGTIRSPIWRGGGTTFAAKPRSHEQKLNKKMYRAALRSILAELVRLDRLVVVADFAVDAPKTKGLVAKLDTLGLKDVLIVTDGVDENLYLAARNLAHVDVRDVQGSDPVSLIAYDKVLVTVSAVKKFEELLG

SEQ ID NO: 43519 - protein, 381 aa, Pseudomonas aeruginosa
MSMRLFPGRVSLRRRPGAQARQALVLGLCCLTGGQAWALNEVALNCSFDNGKGLPWRVVNELTSGTAKGTVLFARPVSLFLNYKPQASQEAHELVIGGNWSGVGYPGPYGTVASDVKGIGYRISVDAQDGVKRVIPVDNQPHALDKRVTSFSGSTTSDYLQELVLTVDPGELPAGDLKVTSVSGSATLNLWAVDRLKGEASIGSVLAVPADNYPTGVCRKPYSLIGPASIAIGGGPPPPPIPKKCKVEVGREINVKLGSVALKNFPRVNDTSTERSFDISLSECAALAKPEIAFRDKYVSAQQADPTILSLKSGGAAGFGIVVKNGLDQQRIRFDGTPYPMRRVGDSADLPLSAAYIRIGAEGELKAGVADGAAEFTFTFP

SEQ ID NO: 43520 - protein, 349 aa, Pseudomonas aeruginosa
MDIKGALNRIVNQLDLTTEEMQAVMRQIMTGQCTDAQIGAFLMGMRMKSETIDEIVGAVAVMRELADGVQLPTLKHVVDVVGTGGDGANIFNVSSAASFVVAAAGGKVAKHGNRAVSGKSGSADLLEAAGIYLELTSEQVARCIDTVGVGFMFAQVHHKAMKYAAGPRRELGLRTLFNMLGPLTNPAGVRHQVVGVFTQELCKPLAEVLKRLGSEHVLVVHSRDGLDEFSLAAATHIAELKDGEVREYEVRPEDFGIKSQTLMGLEVDSPQASLELIRDALGRRKTEAGQKAAELIVMNAGPALYAADLATSLHEGIQLAHDALHTGLAREKMDELVAFTAVYREENAQ

SEQ ID NO: 43521 - protein, 438 aa, Pseudomonas aeruginosa
MSNPQVRPQAEEEPALIEAAREAANEVLEAATEVERYIEKGTPQFMRTSLALFSGGFATFALLYCIQPMMPVLSKAFSISAAESSLALSVATAMLALGLLVTGPISDAIGRKPVMVVSLLAAALFTLGSAVMPTWHGVLLMRALVGLSLSGLAAVAMTYLSEEIHPQHIGLSMGLYIGGNAIGGMSGRLISGVLVDFISWHAALAVLGGLALVAALVFWRVLPESKHFRPAPLKPATLLNGYRLHFRDAGLPWLFLIGFLLMGSFVTLFNYIGYRLLAEPYHMSQAVVGVLSVVYLSGIYSSAWVGSLADKLGRRKVLWAVILLMLGGLLLTLFEPIPLMLAGLLLFTFGFFGAHSVASSWIGRRALRAKGQASSLYLFSYYVGSSLAGTLGGVFWHYYGWNGIGLFIGSLLVVAVLVSLHLARLPALPGNTLAQPAH

SEQ ID NO: 43522 - protein, 475 aa, Pseudomonas aeruginosa
MSKVVLASQLPNKRNASLAPGLKQRHVTMLSIAGVIGAGLFVGSGHAIAAAGPAALLAYLIAGTLVVLVMRMLGEMAVASPDTGSFSTYADRSIGRWAGFTIGWLYWWFWVLVIPLEAIAAAAILNAWFPAIDTWIFALAVTFLLTVTNLFSVARYGEFEFWFALLKVIAIIAFIVLGAVAIVGGLPEREVSGLSSLMASHGGFVPNGYGAVLGALLTTMFSFMGTEIVTIAAAESKDPAKQITRATNSVIWRIGLFYLVSIFIVISIVPWNDPLLIQVGSYQRALELLDIPHAKLIVDLVVLVAVASCLNSAIYTSSRMVFSLAKRGDAPSVLKLTNTAHVPRPAVLASTAVGFLTTIVNYFAPEKVFTFLLASSGAVALLVYLVIAVAQLRMRKQLQASGQPIEFRMWLYPWLTWAVILFIVAALSIMLIMPEHRHEVFATALLTIFTVCLGLLNARRKPRLGEDYAGKTARV

SEQ ID NO: 43523 - protein, 299 aa, Pseudomonas aeruginosa
MKVLILAAYALSILYVHFRGRVRHKLSRQLSDHSSFLAPINCLMYLFSKVPNRPYLAPQTFPELQVLVDNWQAIRSEALHLHDAGNIKRSEQYDDIGFNSFFKSGWKRFYLKWYDEAHPSAGQLCPQTTALLRQIPSVKAAMFAELPPGSKLVRHRDPYAGSLRFHLGLFTPNDPACFIEVDGERYHWRDGEAVVFDETFIHYAENATEHNRIILFCDIERPLTQGWATAFNRWFSRNVMAAAAAPNNAGDRTGGLNRIFDSLYKIRLQGKRLKKRNRKLYYLQKWGFFALVLAFILWI

SEQ ID NO: 43524 - protein, 417 aa, Pseudomonas aeruginosa
MSQSLKRALFSALLVILVSYPILGLKLRTVGIKLEVLGADAQTLWTIAAAALAMFVWQLFRDRIPLKLGRGVGYKVNGSGLKNFLSLPSTQRWAVLALVVVAFVWPFFASRGAVDIATLILIYVMLGIGLNIVVGLAGLLDLGYVGFYAVGAYTYALLAEYAGFGFWTALPIAGMMAALFGFLLGFPVLRLRGDYLAIVTLGFGEIIRILLRNMTEITGGPNGIGSIPKPTLFGLTFERRAPEGMQTFHEFFGIAYNTNYKVILLYVVALLLVLLALFVINRLMRMPIGRAWEALREDEVACRALGLNPTIVKLSAFTIGASFAGFAGSFFAARQGLVTPESFTFIESAMILAIVVLGGMGSQLGVILAAVVMVLLQEMRGFNEYRMLIFGLTMIVMMIWRPQGLLPMQRPHLELKP

SEQ ID NO: 43525 - protein, 123 aa, Pseudomonas aeruginosa
MATINQLVRKPRKRMVDKSDVPALQNCPQRRGVCTRVYTTTPKKPNSALRKVCRVRLTNGFEVSSYIGGEGHNLQEHSVVLIRGGRVKDLPGVRYHTVRGSLDTSGVKDRKQGRSKYGAKRPK

SEQ ID NO: 43526 - protein, 709 aa, Pseudomonas aeruginosa
MSEQNNEQRSQAAGTDTVDRGNSNAKLEQLEAYREDATGEALSTNTGTRIADNQNTLKAGERGPSLLEDFIMREKITHFDHERIPERVVHARGSAAHGYFEAYEDLSDLTKAGFLAEAGKRTPVFVRFSTVQGPRGSADTVRDVRGFAVKFYTDEGNFDLVGNNMPVFFIQDAIKFPDFVHAVKPEPHNEIPTGASAHDTFWDFVSLTPESAHMVMWLMSDRAIPIAYRNMQGFGVHTFRLVNAAGESVLVKFHWRPKSGTCSLVWDEAQKLAGKDPDFNRRTLWEDIEKGDYPEWELGLQVIPENQQDSFDFDLLDPTKLVPEELVPVRVVGRMVLNRNPDNFFAETEQVAFHVGHVVPGIDFTNDPLLQGRLFSYTDTQLLRLSGPNFNEIPINRPLCPFHNNQRDAPHRQTINRGRASYEPNSIDGGWPKETPPAARNGGFSTYHEPVSGSKLRKRADSFADHFSQAALFWHSMSEAEQAHIVAAYSFELSKVERQSIREREVNQILLNIDPQLAARVAANVGVQLAAPANPTPQPKPSPALSQMNLLSGDIRSRKVAILIADGVAESDVSDLRDALRQEGADAKLIAPSASPVQAENGAELSPEGTWDGLPSVAFDAVFVPGGAASSQAIGADGRGLHYLLEAYKHLKPVAFAGDAQALASQLSLPGDPGVVLGATATDVFPGLRQALMQHRIWQREAATKAIPA

SEQ ID NO: 43527 - protein, 1062 aa, Pseudomonas aeruginosa
MNFSQFFIQRPIFAAVLSLLILIGGAISLFQLPISEYPEVVPPTVVVRANFPGANPKVIGETVASPLEQAITGVENMLYMSSQSTSDGKLTLTITFALGTDLDNAQVQVQNRVTRTEPKLPEEVTRLGITVDKASPDLTMVVHLTSPDNRYDMLYLSNYAVLNVKDELARLDGVGDVQLFGLGDYSLRVWLDPNKVASRNLTATDVVNAIREQNRQVAAGTLGAPPAPSDTSFQLSINTQGRLVTEEEFENIIIRAGANGEITRLRDIARVELGSNQYALRSLLNNKPAVAIPIFQRPGSNAIEISNLVREKMAELKHSFPQGMDYSIVYDPTIFVRGSIEAVVHTLFEALVLVVLVVILFLQTWRASIIPLAAVPVSLIGTFAVMHMLGFSLNALSLFGLVLAIGIVVDDAIVVVENVERNIGLGLKPVEATKRAMREVTGPIIATALVLCAVFIPTAFISGLTGQFYRQFALTIAISTVISAFNSLTLSPALAAVLLKGHHEPKDRFSVFLDKLLGSWLFRPFNRFFDRASHGYVGTVNRVLRGSSIALLVYGGLMVLTYFGFSSTPTGFVPQQDKQYLVAFAQLPDAASLDRTEAVIKQMSEIALAQPGVADSVAFPGLSINGFTNSPNSGIVFTPLKPFDERKDPSQSAGAIAAALNAKYADIQDAYIAIFPPPPVQGLGTIGGFRLQIEDRGNQGYEELFKQTQNIITKARALPELEPSSVFSSYQVNVPQIDADIDREKAKTHGVAISDIFDTLQVYLGSLYANDFNRFGRTYQVNVQAEQQFRLEPEQIGQLKVRNNLGEMVPLASFIKVSDTSGPDRVMHYNGFITAELNGAPAAGYSSGQAQAAIEKLLKEELPNGMTYEWTELTYQQILAGNTALFVFPLCVLLAFLVLAAQYESWSLPLAVILIVPMTLLSAITGVILAGSDNNIFTQIGLIVLVGLACKNAILIVEFAKDKQEEGMDRVAAVLEACRLRLRPILMTSIAFIMGVVPLVISTGAGAEMRHAMGVAVFSGMIGVTFFGLLLTPVFYVLIRRFVENREARRAANDKGLPEVHA

SEQ ID NO: 43528 - protein, 384 aa, Pseudomonas aeruginosa
MLGLPLDRREGPPMPALPLSRRALAALALVFALPALAEDWPDTDWPRAQQPAGPALEAFERYAFGRRDDVRRKGIRTDAVVVIRDGRLVYERYAGPSRAETPHLTWSVSKSLLATLLGVAEGEGRFQLDDPVARYYPPFARHPEVTLRHLLNWSSGLDWQEDYEFAPLKSSVVAMLYTRGRDDMAGFVAETPQARPPGRRFRYSSGDSNVLAAALHGMLGADYAEYPWRALFEPLGIRSAVWERDAAGTFVGSSYVYMSARDLARVGLLMQRHGRWRERQLLPLAWVEFNLTPFARYRPSAEEEGEAVPGGQWWLNRAVKGAPAPWPDVAETAFAALGHWGQALYVLPEEKLVIVRYADDRDGRFRHNEFLRLAQAAFAGEARP

SEQ ID NO: 43529 - protein, 191 aa, Pseudomonas aeruginosa
MLKKTLAALALGSALFTAGQAMAADYKIDKEGQHAFIEFRIKHLGYSWLYGRFNDFDGSFTFDEKNPSADKVKVTINTNSVDTNHAERDKHLRSGDFLNVSKNPTATFESTEVKANGDSADITGNLTLNGVTKPVTIKAKLIGQGDDPWGGYRAGFEGSATLKLKDFGIKMDLGPASQEVELLLSVEGIRQ

SEQ ID NO: 43530 - protein, 451 aa, Pseudomonas aeruginosa
MNATALSPNPAPAISRRTMLIAFVFCFLGLLADGVDLMFLAYSLNSLKAEFGLSNFEAGSLGSLTLAGMAVGGIYGGWCCDRFGRVRVVTWTIVLFSIGTALLGLTQNYWQFALIRFVASLGLGSLFVACNILMSECVGTRYRTTILAAMQAGWTVGYLVATLLAGQIIPEFGWRTLFFTAVAPALVCLALRPWVPESPSWLAAQAGRQRPGAAPQSHAEAGGAGPLGRMLGDPETRGMFLLWSLTSCFLLFGYYGTNNWMPSYLESELGMNFKSMTGYMVGTYSAMILGKVAAGVCADLFGRRLTFAAGAIGSAAFMPLIVFYHSPSNILWILITFGFIYGVPVGVLATYMTESFSTRVRGSAVGTAYNLGRIGAAVAPAGIGLLATHVSIGAGFLVMGITYVLTGLIPALFIADRLYDPNRESRDAESASRRQAPGSAVDTAERRAAKA

SEQ ID NO: 43531 - protein, 464 aa, Pseudomonas aeruginosa
MARFTHSVGGETYRFDSLKDVMAKASPARSGDFLAGVAASNDGERVAAQMALADIPLKHFLDEALIPYEDDEVTRLIIDTHQRDAFAPVSHLTVGGFRDWLLGDAADEASLRALAPGLTPEMAAAVSKIMRVQDLVLVAQKIRVVTRFRNTLGLRGRLSTRLQPNHPTDDPAGIAASILDGLLFGNGDAMLGINPATDSMASICALLEMLDAIIQRYEIPTQACVLTHVTSSIEAINRGVPLDLVFQSIAGTEAANASFGISLKILQEGYEAGLSQKRGTLGNNLMYFETGQGSALSANAHHGVDQQTCETRAYAVARHFKPFLVNTVVGFIGPEYLYNGKQIIRAGLEDHFCGKLLGVPMGCDICYTNHAEADQDDMDMLLTLLGVAGINFIMGIPGSDDVMLNYQTTSFHDALYARQTLGLKPAPEFEDWLQRMGIFTQADGRIRFGDELPPAFRQALAQLA

SEQ ID NO: 43532 - protein, 354 aa, Pseudomonas aeruginosa
MSSTPSLSHSPAELYRAWQDLRAERPQLRARDAAALLQVSEGELVASRVGIDAVRLRPDWAALLPALGELGPIMALTRNEHCVHERKGPYREVTVSANGQMGLVVSPDIDLRLFLGGWNAVFAIAEETARGTQRSIQVFDQQGVAVHKVFLAEASDVRAWEPLVERLRAAEQDAVLALHEPRAPAAALVDAQIDAAALREGWAALKDTHHFHALLKKHGAQRTQALRLAGGEWAERLDNGDLAKLFEAAAESGLPIMVFVGNAHCIQIHTGPVCNLKWLDDWFNVLDPEFNLHLKTTGIAELWRVRKPSTDGIVTSWEAFDADGELIVQLFGARKPGEPERDDWRELAESFKAL

SEQ ID NO: 43533 - protein, 319 aa, Pseudomonas aeruginosa
MSRPFLRRLAIVFAASVVLSGIGGAQAEEVLRIGFQKSSTLLTLIRSQGTFERELARQGIRVSWHEFPSGLPLLESLNVGNVDLSADVADTVPVFAQAAGARLTYFARETPSPAAQAILVGEHSPLKSLAELKGRRIAVTKAAGSHYLLIAALASAGLEFSDIQPAYLTPADGRAAFENGKVDAWVTWDPYVASAQRQQRARVLADGQGLASYQRYYLASSDYARKHPEVLQQVFAELQRTGRWLKSHPADAAKVLGPLWGNLDAATVEQANARRSYDVQPVSADGLDEQQRIADAFHAQGLLPKPVDARAVEVWQPRH

SEQ ID NO: 43534 - protein, 259 aa, Pseudomonas aeruginosa
MKKLALLGALALSVLSLPTFAADKPVRIGIEAAYPPFSLKTPDGQLAGFDVDIGNALCEEMKVQCKWVEQEFDGLIPALKVRKIDAILSSMTITDERKRSVDFTNKYYNTPARFVMKEGASLNDPKADLKGKKAGVLRGSTADRYASAELTPAGVEVVRYNSQQEANMDLVAGRLDAVVADSVNLEDGFLKTDAGKGYAFVGPQLTDAKYFGEGVGIAVRKGDSELAGKFNAAIDALRANGKYKQIQDKYFSFDVYGSN

SEQ ID NO: 43535 - protein, 425 aa, Pseudomonas aeruginosa
MLGCQQALELEDIPCIGVGSAEEALQRVDRDFAGIVVSDIRLPGIDGLTLLERLKALDPSLPVVLITGHGDISMAVQAMHAGAYDFMEKPFSPERLVEVARRALEQRGLAREVSALRRQLAGRQDLAQRIIGRSPAIQALRELIANVGDTSANVLILGETGTGKELVARCLHDYSRRHQHAFVALNCGGLPENLFDSEIFGHEAHAFTGANKRRIGKIEHANGGTLFLDEIESMPVNLQIKLLRVLQEHTLERLGSNQSIPVDCRVIAATKADLAAMGKSGQFRSDLYYRLNVVSLELPALRDRREDILLLFEHFLQQSSLRFDRPAPELDRATVASLMAHDWPGNVRELRNVAERFALGLPVFNKGGQAVQTGGPRFAEAVEAFEKALLGDALARHHGNLTQASQDLGMAKTTLFDKVKKYGLQ

SEQ ID NO: 43536 - protein, 298 aa, Pseudomonas aeruginosa
MSDLPPLTALRSFEAVARLGSISQAASELHVTHSAISQQIKLLENLLGLALFVREGRGLRLSENGRFYALQVRASLGEIADATRVVRARPREGELVVTVMPSFGLNWLLPRLPRFRKRHPHCRVRLVASLDVQNLRQGLADLGVRIGKGDWEGVGRERLFDDELLMVAAPDFNGGRLPRTPSEIVACPTLRSTESWALWCQRAGVAEPQHGLLINDSNLLLEAVRLGQGIALERRSLVAGALAEGRLVQLGDIRVPYPYPYWLVWPQREPPSDRHQAFADWLREEARRYQAEQPPLSE

SEQ ID NO: 43537 - protein, 468 aa, Pseudomonas aeruginosa
MGMIANTQLKAARGPLLLDWRPEDPEFWARNGKRIASRNLWISIPALLLAFAVWMIWSTVTVRLNSAGFAFSNDQLFLLAALPSISGATLRVFYSFMVPIFGGRRWTALSTASMLIPCIWLGFAVQDPSTPYWVFALIALLCGFGGGNFASSMSNISFFYPKSQQGTALGLNAGLGNLGVSVMQFAVPLAVAGGLFGAFGGEPQQLGDGGRLWLQNAGWIWVPFIAVVSVAAWFGMNDIADAKASFRDQAVIFKRKHNWLMCWLYVATFGSFIGFSAGFAMLSKTQFPDVNPLQYAFLGPLVGALSRPLGGWLADKFGGARITLWNYALMIGGVFAVIAFLPGDGGQGNFFGFLGAFILLFFFAGIGNGSTFRMIPVIFRNEWARRVRDGQADEAGAARNASMESAAVIGFSAAIGAFGGFFIPKAFGTSLHMTGSAEGALYVFIAYYLSCIVATWWWYARKGAESPC

SEQ ID NO: 43538 - protein, 431 aa, Pseudomonas aeruginosa
MASLRQKQYSVLGMSTLSFAVNFAVWTMFSIIGIRIKDELGLSESQFGLMVALPILTGSLVRLPLGLITDRFGGRIVFFIHMLLVAIPIYGLAFASQYWHYLVLGLFVGLAGGSFAVGIAYTSAWFEKERQGTAMGIFGAGNAGAAITNLVAPMIVVAFGWRMVPQVYSVAMLVTAVLFWLFTWTDPAHLKGAAEASQRPNLAKQLAPLAELRVWRFGLYYFFVFGGFVALALWLPKYYIAEYGLDLKTASFITMLFTLPSGLIRALGGWFSDHYGARSVNWGVFWVCLVCLFFLSYPQTTMTIHGIQGDLSLGIGLNVWLFTFLVFVVGIAQGFGKASVYRIIHDYYPSNMGTVGGMVGVIGGLGGFCLPILFGYAADHIGVRSSCFMLLFGLTVVCMVWMHYAIKQQRRIDGQAASADVDLPPTLPTHS

SEQ ID NO: 43539 - protein, 295 aa, Pseudomonas aeruginosa
MRRESLLVSVCKGLRVHVERVGQDPGRSTVMLVNGAMATTASFARTCKCLAEHFNVVLFDLPFAGQSRQHNPQRGLITKDDEVEILLALIERFEVNHLVSASWGGISTLLALSRNPRGIRSSVVMAFAPGLNQAMLDYVGRAQALIELDDKSAIGHLLNETVGKYLPQRLKASNHQHMASLATGEYEQARFHIDQVLALNDRGYLACLERIQSHVHFINGSWDEYTTAEDARQFRDYLPHCSFSRVEGTGHFLDLESKLAAVRVHRALLEHLLKQPEPQRAERAAGFHEMAIGYA

SEQ ID NO: 43540 - protein, 378 aa, Pseudomonas aeruginosa
MADGLRVALVAGEASGDILGSGLMQALRARHPDIEFIGVGGPRMEAEGLSSYFPMERLSVMGLVEVLGRLPELLRRRKRLIRTLIEARPDVMIGIDAPDFTLGVEHKLRQAGLRTVHYVSPSVWAWRQKRVLKIREACDLMLALFPFEARFYEEHGVPVRFVGHPLANTIPLQADRAAARARLGLPADGQVLALMPGSRGGEVGKLGALFLDTAQRLLVERPGLRFVLPCASAARREQIEQMLQGREPLPLTLLDGASHEALAACDAVLIASGTATLEALLYKRPMVVAYRVAGLTYRILKRLVKSPYISLPNLLAGRLLVPELIQDAATPQALAATLSPLLDDGSQQVEFFDAIHRALRQDASAQAAEAVLQLVERR

SEQ ID NO: 43541 - protein, 439 aa, Pseudomonas aeruginosa
MKTPLWFPQSFFARTLWLVLIVVLFSKALTLVYLLMNEDVIVDRQYSHGAALTIRAFWAADEESRAAIAKASGLRWVPSSADQPGEQHWPYTEIFQRQMQMELGPDTETRLRIHQPSQLWVRAPSLGEGWLAVPLYPHPLRGQRIWSVLGWFLGIGLLSTAAAWIFVRQLSQPLKRLVVAARQFGQGRSVRLPLGPETPSEMAEVYRAFNQMAEDIEQGGRERELMLAGVSHDLRTPLTRLRLSLELLPESEREMVEDMIRDIEDMDAILDQFLAFIRDGRDEPVEEGDLTDLVREVVAPFNQTREQVRMALQPVPAMPLRRVSMKRLLGNLIDNALNHGGGSVEVASYVAGESAAPYVVLSVLDRGQGIDPAEVDSIFNPFIRGDKARGGKGTGLGLAIVKRIAAQHGGSVELRNRDGGGLEARVCLPLGLLLPRGAA

SEQ ID NO: 43542 - protein, 240 aa, Pseudomonas aeruginosa
MRLSRFFVDQPLSLGQHDLPEAQAHYIGRVLRHATGDAVQLFDGSGREYLGELVEVGKKNVRVELREQFAGQPDSPLRIHLGQGLSRGERMDWAIQKATELGVAEITPIVSERCEVRLKDERADKRLQHWRQVAISACEQCGRSSLPLIHPPLALEDWLRGRDDDLRLVLHPVAAPLASHAPPSRLAFLVGPEGGLSDAEVEQAQAAGFHSARLGPRVLRTETAPVVALAVAQQLWGDFA

SEQ ID NO: 43543 - protein, 471 aa, Pseudomonas aeruginosa
MNTVAQPTSQRIARMDTPVTFDWKIRLPDVLGVLRRDYAGRFPQLASAALETLLERLRDDLPEDFLPALGQELESLGLALVERLDEDDSLNLYVVGAPHSQRLLDALAAQGHNARTLRQENAPEGARAALPAAAPAGLAPASAYICLEHAEHLAPGLAIARLPGEDSRDLLDLRQWPRLQRLPDGAEETQGALLCRASSADGLHAWVRMTRSGSPYAWLHRSRDLASLTPELPPLPLPPAQSLRQRRTPELAIGLAGDDLLLADRGLFFLYPGFAQGNDEPRLLFEVPQARRSIENPPAVFTTPDQRVCLLSRGQFFEWREARIQPLPFPVGKDLPADPAQPTSAAPGTIVWLERETLCEGRLDSGEIRSHSLDGLAEGPYLKLQALDGGWLLLAPWLEPHRSRDLAQLWHLESGRALRIRYGELDLEGGLQHWAELPDGRIVVGDHARHVDLGTFESLRQRLLRRRLAPA

SEQ ID NO: 43544 - protein, 142 aa, Pseudomonas aeruginosa
MKTYTAKPETVQRDWFVVDAAGQTLGRLATEIARRLRGKHKPEYTPHVDTGDYIVVINAEQVRVTGAKTTDKMYYHHSGFPGGIKSINFEKLIAKAPERVIETAVKGMLPKNPLGRDMYRKLKVYKGASHPHTAQQPQELKI

SEQ ID NO: 43545 - protein, 797 aa, Pseudomonas aeruginosa
MLRRCCLLFFCLLLSLPVRAEESVALPLTAELRTWLAEHRELRVGVVTEAPYAQYDRRLQQYSGANVELMGWLATAMQVTLRWQGYPDQAALDDALRAGRVDIAPGLSQTPAGLRLWLFSDPYLRVSRLVVGKRDGSGSVELEQLERDTRVAVRAGSSVADYLSSTYSGLQWVSADSEREVLRAVLAGQARYAVIDEAQLSRLTREPEFAELAVVGDIGYPQLLRVATRRDWPELAMVVDQALRSLPRKSLDQLHERWLQPKYPRLGESPGFWQNLSILLGLLLAGALVAVFLQRRQQHALEARLYGARRDLELRQAAEEALRLTQFSIDNSTLGILWVNWDSRVRYANRAAEQMLGHADGQLVDRPLADFEPGLDMDRWLNLWRRARNSEEGPLSFETRCLRADGSWLPADVSLSFLRFGTSEYLVVFLSDVTERRRAREALQESEARMKGIASNVPGMVFRLERPRAGAFSDFAYISEGSEALVGYSARELIESGRGIRGLVHPDDRERYWSSQMAALDENRDWHWQGRILTRQGELRWADIKASARCFEDGRAVWDGVVWDITANKQIELELGESRAQLRELSAHLESVREEEKARIAREVHDELGQVLTVLKLETSMCELAYADAQEGLRERLGNMKKLIAQLFQLVRDVATALRPPILDAGIGSAVEWQARRFEARTQIPCLVEVPENSPQLVDAKAIGLFRILQEALTNVMRHAEAHTVQLRLLREGDELCLSVSDDGRGFDVATVGRGSSFGLVGMRERVLMMGGTLDIDSAPGEGTTLSVRIPLGVAGP

SEQ ID NO: 43546 - protein, 306 aa, Pseudomonas aeruginosa
MLRRCCLLFFCLLLSLPVRAEESVALPLTAELRTWLAEHRELRVGVVTEAPYAQYDRRLQQYSGANVELMGWLATAMQVTLRWQGYPDQAALDDALRAGRVDIAPGLSQTPAGLRLWLFSDPYLRVSRLVVGKRDGSGSVELEQLERDTRVAVRAGSSVADYLSSTYSGLQWVSADSEREVLRAVLAGQARYAVIDEAQLSRLTREPEFAELAVVGDIGYPQLLRVATRRDWPELAMVVDQALRSLPRKSLDQLHERWLQPKYPRLGESPGFWQNLSILLGLLLAGALVAVFLQRRHQHALEARLY

SEQ ID NO: 43547 - protein, 568 aa, Pseudomonas aeruginosa
MQRLSRIGRNTLAVSVSTLLLSACNQGDDAPKPAAVAPQPAAPSMAALSIPLCLNGQCAVIDQDAKLLVPFDNDYDNIVASAYQGTLMAAREERWNLIQAKDGKVLRDDIGEALSLLTPNLYGFVRDGKYGVVDGQGKEVQAPRFDDIYPNSANEFIIYEIDGKRGILDAKGKQLTEALYDTTLVNGSVAEHGGLISAERGEEKWIINLATGEQKAVAYESLGDLHDGVMSASVIGKGSQLVDAKGDVVGDGKSYDYLGTPANGLVAFREKYDSPCGYLDYQGKVAIAAQFAGCGAFGKQGGLAQQRMEDGSSGKYGLIDRSGAWKVQPQYDSADSAGLTALGYTVDVPGLAAVGVSTGLFSADFGIFNLDEGSEWVKPGYAQIGALGNDLFVVAKKGGPQKTVSFMGSESQVPVVGLMDRSGKMLLEPDELISIQSAYDGRFLEGLDGMDNAAHTVLLDRQGRTLVPALWQKLEVNPQQGYILGYEVSGTGDEATETLRALYDLNGKPRFTVATTDCGAEQLLDGNGKAIWPQDPTPYCQSDDEQDDEGEPEQEPAPVEESEETSES

SEQ ID NO: 43548 - protein, 312 aa, Pseudomonas aeruginosa
MKTTIRQLGCALLILASGAALAAEPEQCRTVRLGTVNWTDVVASSAVAEALLDGLGYQVKQTSASQQIVLAGLADKQLDLFLGYWQPTMQPVARPYLDKGRIEVIEPPTLADAQSTYAVPSYVAEGGLKTFADIARFKDKLGGRIYAIEPGSGSNRITRKMIDDNRFGLKGFQLVESSEAGMLTAVKRAIKRKQWVVFFGWKPHPMNLQIDMTYLTGSEDVFGPDEGAATVSTMTAAGYQAQCGNVARLLHNLRFSSAQVSQVMAPILDRTQPLDAARQWLKANPEPLKAWLDGVSTFDGKDGLAALQASLK

SEQ ID NO: 43549 - protein, 129 aa, Pseudomonas aeruginosa
MRHRKSGRHLSRTSAHRKAMFQNMAVSLFEHELIKTTLPKAKELRRVAEPLITLAKEDSVANRRLAFDRTRSKAAVGKLFNDLGKRYANRPGGYLRILKCGFRAGDNAPMAYVELVDRPVGGEVVEAAE

SEQ ID NO: 43550 - protein, 156 aa, Pseudomonas aeruginosa
MPRRRVAAKREVLADPKYGSQILAKFMNHVMESGKKAVAERIVYGALDKVKERGKADPLETFEKALDAIAPLVEVKSRRVGGATYQVPVEVRPSRRNALAMRWLVDFARKRGEKSMALRLAGELLDAAEGKGAAVKKREDVHRMAEANKAFSHYRF

SEQ ID NO: 43551 - protein, 297 aa, Pseudomonas aeruginosa
MSHSDQSQRFLFDDTDVRGEMVDLERSYSEVLAKHPYPEPVAQLLGEMLAAASLLCGTLKFDGLLVLQARSSGAVPLLMVECSSDRQVRGLARYSAESIGADAGMQELMPEGVLTLTVDPVKGQRYQGIVALEGVNLAECLSNYFASSEQLPTRFWLNANGRRARGLLLQQLPADRLKDPEAREASWQHLTTLADTLTAEELLALDNETVLHRLYHEETVRLFEPQPLVFHCSCSRERSANALVSLGQADCERLLEEEEGSISIDCQFCNQRYLFDASDVAQLFAGAGSQGPSETRH

SEQ ID NO: 43552 - protein, 63 aa, Pseudomonas aeruginosa
MKWFNTSKGFGFISRDSGEDIFVHFRAIRGEGHRILIEGQRVEFSVVQRDKGLQAEDVIASRR

SEQ ID NO: 43553 - protein, 353 aa, Pseudomonas aeruginosa
MHNDNSTEKRADFYRRIRQQHLTPLWEALHSLVPAQPAGGCQAALWRYRELRPFLLEAGDLISAEEAVRRVLVLENPDLPGQSSITPSLYAGLQLILPGEIAPSHRHTQSALRFVVEGYGAYTSVDGERTRMEPGDFIITPSWTWHDHGNRAAAEGGEPVVWLDGLDIPMLRFFGATFAENHDEPVQPLRRGEGDSLARYGSNMLPLRHQPTTPTSPLFSYPYARSREALERLARLERPDPWEGHKLRYVNPATGGWAMPTIATCLQLLPAGFLGQPARSTDASVYSVVEGSGVAQIGGRRFAFEAKDLFVVPSWAELRLEAGATDCVLFSFSDRPVQQALGILRESRETLAH

SEQ ID NO: 43554 - protein, 387 aa, Pseudomonas aeruginosa
MSSERVLSNARVVSAERVFVGSVLLRDGLIAAVDEGRSHLAGAEDLGGDYLLPGLVELHTDNLEKHMTPRPGVDWPSASAVLAHDAQIVSAGITTVFDALSIGDVNPKGKRMQQLPKMLEAIGEAAASGDARADHRLHLRCEVSHPQTLEVFRELVEHPLVQLVSVMDHAPGQRQFARLEKYREYYQGKYHLSDAEMDAFIVEQVANSERYSDAARAAIVDVCQGRGLSVASHDDATLAHVRESAGYGMAIAEFPTTVEAARASHEHGLQVLMGAPNVVRGGSHSGNVAAAQLAGIGVLDILSSDYYPASLLHAALLLAGEHSEYDAIRYDLPRAVAMVSRTPALAAGLTDRGEIRVGLRADLLQARALGNNQPVVRQVWRGGQRVF

SEQ ID NO: 43555 - protein, 450 aa, Pseudomonas aeruginosa
MTDLNRTALPSRTDGTVEKTDTLVVGAGQAGVAMSEHLSRLGVPHLVLERNRIAEAWRSGRWDSLVANGPAWHDRFPGMEFDIDPDGFPGKDQVAAYFEAYAKRFDAPIRTGVEVRKVVRNVGRPGFTVDTSAGTIEANRVVAATGPFQRPVIPPIAPRDERIRQIHSAHYYNPQQLPEGAVLVVGAGSSGVQIADELQRAGRQVYLSVGAHDRPPRSYRNRDFCWWLGVLGEWDAEVAKPGREHVTIAVSGARGGHTVDFRALAHQGVTLVGLTESFVDGVATFRPDLAENLARGDENYLALLDAADAYIARNGLDLPEEPEARRRLPDPQCVTDPILELDLAEAGVGSIIWATGYAVDFGWLQVDAFDRDGKPRHQRGVSSEPGVYFIGLPWLSRRGSSFIWGVWHDARHVADHIAIQRKYLAYRDAAQRQEQDRASQAPQTSLQEVS

SEQ ID NO: 43556 - protein, 654 aa, Pseudomonas aeruginosa
MYIPNRQPRLRSAPARAGFAFAGLLPLLGGQAQAVEFSFLDNEVSGSLDTTLSYGTLWRVQGQDKSNNDINTNDGNRNFDTGLVSEVYKITSDLEATWRNYGVFIRGTAFYDTQIMDKRNDYYSHNDPSQPSQSYPHDDRFTSQTRDIAGHKAEILDAYVYGSWDIGNMPLSARFGRQVFNWGEGIFYRGGVNTTNPVDAAKYRLPGSELKEVLMPVEALSFNIGLTDNLSMETFYQWNWKETRLDPVGTFFSETDLFADGGNTGYSDFTGTALDTPVPGFGNVIGLYQALGNNPLLSGALKNTGLYANGVTPAYGNVMKVSSIGKDINARNDGQFGVAFRYIAEELNSTEFGFYFVNYHSKEPTLYADIGDYAGADLAALANTLRPIAGNLAEALANGLVTADVMGNINARREFAEDIRMYGFSFNTTVGDASVFGELAYRPNLPIGIAATNDLIGDLAHGAAEAANGGQINVGGQMVGLGGQIHNYERVEAFNTSLGTIYNFGPSLSFDSLTGVAELASEHLRGSSLKYTAYDGSTRYYAGRGNSSYVSGGDRGDQVNRNAYGYTLLLSGTWNDVFAGVNVSPYVVYKDDFEGNSYQTGNFIEGRKAYTLGIKATYLNSLEGELQYTEFYGGGQNNNIRDRDNIGLTVKYSF

SEQ ID NO: 43557 - protein, 601 aa, Pseudomonas aeruginosa
MPDYKAPLRDIRFVRDELLGYEAHYQSLPGAEDATPDMVNAILEEGAKFCEQVIAPLNRVGDLEGCTWSADGVKTPTGFKEAYQQFVEGGWPSLAHDVEHGGQGLPESLGLAISEMVGQANWSWGMYPGLSHGAMNTLHAHGTAEQQATYLTKLVSGEWTGTMCLTEPHCGTDLGMLRTKAEPQADGSYKVTGTKIFISAGEHDMADNIVHIVLARLPDAPQGTKGISLFIVPKFLPNAEGNAGERNAVSCGSIEHKMGIHGNATCVMNFDAATGFLIGPPNKGLNCMFTFMNTARLGTALQGLAHAEVGFQGGIAYARERLQMRSLTGPKAPEKPADPIIVHPDVRRMLLTMKAFAEGNRAMLYFAAKQVDIVQRSQDEEQKKAADSMLAFLTPIAKAFMTEVGFESANHGVQIFGGHGFIAEHGMEQNVRDSRISMLYEGTTGVQALDLLGRKVLMTQGEALKGFTKIVHKFCQANEANEAVKEFVAPLAQLNKEWGDLTMKVGMAAMKDREEVGAASVDYLMYSGYACLAYFWADMARLAAEKLAAGTGEEAFYKAKLQTARFYFQRILPRTRAHVAAMLSGANNLMEMAEEDFALGY

SEQ ID NO: 43558 - protein, 408 aa, Pseudomonas aeruginosa
MTATSDLIESLISYSWDDWQVTRQEARRVIAAIRNDNVPDATIAALDKSGSLIKLFQRVGPPELARSLIASIAGRTTMQRYQARNALIRSLINNPLGTQTDNWIYFPTITFFDICADLADAAGRLGFAAAGATGVASQAIQGPFSGVGATGVNPTDLPSIAFGDQLKLLNKDPATVTKYSNPLGDLGAYLSQLSPQDKLNQAQTLVGQPISTLFPDAYPGNPPSRAKVMSAAARKYDLTPQLIGAIILAEQRDQTRDEDAKDYQAAVSIKSANTSIGLGQVVVSTAIKYELFTDLLGQPVRRGLSRKAVATLLASDEFNIFATARYIRYVANLASQQDLRKLPKTRGAFPSIDLRAYAGNPRNWPRDNVRALASEYTSRPWDDNLSPGWPMFVDDAYATFLDPGMRFP

SEQ ID NO: 43559 - protein, 633 aa, Pseudomonas aeruginosa
MHPPKILLWLLPLVCAFSLGALADTAVDPSQALHLLSYLAADYPPTVADGKIVDPSEYQEQVEFVGNLQALVLTLPMRPERAELERGVASLRQAIEQRLPGRDVALQARNLEARVADIYQVVQTPAITPDPSRAAPIYAQQCAICHGDAGKGDGPAGIGLEPPPANLTDRQRLDHLSLYDLRNVIGLGVAGTDMPAFADQLDERQRWDLASYVAGLSAGSAQPDKAHAYPLATLATQTPAEVAEHDGEAAAESFRALRAHPPLEQRGPGQLIDYTAATLDKSFAVYREGDRDQAYDLSVAAYLEGFELVESSLDNVDADLRRSTEKQLMAYRQALRDGLPETQVAQQLELAKGKLAEAAKQLGGDSLSFSISFVSALLILLREGVEAILVLAAILAFLRNTGQESAVRGVHVGWGLAFVAGFATWALAAYVIDIGGAQRELMEGFTSLFACVMVLWLGVWMHDRRHAAAWQDYIRSSLVGGGGRFGFAVLAFFSVYRELFEVILFYETLWLQAGPAGHNAVIGGAATAVVLLIGLAWVILRGSAKLPLGLFFSINAALLCALSVVFAGHGVIALQEAGVIGTRPVPFFDFDWLGIKADAYSLSAQAMALVAIALLYGRSRIVERRRAAANAAD

SEQ ID NO: 43560 - protein, 466 aa, Pseudomonas aeruginosa
MKLTLTPPLTPSHWMRSTDLADATSAPLVGTHSADVAIVGGGFVGLWTAITLKQLEPDARVLLLEQDVCGGGASGRNGGFVMSWWPKIGTLLGFCSEAQARFLGESAERAIQELGEFCARHDIDAHFQQKGWLWTATTAHHLDAWNDTLAACERLGVSPFERLDASEVARRTGSPVHLAGVFERSNATVQPALLVQGMRRVALALGVEIHERCGVSQIVPGQPAQLLSAGARVQAKAVVLATNAWSAALPRLSRLIVPVNSSIAVTEAIPQRLERIGWTGGEAITDSQLMVDYYRTTRDGRIAFGKGTGALSYGSRIGRVFDVDRESLALTEADFRRTYPSLGDIPLVDGWSGPIDRTYDSLPVFGRLHENIHYGIGWSGNGVGPSRLGGRILASLALGRDDPWSRCPLVERRCRSFPPEPLRYLGGSLVRNAVLRKERAELAGTAPSATDRFLARFAPAGLEDKS

SEQ ID NO: 43561 - protein, 381 aa, Pseudomonas aeruginosa
MIISASTDYRAAAQRKLPPFLFHYIDGGAYAEYTLRRNVEDLSAIALRQRVLKNMSELSLETRLFDETLAMPVALAPVGLTGMYARRGEVQAARAAAAKGVPFTLSTVSVCPIEEVAPAIDRPMWFQLYVLKDRGFMRNALERAKAAGVTTLVFTVDMPVPGARYRDAHSGMSGPYAAPRRILQAMTHPAWAWDVGLLGKPHDLGNISAYRGNPTGLEDYIGWLGANFDPSISWKDLEWIREFWDGPMVIKGILDPEDARDAVKFGADGIVVSNHGGRQLDGVLSSARALPAIADAVKGELAILADSGIRTGLDVVRMIALGADSVLLGRAFVYALAAAGEAGVRNLLELIEKEMRVAMVLTGAKSIGEISADSLVRELGA

SEQ ID NO: 43562 - protein, 181 aa, Pseudomonas aeruginosa
MSSLTVYHENQPEQPLKLLTHAEDIASTLAEVGVRFERWEAAAPIAAGASQDEVIAAYAHEIERLKRERGYITVDVVSLNSDHPQKAELRAKFLDEHRHGEDEVRFFVAGRGLFVLHIEEHVYAVLCERNDLISVPAGTRHWFDMGEHPHFVAVRLFNNPEGWVAQFTGDDIASRFPLLED

SEQ ID NO: 43563 - protein, 205 aa, Pseudomonas aeruginosa
MNDNREQLTQQIIDAGRFLYGRGWSPATSSNYSARLDEQRALLTVSGKHKGQLGFDDVLATDLAGNSLEPGKKPSAETLLHTQLYAWNPAIGAVLHTHSVNATVLSRLVRGDRLVLQDYELQKAFAGVTTHEGQVEVPIFDNDQDIARLASRVQPWLEAHPHCPGYLIRGHGLYTWGARMSDALRQVEAFEFLFECELKVLSLSR

SEQ ID NO: 43564 - protein, 228 aa, Pseudomonas aeruginosa
MFSSSKLVNAVAQRLLDTIEQGRWVAGQMLPGQRELAEQMEISRPSLREAIMVLETLGVVRSLPGKGVMVLERSEPLREVAAPGEATMEDVLQLRYALEPFIVGIVAQSAGAAEISELRLLLLDLREAVEDGDPQALVEAYTAFHRRLVKLTSNPIFLSVSEQIGSALERSDNLVRRQPEYAEEILQEHDAILRAIRQHDSERASQAMRQHILNEGARLNIDLRLPQV

SEQ ID NO: 43565 - protein, 817 aa, Pseudomonas aeruginosa
MPDSVAAGLRLAPEELTRPFAPEQFTFDTTDDLEPFRGVLGQERAVEALQFGVAMPRPGYNVFVMGEPGTGRFSFVKRYLQAEGKRVATPSDWVYLNNFDEPREPRVIELPPGSATEFSADIDRLIDNLMSTFPAVFEHPAYQQKKNAVDRAFNQRYDRALDSVERRALEKDVALYRDSANVAFTPMKDGKALDEAEFAQLPEAERERFHKDIAALEEYLNEELASLPQWKRESSNQLRELNEETITLALQPLLAPLVEKYNNNPGVCAYLQAMQLNLLKTVVDQLVDDSRTDAQRKQGLIEQYAPNQAIVHHATSGAPVVFESHPTYDNLFGRIEYSSDQGALYTSYRQLRPGALHRANGGFLILEAEKMLGEPFVWDALKRALQSRQLKMESPLAELGRLAAVSLTPQVIPLQLKVIIIGSRQIYYTLQDLDPDFQEMFRVLVDFDEDIPLGEDSLEQFAQLLKTRTSEEGMAPLSGAAVARLATYSARLAEHQGRLSARIGDLFQLVSEADFIRQLANEEVIQLGHIERALKAKQTRTGRVSARILDDMLAGIILIDTAGAAVGKCNGLTVLEVGDSVFGVPARISATVYPGSSGIVDIEREVNLGQPIHSKGVMILTGYLGSRYAQEFPLEISASIALEQSYGYVDGDSASLGEVCTLISALSRTPLKQCFAITGSINQFGEVQAVGGVNEKIEGFFRLCEARGLTGEQGVIIPRANVTTLMLDERVLQAVRAGQFHVYAVREVDEALALLVGKPVGAQDEKGRFPKGSVNDLVVARLQEISELGMEEDDKEKDKPAEKETVAAKDKAAAKKD

SEQ ID NO: 43566 - protein, 438 aa, Pseudomonas aeruginosa
MIRKHSLGFVASALALAVSAQAFAGTVTTDGADIVIKTKGGLEVATTDKEFSFKLGGRLQADYSRFDGFYTKNGNTADAAYFRRAFIELGGTAYKDWKYQINFDLSHNTGSSDNGYFDEASVTYTGFNPVNLKFGRFDPDFGLEKATSSKWVTAPERNAAYELADWINTHQDGMGAQVNSTLADMAYLSAGVSAKDADDSDGDSVKQFNFRGVFAPMHEAGNVLHVGVNYAYRDLDDTAFDSRIRPRLGMRGIATSGGNDAGDNGNRATFGGVSNSPAGSYKDDSVWGLEGAWAMGPFSAQAEYLARKLKADDNAYKDIKAKGYYAQLAYTLTGESRQYKLEGAKFDSVKPENKEIGAWEVFYRYDNIKVEDDNVVADTATREVGDTKAKAHNLGVNWYVNDAVKISAAYVKAKTDKITNNNGDDDGDGFVTRLQYVF

SEQ ID NO: 43567 - protein, 177 aa, Pseudomonas aeruginosa
MAKRWYVVHAYSGYEKHVMRSLIERVKLAGMEEEFGEILVPTEEVVEMRNGQKRKSERKFFPGYVLVQMEMNEGTWHLVKDTPRVMGFIGGTADKPAPITDREADAILRRVADSGDKPKPKTLFEPGETVRVIDGPFADFNGVVEEVNYEKSRIQVAVLIFGRSTPVELEFSQVEKV

SEQ ID NO: 43568 - protein, 143 aa, Pseudomonas aeruginosa
MAKKIQAYIKLQVKAGQANPSPPVGPALGQHGVNIMEFCKAFNAKTQGQEPGLPTPVIITVYSDRSFTFETKSTPAAVLLKKAAGITSGSARPNSQKVGTVTRAQLEEIAKTKQADLTAADLDAAVRTIAGSARSMGLNVEGV

SEQ ID NO: 43569 - protein, 539 aa, Pseudomonas aeruginosa
MTEYATTPSYTVPATTPQEERKVIFASSLGTVFEWYDFFLYGALAAVISKQFFAGVNDTTAFIFALMAFAAGFLVRPFGALVFGRLGDMIGRKYTFLVTILLMGLSTFAVGLLPTYASIGVAAPIILVTLRMLQGLALGGEYGGAAIYVAEHAPANKRGSYTSWIQSTATLGLLLSLLVILACRQLTGDEFETWGWRLPFLLSIVLLGISTWIRLSMRESPAFLKMKAEGKVSKAPLRESFTQWGNLKVVLTALFSINAGQAVTFYTAQFYVLFFLTQVLKVDGGTANGLLIVALVLGAPFFIVAGWLSDRIGRKPVLLAGLLLATLFYFPLFKGLTHYANPAIDQASRQSPISVVADPATCTFQFDPVGKATFDSPCDKVKTFLVKAGLPYSTVAAPAGSDVRVRIGETEIAGFDAEAMAAAVKTAGYPQQADGSQVNKPMVIAIIFALVLISTLCYGPLAALMVELFPTRIRYSSLSLPYHIGNGWFGGFLPTVSFALVVYTGDIFYGLWYPVLITGGSLVCALLFLRETRHTDIHR

SEQ ID NO: 43570 - protein, 723 aa, Pseudomonas aeruginosa
MEAEKTPDNVVILNHDPIVDPLRQGLLLLCRQLGRPLGDAELVDGMPLEHGRLPLHLVARALRRADITAQVTRQPLRRIDRYLLPALLLLDDGRALVLVGNDGEHAEVLVPQSDGGSQRMPLAELEALYSGTAVFAKCRYRPDGRVGDYASALPEHWFFGPLKRLWRSYAEVTAAALVANVLAVASALFAMQVYDRVVPNAAFDTLWILASGVALAIVLDGVLRIMRGHLLNVLGKRLDLQLSTLLFSRVLSTRVAAKPASMGAFSTQVREFESVREFFTSSSAALISDLPFVAIFLLIIAVIGGHVVWVPLVACVLMILPGLLTQRLLGHLSRQNLREGAMKNGVLLEAFEHLETVKATRAEGRCLHQWETLTGELAGTAMKTHTLASTLSYSASIVQQLCYVGVVVFGVYRISEGAMTVGGLVACSILASRAIAPLSQAAGILGRWQHTKVAMEGLDQLMSAEQERPQGKRFVHKERLQGHYRLEGVRLAHGDSPPVVDVQALNIRAGERVALLGGNGAGKSTLLRLLSGLLDAQAGRLLLDDVSLTQIDPADRQRGIGYLPQDVALFHGSLRDNLNLENAALGDEELLETLDGVGLGAFVRGHPLGLDMPIQGNASLSGGQRQAVGLARVLLQDPPILLLDEPTAAFDQGSEKQVIDYLQQWLGKRTLVITTHKKSMLALVERAVVLRQGRVIMDGPLEQVVQGNQVQAPQAAEGGNHGL

SEQ ID NO: 43571 - protein, 171 aa, Pseudomonas aeruginosa
MSRPTLQVDLLVESFNYKAWSDRRTLDAIARIDAEAFPASLAFALQQLNHMAIVEELFRARLLGEPAPHQQTNSEVVPGYDVLRRRLEDSAAWFAGYVAELPLERRGEWLRFRFADGRDGGMTRQEILFHIVNHGTYHRGAIGHALDLAGAPRPADTYTLYIHSAQPERRE

SEQ ID NO: 43572 - protein, 885 aa, Pseudomonas aeruginosa
MTDTARADALLADLPADGRGRLKVFLGAAPGVGKTFAMLQAAQAQLRQGVKLRAGVVETHSRAETESLLAGVPQQPLRSLEYRGMKLQEMDLDGLLADPPALALVDELAHSNVPGSRHAKRWQDIQELLAAGIDVYTTVNVQHLESLNDQVRDITGVQVRETVPDWVLQEAYEIVLIDLPPRELLERLREGKVYVPEQARAAIDAFFSQTNLTALRELAMQTAAARVDADLNHRYRQRGEEAPALRGRLLVGIDGDEQAERLVRHACRVAERRHLPWSVVHVDTGGLRGEQARMRLQGAQQLAERLGGEIVVLRAGEVARTLLQHARERRASLVLVGQSRRRWYRRAFGGGLAGRLLRDGQGLEISALDSEADLRPAEPRPRYPVVWNDYLLALLATALASGLAWIVAHLLELPNISLVFLMAVLLVAVRSSLMPALLCAVASFLAYDFLFIPPHFSFAIHRHEDLLSLAFFLFMAGLTGNLAARQRRQLEALRDTQEETSLLLELSRKLTAATDRQAVLAAAAQQFDDWKDVEVCLLGQVNGEWKTEAGVQRQLADQERVAADWAWAHDQPAGLGTGTLPGGRWWWWPLSAEEGPLALLGVAPLDGQPLSPQRRRLLAALGQPLAQALARARLAEDLEAARLHGETEQLRSALLASVSHDLRTPLTAMRGSIDSLLALGEAIPPADRRELLESTRDEAERLDRYIQNLLDMTRLGHGGLKLARDWVAPGDIVGSALNRLRAVLAPYRVQAIVANDLPLLYVHAALIEQALINVLENAARFSPNHGRLRIEVSQDAAELRFAVSDEGPGIPEAEREKIFDMFYTAARGDRGGQGTGLGLAICQGMIGAHGGRISVGEGLDGRGTTLVLHLPLHPQPDLGQLEGDE

SEQ ID NO: 43573 - protein, 238 aa, Pseudomonas aeruginosa
MAVGFFAQVIDGALGMAYGITATTFLLSAGATPAAASASVHIAEVFTTGFSGISHVKLGNVNKSLFLRLLLPGMIGAVLGAVLITRFDGHQLKPFISAYLLLMGLYILSKAYRHVIKRRAPRHVAKLALFGGFVDAAGGGWGPVVTSSLIGSGSDPRTTIGSVNFAEFFLTIASATSFILLAGQPDTWKMVAGLVFGGLFAAPFAALLCKKLSPRTLLVIVGTLITLISAYNIYIGLR

SEQ ID NO: 43574 - protein, 521 aa, Pseudomonas aeruginosa
MQFGAKPLFENVSVKFGNGNRYGLIGANGCGKSTFMKILGNDLEPSAGQVMLEPNVRLGKLRQDQFAYEDFSVIDTVIMGHEELWAVKAERDRIYSLPEMSEADGMAVAELEVQFAEFDGYTAESRAGELLLGLGIPLEQHFGPMSAVAPGWKLRVLLAQALFSDPDVLLLDEPTNHLDINTIRWLEGVLTARNSTMIIISHDRHFLNSVCTHMADLDYGELRLFPGNYDEYMTAAEQARERLLSDNAKKKAQIAELQSFVSRFSANASKAKQATSRARQIDKIQLEEVKPSSRVSPFIRFEQYKKLHRQAVTVENISKGYDGKPLFKGLSLQVEAGERVAIIGPNGIGKTTLLRCLVGDLPVDGGEVKWTDSADVGYFAQDHADDFADDMSLFDWMAQWTQGGEQLVRGTLGRMLFSNDEIKKSVKVISGGEQGRMLFGRLILKRPNVLVMDEPTNHLDMESIEALNLALDNYPGTLIFVSHDREFVSSLATRIIELGENGVTDFSGSYDDYLRSQGVIV

SEQ ID NO: 43575 - protein, 1018 aa, Pseudomonas aeruginosa
MAFTDPFIRRPVLASVVSLLIVLLGMQAFSKLVIREYPQMENALITVTTLYAGANAETIQGYITQPLQQSLASAEGIDYMTSVSRQNYSTISIYARIGANTDRLVTELLAKSNEVKSQLPPDAEDPVLQKEAADASALMYISFYSEQMNNPQITDYLSRVIQPKLATLPGIAEAEILGNQVFAMRLWLDPVKMAAFGVTAGEINQAVQQYNFLAAAGEVKGQLVVTSVNASTDLKSPQAFAAIPVKTDGDRRVLMGDVARVELGAASYDAISSFNGIPSVYIGIKGTPSANPLDVIKEVRAKMPELEEQLPPNLKVSIAYDATRFIQASIDEVVKTLGEAVLIVIVVVFLFLGAFRSVLIPVVTIPLSMIGVLFFMQAMGYSINLLTLLAMVLAIGLVVDDAIVVVENIHRHIEEGKPPFEAALEGAREIAVPVVSMTITLAAVYAPIGFLTGLTGALFKEFAFTLAGAVIISGIVALTLSPMMCSRLLRHEENPSGLAHRLDLIFEGLKQRYQRALHGTLDTRPVVLVFAVLVLALIPVLLMFTKKELAPEEDQGIVFLMTNSPQTANLDYLNRYTAEFEGIFRSFPEYYSAFQINGYNGVQAGIGGMLLKPWDEREKSQMELLHAVQAKLNEIPGVQIFAFNLPSLPGTGEGLPFQFVLNTANDYESLLQVAQRVKQRASESGKFAFLDLDLAFDKPELVVDIDREKAAQMGVSMQDLGVALASLLGEGEINRFTIDGRSYKVIAQVERPYRDNPGWLGSYYVKSRNGQLVALSTLIETHERARPRQLNQFQQLNSAIISGFPIVSMGEAIETVQQIAREEAPRGFAVDYAGASRQYVQEGSALLVTFGLALAIIFLVLAAQFESFRDPLVIMVTVPLSICGALIPLFLGVSSLNIYTQVGLVTLIGLISKHGILIVEFANQLRHEQGLGRREAIEQAAAIRLRPVLMTTAAMVLGVIPLILATGAGAVSRFDIGIVIATGMSVGTLFTLFVLPCIYTLVARPDAPPGVTQAANAH

SEQ ID NO: 43576 - protein, 1399 aa, Pseudomonas aeruginosa
MKDLLNLLKNQGQIEEFDAIRIGLASPEMIRSWSFGEVKKPETINYRTFKPERDGLFCAKIFGPVKDYECLCGKYKRLKHRGVICEKCGVEVALAKVRRERMGHIELASPVAHIWFLKSLPSRIGLLLDMTLRDIERVLYFESYVVIDPGMTTLEKGQLLNDEQYFEALEEFGDDFDARMGAEAVHELLNAIDLEHEIGRLREEIPQTNSETKIKKLSKRLKLMEAFQGSGNKPEWMVLTVLPVLPPDLRPLVPLDGGRFATSDLNDLYRRVINRNNRLKRLLDLAAPDIIVRNEKRMLQEAVDALLDNGRRGRAITGSNKRPLKSLADMIKGKQGRFRQNLLGKRVDYSGRSVITVGPTLRLHQCGLPKKMALELFKPFIFGKLEGRGMATTIKAAKKMVERELPEVWDVLAEVIREHPVLLNRAPTLHRLGIQAFEPVLIEGKAIQLHPLVCAAYNADFDGDQMAVHVPLTLEAQLEARALMMSTNNILSPANGEPIIVPSQDVVMGLYYMTREAINAKGEGMAFADLQEVDRAYRSGQASLHARVKVRINEKIKGEDGQLTANTRIVDTTVGRALLFQVVPAGLPFDVVNQSMKKKAISKLINHCYRVVGLKDTVIFADQLMYTGFAYSTISGVSIGVNDFVIPDEKARIINAATDEVKEIESQYASGLVTQGEKYNKVIDLWSKANDEVSKAMMANLSKEKVVDREGKEVDQESFNSMYMMADSGARGSAAQIRQLAGMRGLMAKPDGSIIETPITANFREGLNVLQYFISTHGARKGLADTALKTANSGYLTRRLVDVAQDLVVTEIDCGTEHGLLMSPHIEGGDVVEPLGERVLGRVIARDVFKPGSDEVIVPAGTLIDEKWVDFLEVMSVDEVVVRSPITCETRHGICAMCYGRDLARGHRVNIGEAVGVIAAQSIGEPGTQLTMRTFHIGGAASRTSAADNVQVKNGGTIRLHNLKHVVRADGALVAVSRSGELAVADDFGRERERYKLPYGAVISVKEGDKVDPGAIVAKWDPHTHPIVTEVDGTVAFVGMEEGITVKRQTDELTGLTNIEVMDPKDRPAAGKDIRPAVKLIDAAGKDLLLPGTDVPAQYFLPANALVNLTDGAKVSIGDVVARIPQETSKTRDITGGLPRVADLFEARRPKEPSILAEISGTISFGKETKGKRRLVITPNDGSDPYEELIPKWRHLNVFEGEQVNRGEVISDGPSNPHDILRLLGVSSLAKYIVNEIQDVYRLQGVKINDKHIETILRQMLRKVEVSESGDSSFIKGDQVELTQVLEENEQLGTEDKFPAKYERVLLGITKASLSTESFISAASFQETTRVLTEAAVTGKRDFLRGLKENVVVGRLIPAGTGLAYHSERKRQRDLGKPQRVSASEAEAALTEALNSSGN

SEQ ID NO: 43577 - protein, 747 aa, Pseudomonas aeruginosa
MVQVRAHQPVNTDGSINLEAWLDHVQNLVPGLDRQGLLEACEFARESEQRAIAAQNSWAEGTSSFQTGLEIAEILADLKLDQESLVAAVIYRGVREGKITLEAVNKHFGPVVAKLIEGVLRMAAISASLNPRHSMVLGTQAQVENLRKMLVAMVDDVRVALIKLAERTCAIRAVKNADEEKRHRVAREVFDIYAPLAHRLGIGHIKWELEDLSFRYLEPDQYKQIAKLLHERRLDREQYIANVMSQLKEALAATGVQADLSGRAKHIYSIWRKMQRKGLDFSQIYDVRAVRVLVPEMRDCYTALGIVHTLWRHIPKEFDDYIANPKENGYRSLHTAVIGPEGKVLEVQIRTHSMHEEAELGVCAHWRYKGTDVKASSNHYEEKISWLRQVLEWHEELGDIGGLAEQLRVDIEPDRVYVFTPDGHAIDLPKGATPLDFAYRVHTEVGHNCRGAKINGRIVPLNYSLQTGEQVEIITGKHSGPSRDWLNSNLGYVTTSRARAKIVHWFKLQARDQNVAAGKALIERELSRLALPPVDFDRLAEKANVRTAEDMFAALGAGDLRLAHLVNYAQQLVEPDRDSEQLELIPRKPSKIGHGKRGDVQIQGVGNLLTQMAGCCQPLPGDPIVGYITLGRGVTIHRQDCATALQLAGREPERMIQVSWGPEPVRTYPVDIAIRAYDRSGLLRDVSQVLLNERINVLAVNTRSNKEDNTATMQLTIEIPGLDALGRLLARVSQLPNIIEARRNRTP

SEQ ID NO: 43578 - protein, 460 aa, Pseudomonas aeruginosa
MTAQLNPQRDTRDYQQLDAAHHIHAFLDQKALNREGPRVMVRGDGLQLWDNDGKRYLDGMSGLWCTNLGYGRQDLAAAASRQLEQLPYYNMFFHTTHPAVVELSEMLFSLLPDHYSHAIYTNSGSEANEVLIRTVRRYWQILGKPQKKIMIGRWNGYHGSTLGSTALGGMKFMHEMGGMLPDFAHIDEPYWYANGGELSPAEFGRRAALQLEEKILELGAENVAAFVAEPFQGAGGMIFPPQSYWPEIQRICRQYDVLLCADEVIGGFGRTGEWFAHEHFGFQPDTLSIAKGLTSGYIPMGGLVLGKRIAEVLVEQGGVFAHGLTYSGHPVAAAVAIANLKALRDEGVVTRVREETGPYLQRCLREVFGDHPLVGEVQGAGFVAALQFAEDKVTRKRFANENDLAWRCRTIGFEEGVIIRSTLGRMIMAPALVAGRAEIDELIDKTRIAVDRTAREIGVL

SEQ ID NO: 43579 - protein, 200 aa, Pseudomonas aeruginosa
MAAHAAGPDKRPLTRYHGGVFHWTTTMAEFHDDDSQFEEKSKSQIKRELHALQDLGERLTTLQPQLLERLPLTDPLRKALLEAPKHKAHIARKRHIQYIGKLMRDQDVDAIVALIDQVDSSTRQYNERFHALERWRDQLIAGGDAALDAFVGEFPECDRQHLRGLVRHAQHEAAHNKPPAAARKVFKYIRELDETKRGLR

SEQ ID NO: 43580 - protein, 201 aa, Pseudomonas aeruginosa
MNKLLVSLLLTLGLTGLAHAAGDAAAGQAKAAVCGACHGADGNSPAPNFPKLAGQGERYLLKQMHDIKDGKRTVLEMTGLLTNLSDQDLADIAAYFASQKMSVGMADPNLVAQGEALFRGGKIAEGMPACTGCHSPSGVGIATAGFPHLGGQHATYVAKQLTDFREGTRTNDGDTKIMQSIAAKLSNKDIAAISSYIQGLH

SEQ ID NO: 43581 - protein, 764 aa, Pseudomonas aeruginosa
MTNNSAPPLVVTRGNDNGYEPGSMVITHVQASGLDIIQYIPGRSSYGTPPFVPPGPSPYVGPGMQEYRRLRDTLDKSNSELKKNLKNKTLKEVDELKSEAGLPVKAVSANDIRDEKSIVDALMDAKAKSLKAIEDRPANLYTASDFPQKSEAMYQNQLLASRKFYGEFLDRHMSELAKAYSADIYKAQIAILKQTSQELESKARSMEAQAQQVTQQLGADFNAITTPTATKVQQRVKAVDASLSQVSTQVSGAVASATQAVQVKTAQAQQQANSQISSSQNLISAAFRNQIALAAQASGEAQVTAFNTQVKQIVNEATAFSTARKQALAQFAANAAAEVETEVNRLTAQVKASPTKAASQAAQATLRQFTESTYAKVNTYAQQTEAELQAKAKEVSAAVAEAQRAATNDLQKTADVVPGQIIQAANTLAMPATSTPLVSVAGFGSAAVETARLAASLTNAVNRLVQIAGSGPGAYVATFAVLSLYSDQAGKDSDKVPAGVRNALALEASALGLPGTADLQSVAKAGGTVDMPVRLTSAAQESPSGKSQIAAMLTNGATVPKGVPVRAATLNAATGRYEVTVPAKSTVPNTPPLILTWTPATPPGSQNPSSTTPVVPQPVPVYEGATITPVQAEPESYPGVPLDLDDLIVIFPVGSGVKPIYIMFNHNPHDVVIDDKIREQIPIRGWTEVEVRDVIGKGATGSSSDKRRPNKTIDGLGRNDSATVYGSPPNGYIVVNDRTGEIIQIADRNDSAWAVDGRIIWRNK

SEQ ID NO: 43582 - protein, 95 aa, Pseudomonas aeruginosa
IDDKIREQIPIRGWTEVEVRDVIGKGATGSSSDKRRPNKTIDGLGRNDSATVYGSPPNGYIVVNDRTGEIIQIADRNDSAWAVDGRIIWRNKNDQ

SEQ ID NO: 43583 - protein, 285 aa, Pseudomonas aeruginosa
MATVEILGAECRAGGAVNDDALGCTAQAAWVIDGATSIGRSVLGVESDARWLAQAVDRHLRLLLEVEPEQSSETLLRRLLNDIQGDFRAQSGRDWHDLEDMPAACLSLLRIRGGEIELLNIGDSRILVEGADGQVRSFGDSALHELDRQSLAHFCRMREEHPQWDHAELFKASRPRVRQNRLLMNKPEGYWALDISDRWLGQVQRETLPLAALRSFVLMTDGFDRLVEPFRRYTDEQLLRRLEDVGVSAMLDELREIEQGDDQALAFPRFKIHDDASALWGRIAG

SEQ ID NO: 43584 - protein, 308 aa, Pseudomonas aeruginosa
MIDIDRLSKRFSGRTVVNDLSFRIDRGEIVGLLGPNGAGKSTTLKMLSGFLAPSAGSVRIFGFDMQDKARQAQKLIGYLPENAPSYGEMTVEGFLAFVASIRDYSGREKRRRIDSAMDCMELRDERRSIIETLSKGFKRRVALAQAILHDPELLLLDEPTDGLDPNQKHQVRQLVKNLSESKIVVISTHILEEVSFMCSRALVINGGRLLADNTPGELRTRSRYHHAVSLSIEAPVDPLAIAMLPGVAGIEGRPDRAGTLTILARPGAQILPALNRLIHGSGWRVSGVRTEHGQLEEVFRQLTREPPA

SEQ ID NO: 43585 - protein, 480 aa, Pseudomonas aeruginosa
MTVNASIFWYDYETTGIDPRRDRPLQIAGIRTDEALNEIGEPMNLYCRPSDDILPHPMACLITGITPQRLAERGLSEADFMTRVHAQLAQPATCVAGYNSLRFDDEVTRYSLYRNFFDPYAREWQGGNSRWDLIDMVRTAYALRPEGIQWPQLDGRLSLKLEMLTAANGLEHGQAHDALSDVRATIALARLIRQRQPRLYDYLYQLRSKHKVLDQVRLLQPLVHVSGRFSAERHFLSVVLPLAWHPRNRNALIVCDLCADPAPLLELSAEDLRRRLYTRRDELAEGELPVPLKQIQVNRCPVVAPLSVLRAEDRQRTGIELDECQQKAELLRQHQTVWADKLTALYGEESFSASDDPEQQLYDGFIGDRDRRLCEQLRLAEPEQLAKEQWPFDDARLQELFFRYRARNFPETLNVAERQQWESFCRNRLSHEEYGAPNTLPAFEAALEACRQEQGGTLPAVLAAWRDYAAELRQRYSLET

SEQ ID NO: 43586 - protein, 349 aa, Pseudomonas aeruginosa
MSTIPDRYEFDKKIDGGMGTIFVCNDRILERKVAIKFIQAHEENRRILDELNALMKVRSKHVVQVYDVIEDNERGLGIVQEYIYGNDLSNYSPPLNTLDFYLKIWQIASGISDIHAVNIIHRDIKPNNMMLDHESIIKIFDFGLARHTQENASTIGFVGTHGFSAPELYTDAPHFTTAIDVYAFGVTALFLANGTLPSEVLYAYGKPVPNNLFTSLPIANEIASLLQSSLVALPEDRPPIWSIKETLEKHILENRHQALITHKGNPTYLNKDRKKITLSVDRVGVVDVQYNGLDFIITRAEGEVFINNAPILVNSKIPTSCVLAIGNSQRSNQERSFITFDLSHPEINL

SEQ ID NO: 43587 - protein, 250 aa, Pseudomonas aeruginosa
MTVYFIGAGPGDPDLITVKGQRLIRQCPVILYAGSLVPQALLEGHQAGQVVNTAELDLEQIVELLAQAHRRGLDVARVHSGDPSLYGAIGEQIRHLRELGIPYEIVPGVTATAACAALLGCELTLPEVSQTLILTRYAARTKMPEGESLGDLARHRATLAIHLGVAHLAKIVEELLPHYGADCPVAVIHRASWPDQEQVRGTLGDILPKVAARNFRRTALILVGEVLAAEGFADSSLYRAEHRHLYRPGE

SEQ ID NO: 43588 - protein, 315 aa, Pseudomonas aeruginosa
MKRFLLGLVLLLAVAAGVLYFVPATLLASVRTVERGLAGLSEHSVQVDNLEIAYLEGGSEKNPTLLLIHGFGADKDNWLRFARPLTERYHVVALDLPGFGDSSKPQQASYDVGTQAERVANFAAAIGVRRLHLAGNSMGGHIAALYAARHPEQVLSLALIDNAGVMPARKSELFEDLERGENPLVVRQPEDFQKLLDFVFVQQPPLPAPLKRYLGERAVAASAFNAQIFEQLRQRYIPLEPELPKIEAPTLLLWGDRDRVLDVSSIEVMRPLLKRPSVVIMENCGHVPMVERPEETAQHYQAFLDGVRNAQVAGR

SEQ ID NO: 43589 - protein, 423 aa, Pseudomonas aeruginosa
MTISIRGARVIDPASDLDQVGDLHIEAGKIVAIGAAPAGFSAQKTLDGAGLVAAPGLVDLSVALREPGYGRKGNVESETRAAAAGGTTSLCCPPYTRPVLDTPAVAELILDRAREAGNAKVYPIGALTRGFGGEQLSELVALRDTGCVAFTNGLHGFASNRILRRALEYAATFDLTVIFTSQDTDLAEGGLAHEGPTASFLGLAGIPETAETVALARNLLLVEQSGVRAHFSQLTSARGIELVAQAQARGLPVTCDVALYQLILTDEALVGFSSLYHVQPPLRTRADREALREAVKNGVVQAIASHHQPHEADAKNAPFAATEPGISGAELLLPLAMTLVQDGLLDLPTLLARLSHGPAQALRLPAGRLAVGQAADLVLFDPQGSTLAGESWYSKGQNSPFVGHCLPGRVRYTLVDGHLTHEG

SEQ ID NO: 43590 - protein, 137 aa, Pseudomonas aeruginosa
MLQPKRTKFRKQMTGHNRGLAHRGSKVSFGEYALKATSRGRLTARQIESARRALTRHVKRGGKIWIRVFPDKPVTKKPLEVRMGKGKGGVEYWVAQIQPGKVLYEIEGVSEELAREAFALAAAKLPLATSFVKRTVM

SEQ ID NO: 43591 - protein, 400 aa, Pseudomonas aeruginosa
MAWNEPGDNSNNNDRDPWGGRRGGGGGGGDRKGPPDLDEAFRKLQDSLNGLFGGKKRSGNGSGSGSGGKGGGLGLFGIGLAILAVLWLYNAIYVVDEQEQAVILRFGKYYETVGPGLNFYFPPIDKRFQENVTRERAYSKQGQMLTEDENIVEVPLTVQYKISNLQDFVLNVDQPEVSLQQATESALRHVAGSTTMDRILTEGREQMATEVRERLQRFLDTYRTGITVTQVNIQSAQAPREVQEAFDDVIRAREDEQREKNQAEAYANGVVPEARGQAQRIIEEANGYRDEVISRAQGEADRFSKLLVEYRKAPEVTRERLYLDTMQEVFSQTSKVLVTGQQGQNNLLYLPLDKMIDGRNAAPATGAGASAGGGSASASDLGSRIVNDLRQQDARTRESR

SEQ ID NO: 43592 - protein, 913 aa, Pseudomonas aeruginosa
MSQAPLVLVDGSSYLYRAFHALPPLTTSTGKPTGAVKGVLNMLLSLRKQYPDSPFAVVFDAKGPTFRDELFAEYKANRPSMPDDLRVQVEPLHASVRALGLPLLCVEGVEADDVIGTLARSSAAADRPVVISTGDKDMAQLVDGHITLVNTMTGSRLDVDGVKEKFGVGPELIIDFLALMGDKVDNIPGVPGVGEKTALGLLTGVGGGLEVLYASLDKVPELPIRGAKGLPAKLEENREQAFLSYQLATIKTDVELDVEIDKLYPGEPQREALIALYRELEFKNWLDDLLREAKEAGENGEAETPIQAEVDYDVVLDQAGFDAWLKKLEEAELIAFDTETTSIDAQQAQVVGVSFAVKEGEAAYVPLAHSYMGVPEQLDRDAVLRALKPLLEDPKKLKVGQHAKYDINVLANASTPIALRGVAYDTMLESYVLDSTATRHDMDSLALKYLGHSTIRFEDIAGKGAKQLTFDQIAIEQAGPYAAEDADVTLRLHQALWQKLEAIPSLARVLTDIEMPLVPVLARIERNGALVDANLLGIQSRELGEKMVALERQAYDLAGQEFNLGSPKQLGAILYDKLGLPVLSKTATGQPSTAEAVLAELAEQDFELPKVIMQYRSMSKLKSTYTDRLPEQINPRTGRIHTSYHQAVAATGRLSSSDPNLQNIPIRTAEGRRIRQAFVAPQGYKLLAADYSQIELRIMAHLAKDDGLLDAFRHDLDVHRATAAEVFGVPLEDVSGDQRRSAKAINFGLIYGMSAFGLAKQIGVERKEAQAYIDRYFARYPGVLAYMERTRAQAAEQGFVETLFGRRLYLPEIHSKNGAMRKAAERTAINAPMQGTAADIMKRAMVAVDNWLQESGLDARVILQVHDELVLEVREDLVEQVCEGIRPLMSGAATLDVPLVVEAGVGSNWDEAH

SEQ ID NO: 43593 - protein, 194 aa, Pseudomonas aeruginosa
MKTSYDDTRQHLLDTGYRIMAVKGFSGVGLNEILQSAGVPKGSFYHYFKSKEQFGQALLEDYFRVYLADMDQRFSAPGLNARERLMSYWQKWLDNACPPCDEQRCLVVKLSAEVADLSESMRITLRDGSDGIIERLVGCLGQGRDDGSLAPCDARHMASALYQLWLGASLLSKLHRSPGPLETAMQTTRSLLEI

SEQ ID NO: 43594 - protein, 265 aa, Pseudomonas aeruginosa
MTHRLHADAVTLRRDARTVSRNLSLAIPEGSFSVIVGPNACGKSTLLAALSRLLAPAEGRVVLDGRDIHSLPGREVARRLGLLPQSALAPDGITVAELVARGRYPHQSFLRQWSPADERAVAAALRATRVDGLAERPLDALSGGQRQRVWIAMVLAQETPLLLLDEPTTYLDIVHQIELLELLAELNRQGRTIVAVLHDLNQACRYASHLIAMRDGAILAEGAPAHIFTERLVEEVFGLRSLIIADPVSGTPLLVPRGIAADAPG

SEQ ID NO: 43595 - protein, 399 aa, Pseudomonas aeruginosa
MLSVLRPFPSPLLSRHGIDLDFPLLAGCLALLGLGLVMVTSASSEVAAAQSGNPLYFSVRHLIYLVIGLISCGLTMMVPMATWQRWGWKLLLVAFGLLVLVITPGIGREVNGSMRWIGFGLFNIQPSEIAKVCVVIFMAGYLIRRQQEVRESWMGFFKPFVVLLPMAGLLLREPDFGATVVMMGAAAAMLFLGGVGLFRFGLMVLLAVGAVVLLIQTQPYRMARLTNFTDPWADQFGAGYQLSQALIAFGRGGWLGMGLGNSIQKQFYLPEAHTDFVFAVLAEELGIVGALATVALFVFVSLRALYIGIWAEQAKQFFSAYVAYGLAFLWIGQFLINIGVNVGLLPTKGLTLPFLSYGGSSLVICCACLGMLLRIEWERRTHLGSEEYEFNEEDFADER

SEQ ID NO: 43596 - protein, 448 aa, Pseudomonas aeruginosa
MTLTSIGPANRMARSAETHPLTWRLREDAQPVWLEEYQSKDGYAAARKALTQMAQDDIVQTVKDSGLKGRGGAGFPTGVKWGLMPKDESLNIRYLLCNADEMEPNTWKDRMLMEQLPHLLVEGMLISARALKAYRGYIFLRGEYVDAARNLNRAIDEAKAAGLLGKNILGSGFDFELFVHTGAGRYICGEETALINSLEGRRANPRSKPPFPAAVGVWGKPTCVNNVETLCNVPAIVGNGVDWYKTLARPGSEDMGTKLMGFSGKVKNPGLWELPFGVSARELFEDYAGGMRDGFQLKAWQPGGAGTGFLLPEHLDAQMFAGGIAKVGTRMGTGLAMAVDDSINMVSLLRNMEEFFARESCGWCTPCRDGLPWSVKLLRALERGEGQPGDLETLEQLVNFLGPGKTFCAHAPGAVEPLGSALKYFRAEFEAGISRQPSAAPRPATVGA

SEQ ID NO: 43597 - protein, 298 aa, Pseudomonas aeruginosa
MALQVASAPHGSSEDSTSASLPANYPYHTRMRRNEYEKAKHDLQIELLKVQSWVKETGQRVVVLFEGRDAAGKGGTIKRFMEHLNPRGARIVALEKPSSQEQGQWYFQRYIQHLPTAGEMVFFDRSWYNRAGVERVMGFCSPLQYLEFMRQAPELERMLTNSGILLFKYWFSVSREEQLRRFISRRDDPLKHWKLSPIDIKSLDKWDDYTAAKQAMFFHTDTADAPWTVIKSDDKKRARLNCIRHFLHSLDYPDKDRRIAHEPDPLLVGPASRVIEEDEKVYAEAAAAPGHANLDIPA

SEQ ID NO: 43598 - protein, 424 aa, Pseudomonas aeruginosa
MSEYIETDDASYFRVRRQAYVSAELHRRELHEIFDDSWLYAAHLSELREPGDFITRDVGGRNLIIQRRADGEPAVYLNACAHRGAKVCAERQGNSQRFTCPYHGWTYDSHGSLIGLPDKAAYQHAGQCHPELSLTQVKHAVYRNFLFIHYGARQASLETYLGQAKDYIDLICDQSEAELEIIPGGFEHSIKANWKLLAENGVDAYHLPFAHKRYLEYLNTLGTDPESHKRHGRGEALGNGHALIISGPPSTGRPIAYWSPLFPEALKPSIAAKFERLVERFGQARAEDIAHTNKSLFIFPNLVINDILGLNIRSFFPTAADEVSVTVWGAGFADETREERAARINGLISFIGPGGFGTPDDVEILESCQRAYAHAALGYSDFSRGMGPATRRHVDEEQNRGFWREWSRRLGQQPAALRRLAVAV

SEQ ID NO: 43599 - protein, 307 aa, Pseudomonas aeruginosa
MGKVALAAKITHVPSLYLSELPGPRHGCRQPAIDGHREIGRRCRELGVDTIVVFDTHWLVNAGYHINCAPHFEGLYTSNELPHFIANMEYGFPGNPELGRILAEGCNALGVETLAHDATTLGPEYGTLVPMRYMNQDRHFKVVSVSALCTVHYLNDSARLGWAMRKAVEEHYDGTVAFLASGSLSHRFAQNGQAPDFSDRIWSPFLEVLDHEVVQMWQEGRWAEFCGMLPEYASKGHGEGFMHDTAMLLGALGWSAYDGKAEVVTPYFGSSGTGQINAVFPVTAQDGSAIPAAQAGNPAGASCASRL

SEQ ID NO: 43600 - protein, 130 aa, Pseudomonas aeruginosa
MPHFIAEYTDNIEAEADLPGLFEKVHACLGASGVFPLGGIRSRGVRLDTWRMADGRHDYAFVHMTLKVGAGRDLETRRQVAEALFEVITAHFAELQARRLLALSFELTELDAELNYKRNNVHEFLNNPAD

SEQ ID NO: 43601 - protein, 64 aa, Pseudomonas aeruginosa
MPKMKTKSGAAKRFKKTAGGLKHKHAFKSHILTKMTTKRKRQLRGTSMLNKSDVARVERSLRLR

SEQ ID NO: 43602 - protein, 118 aa, Pseudomonas aeruginosa
MARVKRGVIARRRHKKILKLAKGYYGARSRVFRVAKQAVIKAGQYAYRDRRQRKRQFRALWIARINAGARQNGLSYSRLIAGLKKAAIEIDRKVLADLAVNEKAAFTAIVEKAKASLA

SEQ ID NO: 43603 - protein, 159 aa, Pseudomonas aeruginosa
MITIFFETGEELDLPLDNFAKSNLSGLELHRAIFDGLDLSEADFTASNLRNASFNHALLGGAVMNSAALMNASFVDAIMKGVKLVDAMAAYADFSGADLSMASLKNADIGGSNFINSNLRDVNIDVARIDGAVFRGAIYNDRTIWPKGFIPENFGAIKG

SEQ ID NO: 43604 - protein, 166 aa, Pseudomonas aeruginosa
MSQSNLIQTDRFVLSETERSSIEHEMHHYEDPRAASIEALKIVQKQRGWVPDGAIPAIGEVLGIPASDVEGVATFYSQIFRQPVGRHIIRVCDSMVCYIGGHESVVGEIQKQLGIGLGQTTADGRFTLLPVCCLGNCDKAPALMIDDDTHGDVRPDGVAKLLEAYV

SEQ ID NO: 43605 - protein, 665 aa, Pseudomonas aeruginosa
MPSRRERANAIRALSMDAVQKANSGHPGAPMGMADIAEVLWRDYMQHNPSNPQWANRDRFVLSNGHGSMLIYSLLHLTGYDLGIEDLKNFRQLNSRTPGHPEYGYTAGVETTTGPLGQGIANAVGMALAEKVLAAQFNRDGHAVVDHYTYAFLGDGCMMEGISHEVASLAGTLRLNKLIAFYDDNGISIDGEVHGWFTDDTPKRFEAYGWQVIRNVDGHDADEIKTAIDTARKSDQPTLICCKTVIGFGSPNKQGKEECHGAPLGADEIAATRAALGWEHAPFEIPAQIYAEWDAKETGAAQEAEWNKRFAAYQAAHPELAAELLRRLKGELPADFAEKAAAYVADVANKGETIASRKASQNALNAFGPLLPELLGGSADLAGSNLTLWKGCKGVSADDAAGNYVFYGVREFGMSAIMNGVALHGGFIPYGATFLIFMEYARNAVRMSALMKQRVLYVFTHDSIGLGEDGPTHQPIEQLASLRLTPNLDTWRPADAVESAVAWKHAIERADGPSALIFSRQNLPHQARDVAQVADIARGGYVLKDCEGEPELILIATGSEVGLAVQAYDKLSEQGRKVRVVSMPCTSVYEQQDESYKQSVLPVEVGARIAIEAAHADYWYKYVGLDGRIIGMTSFGESAPAPALFEHFGFTLDNVLAVAEELLED

SEQ ID NO: 43606 - protein, 173 aa, Pseudomonas aeruginosa
MWFLGKMGFTYGSSHYRYEGFEGKVLEVGSGPIGFFEKVEGVTVTAQDSLMGLYAENLPFSILGERGSSCYIRDGVADIESAFDFVVCSNVLDHTADWIQFLVDCVGRLRTGGELLLVTDSRGVPAIGHTQIFSHDQLVRVLELLGAKQFKVKAVEREDGVHCDYRHYFRVVF

SEQ ID NO: 43607 - protein, 254 aa, Pseudomonas aeruginosa
MGGTPVRLFCLPYSGASAMTYSRWRRKLPAWLAVRPVELPGRGARMAEPLQTDLASLAQQLARELHDEVRQGPYAMLGHSLGALLACEVLYALRELGCPTPLGFFACGTAAPSRRAEYDRGFAEPKSDAELIADLRDLQGTPEEVLGNRELMSLTLPILRADFLLCGSYRHQRRPPLACPIRTLGGREDKASEEQLLAWAEETRSGFELELFDGGHFFIHQREAEVLAVVECQVEAWRAGQGAAALAVESAAIC

SEQ ID NO: 43608 - protein, 293 aa, Pseudomonas aeruginosa
MMRPLCFFLLIFLLSGNPVMAAELRPFICVNEKDHLPSLDPQADAWYREAVALAKPDTLRPWDRIVDLYSKAVERGHWKAMHNLASLYRTGWPGGVEKDTQKALDLYQKMIDLKVPQGFYDMAAMIGNRAGVKNPATDGLTFLDKAASLGNPPALTELGRLYIYVAGQDELGLKYTNCAAGQGYAPANYELAMYYRLVAHNYPKAAGYYLLAASQGNDDAAFFMSGVFDKTSPDVDRMWYAPDEKLHKLYDGIYDQLAADPDLRFPNLIKDHPLPPHPTQGYDADRPDWKPGQ

SEQ ID NO: 43609 - protein, 296 aa, Pseudomonas aeruginosa
MASLVTAVLFLVVCISWGTTWLGIKIAVESVPPLTAAGLRFLIAFPLFLLFARLRHETIFFPRRLLAFFVFVTLGYFSVPYYLLNYGEQYVASGLTALLFSSMPVFILIFSAIFLRERIYLSQILGIAIGFGSLFMIIRSQGLHLDYTELLGVLAILLAAIMHALSYVITKRQGADIGVITFNTLPIGIAGLGLFMAGLVMEHPNLSAVTSRSWAALIYLGLVASVGGFIVYFFLLKRLSPVVLSFVFIIFPVFAVIIGAWYEGVAISRELIGFTVLLLAGFAITKLPIEKLLGRR

SEQ ID NO: 43610 - protein, 360 aa, Pseudomonas aeruginosa
MKASLLKKLDVLSDRYEELTALLGDAEVISDQTRFRAYSREYAEVEPVILAFRDYRKVQADLEGAQALLKDSDPELRDLAEEEVAEARGRLAALGDSLQRMLLPKDPNDSRNVFLEIRAGTGGDEAAIFSGDLFRMYSRYAERQGWRIETLSENEGEHGGYKEVIARVEGDNVYAKLKFESGAHRVQRVPETESQGRIHTSACTVAVLPEPDEQAAIEINPADLRVDTYRSSGAGGQHVNKTDSAVRITHIPSGIVVECQEERSQHKNRAKAMAWLAAKLNDQQQAAAQQAIASTRKLLVGSGDRSERIRTYNFPQGRVTDHRINLTLYSLGEVMEGAVEQVIEPLLQEYQADQLAALGD

SEQ ID NO: 43611 - protein, 776 aa, Pseudomonas aeruginosa
MPRCSTRSAQRLSPLFLVLSLAVLGLAPPVHPAPAETAAAQEEEQWTINMKDAEIGDFIEQVSSISGQTFVVDPRVKGRVTVVSQARLSLAEVYQLFLSVLATHGYAVLPQGDQARIVPNMEARQDAAQKTVRDGPGSLETRVVQAQQTSVAELIPMIRPLVPAHGHLAAVPSANALIVSDRRSNIERIEAIVRSLDRAGEHDYSIYDMRHAWVAEIAEVLDRSVTPAAGKSAATVQVLADSRSNRLVLLGPPQARARLLRLAQSLDVPSSRSANSRVIRLRHGDAKTLAATLGEIGESLHGERGQDGRGSGKRGLLVRADESLNALVILADPEDVGLLEDIVRQLDVPRAQLLVEAAIVELSGEIGDALGVQWALRSGHVAGGAGFADSGLSIGTLLGALQAGKPPAELPDGAIVGLGSRDFGALVTALSRNSRSNLLSTPSLLTLDNQKAEILVGQNVPFQTGSYTTSASGSSNPFTTVERKDIGVTLKVTPHIGEDRMLRLEIEQEISSIAPTATLAAKAVDLVTNKRSIKSTVLADDGQVIVLGGLIQDDLQRSDSRVPLLGDIPGVGRLFRSSRETRVKRNLMVFLRPSIVRDAAGLERISHGRYRSIQLLRGAAGEPARPLFEDAGAIDLRPAAQVAPAPIGSPRSYPAPAPVLMEKPRLADPASLGDGRGGEVLEVRQGTHAPQPPSPQRYAVRLVEGSSEAFMRALIERHPGLSLRLRRELRDGQELFAVERGDYLDPEQARRALAELPESLPRGKARVIAHTPGSAL

SEQ ID NO: 43612 - protein, 335 aa, Pseudomonas aeruginosa
MRIGIVNDMPLAVEALRRALAFEPQHQIVWVASNGAEAVTQCAADTPDVVLMDLLMPVMDGVEATRRIMAESPCAIVIVTVDIEQNVHRVFEAMGYGALDAVNTPALGIGNPQTAAAPLLRKIQNVGWLIGQRDNRGKVQVVPPKAGGARQRLVAIGASAGGPASLAVLLKQLPASFNAAVVLVQHVDEVFAAGMAEWLASESKLPVRLARDGEPPIPGQILLAGTNNHIRLLRNGSLVYTAEPRSFVYRPSIDVFFESVANYWRGDAVGVLLTGMGRDGAQGLKQMRERGFLTIAQDQASCAVYGMPKAAAAIDAAVQILSLEKIAPRLAEVFD

SEQ ID NO: 43613 - protein, 487 aa, Pseudomonas aeruginosa
MNCRASATLWIRSSCLITAMEHGPLQAGNSDAGQGHGAGRSRGARRSGTGAKKARQYSRSGETGARADDQTLVGQPAGRPINPRSASWQFVRLGNPQGAGYIAARCHYGTEPMRTDKPPLKQRALQKLLLRRFGMAAGTYLLGLVLLWLALLSGFYRAAPTTAAASTTLVVACQLAFLWLFASGRNLRYADPSLTEPQVLVAIAWLTYFLYHVDSLRGTFMVFYVLALLFGVFQLPPRVFARCAALAFIAFSGIYLVEALQQRLELPGRAALQVLVMFIVMVWLSLFASYIQAMRQRMRQRRYALQAHQDTLRGMMRQLEDLVATDELTGLFNRRHFMRMASRALEDLLPNRQHGLALIDLDHFKRINDRHGHAAGDRVLQTFAAVARSCLRDGDVLARYGGEEFVLLLPHADAEQLESCCERLRLAFQQAEPVGVTVDTLSLSVGMTLLYADDDLDEALQRADQALYRAKRGGRNRCDATWEVTSA

SEQ ID NO: 43614 - protein, 840 aa, Pseudomonas aeruginosa
MTQVTVKELAQVVDTPVERLLLQMRDAGLPHTSAEQVVTDSEKQALLTHLKGSHGDRASEPRKITLQRKTTTTLKVGGSKTVSVEVRKKKTYVKRSPDEIEAERQRELEEQRAAEEAERLKAEEAAARQRAEEEARKAEEAARAKAAQEAAATAGAEPAVVADVAVAEPVAKPAAVEERKKEEPRRVPKRDEDDDRRDRKHTQHRPSVKEKEKVPAPRVAPRSTDEESDGYRRGGRGGKSKLKKRNQHGFQNPTGPIVREVNIGETITVAELAAQMSVKGAEVVKFMFKMGSPVTINQVLDQETAQLVAEELGHKVKLVSENALEEQLAESLKFEGEAVTRAPVVTVMGHVDHGKTSLLDYIRRAKVAAGEAGGITQHIGAYHVETERGMVTFLDTPGHAAFTAMRARGAQATDIVILVVAADDGVMPQTQEAVQHAKAAGVPIVVAVNKIDKPEANPDNIKNGLAALDVIPEEWGGDAPFVPVSAKLGTGVDELLEAVLLQAEVLELKATPSAPGRGVVVESRLDKGRGPVATVLVQDGTLRQGDMVLVGINYGRVRAMLDENGKPIKEAGPSIPVEILGLDGTPDAGDEMTVVADEKKAREVALFRQGKFREVKLARAHAGKLENIFENMGQEEKKTLNIVLKADVRGSLEALQGSLSGLGNDEVQVRVVGGGVGGITESDANLALASNAVLFGFNVRADAGARKIVEAEGLDMRYYNVIYDIIEDVKKALTGMLGSDLRENILGIAEVRDVFRSPKFGAIAGCMVTEGMVHRNRPIRVLRDDVVIFEGELESLRRFKDDVAEVRAGMECGIGVKSYNDVKVGDKIEVFEKVEVARSL

SEQ ID NO: 43615 - protein, 377 aa, Pseudomonas aeruginosa
MTHDLAASGLRFGIEEEFFLLDASDLDIVRSAPAGFVAACRDTLGEHFAEEMFECQVEVASPVFSTLAEAARFHGQARQRLAHLAMDFGLRSLCVGTHPFADWRRARSNPAAHFARLFEDQGRVARRSLVCGLHVHVEIPPSHDRMAVLQRVLPWLPLLLALSASSPFRGGRRSGLASYRRALCGEWPRMNIPPALPDEDAYRRHLALLRETGCIREDGQVWWMIRPSSHVPTLELRICDACPRLADALSLAGLFRALVGEALGADPRALPVARDACLEENYWQALRYGCAGRYLVEGRCVGAGDWLEMAWRQCRPQARQGNEWAYQHACGLLEETSAARQLRRYRRLREAGQERHPALRRLVEELLEENLQPALAG

SEQ ID NO: 43616 - protein, 254 aa, Pseudomonas aeruginosa
MLPDPLPVPLFALRIDRAASRTASHRHACGQLYCLERGLLVVEDEHGRQALPPRQIAWIPPGHPHSAHSHGSLAGWSAYLAAEHCRDLPRHPGVLACSAFVALIVERATRWPTGSAWSTERENLLRVLLDELRHAVPQRTRLPYPGDSRLRRIAEALLANPGDPRPAAEWARWAGLSSRSLSRLFGAETGMSFAQWRQLARLHAAVERLAAGQAVGEVAWSLGYESPSSFASAFRTVFGETPSGYSSRANEALA

SEQ ID NO: 43617 - protein, 300 aa, Pseudomonas aeruginosa
MILFDYKLLAALAAVVEQGGFERAAQALGLSQSAVSQRIKLLEARVGQPVLVRETPPHPTDLGRRLLNHVQQVRLLEGDLQRWVPNLDEGGAPERLRIALNADSLATWWAAAVGDFCAERRVLLDLVVEDQEVGLKRMRAGEVAGCVCGSARPVAGARSLLLGAMRYRGLASPDFIARHFPRGVEAAALAGVPAIVFGPDDLLQHRFLKDLGVEGGFIHHLCPSSEGFVRLTAGGLGWGLVPERQVQGELARGELVELLPGQVIDVPLYWHYWRNGGELLASLTEHLLARAGDGLVRVSG

SEQ ID NO: 43618 - protein, 728 aa, Pseudomonas aeruginosa
MNDDLSLLLNSLNDPQRQAVAAPLGRQLVLAGAGSGKTRVLVHRIAWLIQVEHASPYSILSVTFTNKAAAEMRHRIEQLLGINPAGMWVGTFHGLAHRLLRAHWREAGLSENFQILDSDDQQRLVKRVIRELGLDEQRWPARQAQWFINGQKDEGLRPQHIQPGGDLFLATMLKIYEAYEAACARAGVIDFSELLLRALDLWRDHPGVLEHYQRRFRHILVDEFQDTNAVQYAWLRILAKGGDSLMVVGDDDQSIYGWRGARIENIQQFSDDFADAEVIRLEQNYRSTASILKAANALIANNQGRLGKELWTDGEDGESLSLYAAFNEHDEARYVVESIESALKGGLARSEIAILYRSNAQSRVLEEALLREKIPYRIYGGQRFFERAEIKNAMAYLRLLDGRGNDAALERVVNVPARGIGEKTVESIREFARGNDVSMWEAIRLMIANKVLPGRAASALTGFVELIENLSAKVMDMPLHLMTQTVIEQSGLISYHKEEKGEKGQARVENLEELVSAARAFENSEEEEDLTPLQAFLSHASLEAGETQADAHEDSVQLMTLHSAKGLEFPLVFLVGMEEGLFPHKMSLEESGRLEEERRLAYVGVTRAMQRLVLTYAETRRLYGSETYNKVSRFIREIPPALIQEVRLSNTVSRPYGGTSRSAGGNLFSGAGVPETPFSLGQRVRHALFGEGTILNFEGAGAQARVQVNFESEGSKWLMLGYAKLEAL

SEQ ID NO: 43619 - protein, 596 aa, Pseudomonas aeruginosa
MSERGDRLSWAEIRRLALRHKKALLFANLVAVLATLCTVPIPLLLPLLVDEVLLGKGDGALRFMDRLLPADWQVAFGYIGLMLAATLLLRGAALVFNVLQAKLFARLSKDIVYRIRLRLIERLRHIALGEYETLGGGSISAHLVTDLDTLDKFVGETLSRFLVALLTLLGTAAILVWMHWQLALLILLFNPLVIWSTVQLGKRVKHLKKLENDSTARFTQALTETLEAIQEVRAGNRQGYFLGRLGHRAQEVRDYAVASQWKSDAAGRASGLLFQFGIDVFRAAAMLTVLLSDLSIGQMLAVFSYLWFMIGPVEQLLGLQYAYYAAGGALQRINELLARADEPRYPPLRDPFAGRTTVGIEVRGLDFAYGEDKVLEQLDLNIGAGEKVALVGASGGGKSTLVQLLLGLYSAQRGSIRYGGVPLEEIGLDCVREHVAVVLQHPALFNDSVRANLTMGRERSDQACWRALEIAQLADGVRRLPQGLDTVVGRSGVRLSGGQRQRLAIARMILAEPKVVILDEATSALDAATEYALHQALGDFLEGRTTLIVAHRLSAVKQADRVLVFDGGHIAEDGDHQQLIAEGGLYARLYGHLQQM

SEQ ID NO: 43620 - protein, 465 aa, Pseudomonas aeruginosa
MDDNKNKVLRLRDVVLYTVSAMLFMDQIALASSLGPSSLFWWLYVLVLLFLPMAMMTSELGTAFPANGGVYHWVRSAFGFRWGARVSWMYWVNNALWMPSVYTLFGSMLGAFYFPELSLWGKIAIGIALALLTAAFNVVALRLGKWLPNLGALLKLLAVLALGVGGLHFGWNHGFANDFSLDSIVPSSPGQMAALGVMVYGIMGTELACCSAAEMRNARRDIPRAVLISGLIVGAFNIFGTLGVLAAVPAEETDVTRIFAHTLYNIYGHDGAGGMLADLVGAFVLFTLFTNMVTWSMGTNRAAVEAAKAGELPALFGVVHSRHGTPIGSAVLASAVSIVLLLLYGLVAHTAEELFWTLLSIFAMVFMMPYVLMCLAFVRLRRADPRPRPYRMPLGDRLASLWALFVALHVLAGICLFVVTPGAPMDWAYAGKIVGGVALALAVGELLIRQAARRRGVMSLRGAYG

SEQ ID NO: 43621 - protein, 332 aa, Pseudomonas aeruginosa
MFKPFVGVALAALFAVSAVAHAEDAGPVVIKFSHVVSDDTPKGKGALLFKKLAEERLPGKVKVEVYPNSTLFGDADEIEALRANKVQMLATSLSKFEPYTKQLQVFDLPFLFDDLEALKRFQKRDKSRELLRSMAKHGIYGLAYWNNGMKQLSATRELHRPDDAKGLVFRIQPSSVLEAQFAMLGATAKQLSYAETLKAMQAGSVQGTENTWSNLAGQKIDSVQPYITETNHGALSYMLITSSAFWTGIPYQTRTELESIVDEVTLVVNKEAEALNQKEREHLLAAGKSRLVSLSAEEHEAWRNAMKPLWKNYEAQIGSDVLRAAQVVNRKR

SEQ ID NO: 43622 - protein, 99 aa, Pseudomonas aeruginosa
MNQERVFKVLLGPHISEKATGLADGKSQFVFKVATDATKLEIKKAVESLFSVKVQRVTTLNVKGKTKRTARGLGKRNDWKKAYIALQPGQDLDFATSAE

SEQ ID NO: 43623 - protein, 861 aa, Pseudomonas aeruginosa
MNNPSTTKAPLADYLAHLPLAEEERERLGESASFSELHARLAGAEGAAADAGGDPALASVRARLQLGTPELDDAEMFGVDAQGRTFLKISPPIRRTKVIPEPWRTNILVRGWRRLTGRSNPPKPKRALPRARWQRVGSLRRFILLLLMLAQTSVATYYMKGILPYQGWAFVDLEELAQQSLLDTVQQVLPYVIQFGILALFAILFCWVSAGFWTALMGFWELLTGRDRYRISGSSAGSEPIAADARTAIVMPICNEDVPRVFAGLRATVESMAATGEMERFDFFVLSDTNDPDIAVAEQQAWLELCRETKGFGKIFYRRRRRRVKRKSGNIDDFCRRWGGDYRYMVVMDADSVMSGDCLAKLVRLMEANPEAGIIQTAPKASGMDTLYARMQQFATRVYGPLFTAGLHFWQLGESHYWGHNAIIRMQPFIDHCALAPLPGKGSFAGAILSHDFVEAALMRRAGWGVWIAYDLDGSYEELPPNLLDELKRDRRWCHGNLMNFRLFLVKGMHPVHRAVFLTGVMSYLSAPLWFFFLVLSTALLAVHQLMEPQYFLEPRQLFPIWPQWHPEKAIALFSTTLTLLFLPKLLSVMLIWAKGAKGFGGVIRVTLSMLLEMFFSVLLAPVRMLFHTRFVLAAFLGWSVQWNSPQRDDDATPWSEAIRRHGMQTLLGIAWTLLVAWLNPRFLWWLSPIVGSLILSIPVSVISSRVKLGLRARDEKLFLIPEEYDTPRELRATDEYTYENRWHALKDGFLKAAVDPLLNALACAMGTARHNRAQAIETVRGERIGKAIDKGPEQLDGATRLALLSDPVALSRLHTRVWEEDRDDWLGRWRKAEADDPHAASVPLAQVVPGDAGLLPAAQS

SEQ ID NO: 43624 - protein, 262 aa, Pseudomonas aeruginosa
MAKVFAIANQKGGVGKTTTCINLAASLVATKRRVLLLDLDPQGNATTGSGIDKHNLEHSIYDVLTGECNLAEAMQFSEHGGYQLLPANRDLTAAEVVLLEMDMKENRLRNALAPIRENYDYILIDCPPSLSMLTVNALTAADGVIIPMQCEYYALEGLTDLMNSIQRIGQLLNPTLKIEGLLRTMYDPRISLTNDVSAQLQEHFGDTLYSTVIPRNVRLAEAPSFGMPALVYDKQSRGAIAYLALAGELVRRQRAKGRAATA

SEQ ID NO: 43625 - protein, 369 aa, Pseudomonas aeruginosa
MLKLNAVDTAPLVSSDTLAPLPPLRAQQIAFEQALPAHRPPAPRPPFDKGDETTEAAATADAPTSTPLADQPAAPAADRPPTIRQPPMPVAADATPTPTPTPTPTPTPTPTPTPTPTVSPSGSVARQAPAVSARVAASTQAREPASVSAPPVDEPPLVPVSSHPQIAGRTHERPQPGPGFPAKTAAEVAPTAQASVQASPPAPTAGGEGRGEERRQPGETDPSALPPDDQAPVPLPAMQTPGDRLLARLLASSGSRPLPLADLARLLDAVQGRIQVASAAESHAARLQVRLPQLGAVEVQVLHGHGQLQIEISASPGSLALLQQARGELLERLQRLHPEQPVQLTFNQQQDSGQRSRQRRYLHEEWQAE

SEQ ID NO: 43626 - protein, 156 aa, Pseudomonas aeruginosa
MKALLIAAGVAALSSTAMAAKLDEKVPYPKADAGFTRQVIHLPKQDAEDAFKVEIIAGKTLEADCNQQRLGGELEEHTLEGWGYSYYRLDKVSGPMSTMMACPGQKKEQRFIPVVGEGFLLCYNSKLPIVVYAPKDVEVRYRIWSASEKVEKAVSE

SEQ ID NO: 43627 - protein, 107 aa, Pseudomonas aeruginosa
MAKADDTSNPAITAQSPSTFIPLRRTSQCNQHPGCATLYLDSSAASEDLFDTARRRLESAIGTLSVLDLLDETEEPGESICRITGSLLSLLSDALSLFEAEYARRHR

SEQ ID NO: 43628 - protein, 334 aa, Pseudomonas aeruginosa
MTSQINRQYQLAQRPSGLPGRDTFSFVETPLGEPAEGQILVKNEYLSLDPAMRGWMNDARSYIPPVGIGEVMRALGVGKVLVSKHPGFQAGDYVNGALGVQDYFIGEPKGFYKVDPSRAPLPRYLSALGMTGMTAYFALLDVGQPKNGETVVISGAAGAVGSVAGQIARLKGCRVVGIAGGAEKCRFLVEELGFDGAIDYKNEDLAAGLKRECPKGIDVFFDNVGGEILDTVLTRIAFKARIVLCGAISQYNNKEAVRGPANYLSLLVNRARMEGMVVMDYAQRFPEGLKEMATWLAEGKLQSREDIVEGLETFPETLLKLFSGENFGKLVLKV

SEQ ID NO: 43629 - protein, 325 aa, Pseudomonas aeruginosa
MVTEHIFDFEWRPLQNYLRDRDIAIPPFAAEQESRSDALYNWIVSKGYSGKEGLNLGTYYHISDYGVIGLALLCAENVGDILKVIRAYVKLFNRDIANVGVKPRENYEVEIHISVNFKPEWNDASRQFHVNVIASATYKLIMDLLGNDFPISALTVPVHGADKTIYEGFFSLPVKHEGNDIIFSFPAHQLNRTLATANPAVFQSALTMAGESFNALLEVEMGGLRQRIELFLDSIPDQYPSLVTTAKYLRMNERTVRRRLADEGCTYRQIVDKARKERAIALLLNSSIPVDRISDILGYSETASFRHAFRRWTGQSTTEFRNSFH

SEQ ID NO: 43630 - protein, 536 aa, Pseudomonas aeruginosa
MSKRPNFLVIVADDLGFSDIGAFGGEIATPNLDALAIAGLRLTDFHTASTCSPTRSMLLTGTDHHIAGIGTMAEALTPELEGKPGYEGHLNERVVALPELLREAGYQTLMAGKWHLGLKPEQTPHARGFERSFSLLPGAANHYGFEPPYDESTPRILKGTPALYVEDERYLDTLPEGFYSSDAFGDKLLQYLKERDQSRPFFAYLPFSAPHWPLQAPREIVEKYRGRYDAGPEALRQERLARLKELGLVEADVEAHPVLALTREWEALEDEERAKSARAMEVYAAMVERMDWNIGRVVDYLRRQGELDNTFVLFMSDNGAEGALLEAFPKFGPDLLGFLDRHYDNSLENIGRANSYVWYGPRWAQAATAPSRLYKAFTTQGGIRVPALVRYPRLSRQGAISHAFATVMDVTPTLLDLAGVRHPGKRWRGREIAEPRGRSWLGWLSGETEAAHDENTVTGWELFGMRAIRQGDWKAVYLPAPVGPATWQLYDLARDPGEIHDLADSQPGKLAELIEHWKRYVSETGVVEGASPFLVR

SEQ ID NO: 43631 - protein, 759 aa, Pseudomonas aeruginosa
MHPCHRPSFAFLRHPLSIVVCLALLAGCSTSPLQFPEPLLAKSEKAKATEGVALVSDDGKKAPASLAVPKTEFSGTPTSPRSIVGGVVDRMDKAILDDKKADISLNVEDVQLAAFINEVFGNILGLPFEIESALKEKTDRVTVRLEQPQTAQMVYEVARQVLVNYGVEILHQGDIYRFQIKQVGLSPDEPPILISGEARPSVPIAYRPVFQFVALHSVDPKDVIPWLNSAYEKSGLSVMADGARSGLMLKGMSSIVNQATEAVRLLDQPFMRGRHSLRIDPAFVSAADMASQLKTVIAAQGYSVGIGEAVGSIMLVPLESSNGLIVFANDGQLLDLVREWAQQVDRAPMAVAAGIGEEKEGLFFYEARNTRVTELAKSLRALVSGFAGEGAYGITSGLQSSASKRSGGGRRAGDDGAAPAVAPLLQAAGAAALVGGDGANGLLGGLAAGISGSGTIVEDENRNAILFRGAARTWQQMQGLLREMDKPARQVLIEVTVASVSLSDTQELGVEWEMLNGSFNSATSTGSKGSAGKGGFNYVINTAGGNTAAIQAMADNQRVRVLATPRILVKSGEQANINVGRDIPIPTAQVNDDSTTAGSTNLRNEIAYRSTGTILNVAPVVYSDSRVDLTVSQELSDSGGSSGGGGKASGGGISAPEISRTSLETSLTLKSGGSVLMGGLIRDNITDSNAGVPLLKDIPGIGFLFGRQKAVKTREEVIMLIQPYVLESDADAREVTEKLHAMLSKTLACSDRPGACRME

SEQ ID NO: 43632 - protein, 409 aa, Pseudomonas aeruginosa
MLNGLWLGFFLVAAASALARWLIGGDATVFAAMVESLFAMAKLAVEVMVLLFGTLTLWLGFLRIAEKAGLVERLAVLLGPLFRRLMPEVPPGHPAIGLITLNFAANGLGLDNAATPIGLKAMKALQELNPSSTTASNAQILFLVLNASSLTLLPVTIFMYRAQQGAADPTLVFLPILLATSASTLAGLLSVALMQRLRLWDPVVLAYLIPGALLLAGFMAVLGTLSATALAQLSSLLGNLTLFSLIVLFLIVGALKKVPVYESFVEGAKEGFDVARNLLPYLVAMLCAVGVLRASGALEVVLGGIRWAVEGLGWDSRFVEALPTALVKPFSGSAARAMLLETMQTHGVDSFPALVAATVQGSTETTFYVLAVYFGSVGLQRARHAVGCALTADLAGVIASIAVCYWFFA

SEQ ID NO: 43633 - protein, 5149 aa, Pseudomonas aeruginosa
MNAEDSLKLARRFIELPVEKRRVFLETLRGEGIDFSLFPIPAGVSSAERDRLSYAQQRMWFLWHLEPQSGAYNLPSAVRLNGPLDRQALERAFASLVQRHETLRTVFPRGADDSLAQAPLQRPLEVAFEDCSGLPEDEQEARLREEAQRESLQPFDLCEGPLLRVRLIRLGEERHVLLLTLHHIVSDGWSMNVLIEEFSRFYSAYATGAEPGLPALPIQYADYALWQRSWLEAGEQERQLEYWRGKLGERHPVLELPTDHPRPAVPSYRGSRYEFSIEPALAEALRGTARRQGLTLFMLLLGGFNILLQRYSGQTDLRVGVPIANRNRAEVEGLIGLFVNTQVLRSVFDGRTSVATLLAGLKDTVLGAQAHQDLPFERLVEAFKVERSLSHSPLFQVMYNHQPLVADIEALDSVAGLSFGQLDWKSRTTQFDLSLDTYEKGGRLYAALTYATDLFEARTVERMARHWQNLLRGMLENPQASVDSLPMLDAEERGQLLEGWNATAAEYPLQRGVHRLFEEQVERTPTAPALAFGEERLDYAELNRRANRLAHALIERGVGADRLVGVAMERSIEMVVALMAILKAGGAYVPVDPEYPEERQAYMLEDSGVQLLLSQSHLKLPLAQGVQRIDLDQADAWLENHAENNPGVELNGENLAYVIYTSGSTGKPKGAGNRHSALSNRLCWMQQAYGLGVGDTVLQKTPFSFDVSVWEFFWPLMSGARLVVAAPGDHRDPAKLVELINREGVDTLHFVPSMLQAFLQDEDVASCTSLKRIVCSGEALPADAQQQVFAKLPQAGLYNLYGPTEAAIDVTHWTCVEEGKDAVPIGRPIANLACYILDGNLEPVPVGVLGELYLAGRGLARGYHQRPGLTAERFVASPFVAGERMYRTGDLARYRADGVIEYAGRIDHQVKLRGLRIELGEIEARLLEHPWVREAAVLAVDGKQLVGYVVLESEGGDWREALAAHLATSLPEYMVPAQWLALERMPLSPNGKLDRKALPAPEVSVAQAGYSAPRNAVERTLAEIWQDLLGVEQVGLDDNFFSLGGDSIVSIQVVSRARQAGLQLSPRDLFQHQNIRSLALAAKAGAATAEQGPASGEVALAPVQRWFFEQSIPNRQHWNQSLLLQARQPLDGDRLGRALERLQAQHDALRLRFREERGAWHQAYAEQAGEPLWRRQAGSEEVLLALCEEAQRSLDLEQGPLLRALLVDMADGSQRLLLVIHHLAVDGVSWRILLEDLQRLYADLDADLGPRSSSYQAWSRHLHEQAGARLDELDYWQAQLHDAPHALPCENPHGALENRHERKLVLTLDAERTRQLLQEAPAAYRTQVNDLLLTALARATCRWSGDASVLVQLEGHGREDLGEAIDLSRTVGWFTSLFPLRLTPAADLGESLKAIKEQLRGVPDKGVGYGLLRYLAGEEAATRLAALPQPRITFNYLGRFDRQFDGAALLVPATESAGAAQDPCAPLANWLSIEGQVYGGELSLHWSFSREMFAEATVQRLVDDYARELHALIEHCLDPRHRGVTPSDFPLAGLSQTQLDELSLDPDSVRDIYPLSPMQQGMLFHSLHGTEGDYVNQLRMDIGGLDPDRFRAAWQATLDAHEILRSGFLWKDGWPQPLQVVFEQATLELRLAPPGSDPQRQAEAEREAGFDPARAPLQRLVLVPLANGRMHLIYTYHHILMDGWSNAQLLAEVLQRYAGQEVAATVGRYRDYIGWLQSRDAKATESFWRDRLASLEMPTRLARQARTEQPGQGEHLRELDPQTTRQLASFAQGQKVTLNTLVQAAWALLLQRHCGQETVAFGATVAGRPAELPGIEAQIGLFINTLPVIAAPQPQQSVADYLQGMQALNLALREHEHTPLYDIQRWAGHGGEALFDSILVFENFPVAEALRQAPADLEFSTPSNHEQTNYPLTLGVTLGERLSLQYVYARRDFDAADIAELDRHLLHLLQRMAETPQAALGELALLDAGERQEALRDWQAPLEALPRGGVAAAFAHQAASAPEAIALVCGDEYLSYAELDMRAERLARGLRARGVAAEALVAIAAERSFDLVVGLLGILKAGAGYLPLDPNYPAERLAYMLRDSGARWLICQETLAERLPCPAEVERLPLETAAWPASADTRPLPEVAGETLAYVIYTSGSTGQPKGVAVSQAALVAHCQAAARTYGVGPGDCQLQFASISFDAAAEQLFVPLLAGARVLLGDAGQWSAQHLADEVERHAVTILDLPPAYLQQQAEELRHAGRRIAVRACILGGEAWDASLLTQQAVQAEAWFNAYGPTEAVITPLAWHCRTQEGGAPAIGRALGARRACILDAALQPCAPGMIGELYIGGQCLARGYLGRPGQTAERFVADPFSGSGERLYRTGDLARYRVDGQVEYLGRADQQIKIRGFRIEIGEIESQLLAHPYVAEAAVVALDGVGGPLLAAYLVGRDAMRGEDLLAELRTWLAGRLPAYMQPTAWQVLSSLPLNANGKLDRKALPKVDAAARRQAGEPPREGLERSVAAIWEALLGVEGIARDEHFFELGGHSLSATRVVSRLRQDLELDVPLRILFERPVLADFAASLESQAASAAPVLQILPRVAELPLSHAQQRMWFLWKLEPESAAYHLPSVLHVRGVLDQAALQQAFDWLVLRHETLRTRFEEVDGQARQTILANMPLRIVLEDCAGASEATLRQRVAEEIRQPFDLARGPLLRVRLLALAGQEHVLVITQHHIVSDGWSMQVMVDELLQAYAAARRGEQPTLAPLTLQYADYAAWHRAWLDSGEGARQLDYWRERLGAEQPVLELPADRVRPAQASGRGQRLDMALPVSLSEELLACARREGVTPFMLLLASFQVLLKRYSGQSDIRVGVPIANRNRAEVERLIGFFVNTQVLRCQVDAGLAFRDLLGRVREAALGAQAHQDLPFEQLVDALQPERNLSHSPLFQVMYNHQSGERQDAQVDGLHIESFAWDGAAAQFDLALDTWETPDGLGAALTYATDLFEARTVERMARHWQNLLRGMLENPQASVDSLPMLDAEERGQLLEGWNATAAEYPLQRGVHRLFEEQVERTPTAPALAFGEERLDYAELNRRANRLAHALIERGVGADRLVGVAMERSIEMVVALMAILKAGGAYVPVDPEYPEERQAYMLEDSGVQLLLSQSHLKLPLAQGVQRIDLDQADAWLENHAENNPGIELNGENLAYVIYTSGSTGKPKGAGNRHSALSNRLCWMQQAYGLGVGDTVLQKTPFSFDVSVWEFFWPLMSGARLVVAAPGDHRDPAKLVALINREGVDTLHFVPSMLQAFLQDEDVVSCTSLKRIVCSGEALSADAQQQVFAKLPQAGLYNLYGPTEAAIDVTHWSCVEEGKDAVPIGRPIANLGCYILDGDLEPVPVGVLGELYLAGRGLARGYHQRPGLTAERFVASPFVAGERMYRTGDLARYRADGVIEYAGRIDHQVKLRGLRIELGEIEARLLEHPWVREAAVLAVDSRQLVGYVVLESEGGDWREALAAHLATSLPEYMVPAQWLALERMPLSPNGKLDRKALPRPQAAAGQTHVAPQNEMERRIAAVWADVLKLEEVGATDNFFALGGDSIVSIQVVSRCRAAGIQFTPKDLFQQQTVQGLARVARVGAAVQMEQGPVSGETVLLPFQRLFFEQPIPNRQHWNQSLLLKPREALNAKALEAALQALVEHHDALRLRFHETDGTWHAEHAEATLGGALLWRAEAVDRQALESLCEESQRSLDLADGPLLRSLLVDMADGGQRLLLVIHHLVVDGVSWRILLEDLQRAYQQSLRGEAPRLPGKTSPFKAWAGRVSEHARGESMKAQLQFWRELLEGAPAELPCEHPQGALEQRFATSVQSRFDRSLTERLLKQAPAAYRTQVNDLLLTALARVVCRWSGASSSLVQLEGHGREELFADIDLSRTVGWFTSLFPVRLSPVADLGESLKAIKEQLRAIPDKGLGYGLLRYLAGEESARVLAGLPQARITFNYLGQFDAQFDEMALLDPAGESAGAEMDPGAPLDNWLSLNGRVFDGELSIDWSFSSQMFGEDQVRRLADDYVAELTALVDFCCDSPRHGATPSDFPLAGLDQARLDALPVALEEVEDIYPLSPMQQGMLFHSLYEQASSDYINQMRVDVSGLDLPRFRAAWQSALDRHAILRSGFAWQGELQQPLQIVYRQRQLPFAEEDLSQAANRDAALLALAAAERERGFELQRAPLLRLLLVKTAEGEHHLIYTHHHILLDGWSNAQLLSEVLESYAGRSPEQLRDGRYSDYIAWLQRQDAAATEAFWREQMAALDEPTRLVEALAQPGLTSANGVGEHLREVDATATARLRDFARRHQVTLNTLVQAGWALLLQRYTGQHTVVFGATVSGRPADLPGVENQVGLFINTLPVVVTLAPQMTLDELLQGLQRQNLALREQEHTPLFELQRWAGFGGEAVFDNLLVFENYPVDEVLERSSAGGVRFGAVAMHEQTNYPLALALGGGDSLSLQFSYDRGLFPAATIERLGRHLTTLLEAFAEHPQRRLVDLQMLEKAELSAIGAIWNRSDSGYPATPLVHQRVAERARMAPDAVAVIFDEEKLTYAELDSRANRLAHALIARGVGPEVRVAIAMQRSAEIMVAFLAVLKAGGAYVPLDIEYPRERLLYMMQDSRAHLLLTHSHLLERLPIPEGLSCLSVDREEEWAGFPAHDPEVALHGDNLAYVIYTSGSTGMPKGVAVSHGPLIAHIVATGERYEMTPEDCELHFMSFAFDGSHEGWMHPLINGARVLIRDDSLWLPERTYAEMHRHGVTVGVFPPVYLQQLAEHAERDGNPPPVRVYCFGGDAVAQASYDLAWRALKPKYLFNGYGPTETVVTPLLWKARAGDACGAAYMPIGTLLGNRSGYILDGQLNLLPVGVAGELYLGGEGVARGYLERPALTAERFVPDPFGAPGSRLYRSGDLTRGRADGVVDYLGRVDHQVKIRGFRIELGEIEARLREHPSVREAVVVAQPGAVGQQLVGYVVAQAPAVADSPEAQAECRAQLKTALRERLPEYMVPSHLLFLARMPLTPNGKLDRKGLPQPDASLLQQVYVAPRSDLEQQVAGIWAEVLQLQQVGLDDNFFELGGHSLLAIQVTARMQSEVGVELPLAALFQTESLQAYAELAAAQTSSNDTDFDDLREFMSELEAI

SEQ ID NO: 43634 - protein, 683 aa, Pseudomonas aeruginosa
MQQGMLFHSLYEQASSDYINQMRVDVSGLDLPRFRAAWQSALDRHAILRSGFAWQGELQQPLQIVYRQRQLPFAEEDLSQAANRDAALLALAAAERERGFELQRAPLLRLLLVKTAEGEHHLIYTHHHILLDGWSNAQLLSEVLESYAGRSPEQLRDGRYSDYIAWLQRQDAAATEAFWREQMAALDEPTRLVEALAQPGLTSANGVGEHLREVDATATARLRDFARRHQVTLNTLVQAGWALLLQRYTGQHTVVFGATVSGRPADLPGVENQVGLFINTLPVVVTLAPQMTLDELLQGLQRQNLALREQEHTPLFELQRWAGFGGEAVFDNLLVFENYPVDEVLERSSAGGVRFGAVAMHEQTNYPLALALGGGDSLSLQFSYDRGLFPAATIERLGRHLTTLLEAFAEHPQRRLVDLQMLEKAELSAIGAIWNRSDSGYPATPLVHQRVAERARMAPDAVAVIFDEEKLTYAELDSRANRLAHALIARGVGPEVRVAIAMQRSAEIMVAFLAVLKAGGAYVPLDIEYPRERLLYMMQDSRAHLLLTHSHLLERLPIPEGLSCLSVDREEEWAGFPAHDPEVALHGDNLAYVIYTSGSTGMPKGVAVSHGPLIAHIVATGERYEMTPEDCELHFMSFAFDGSHEGWMHPLINGARVLIRDDSLWLPERTYAEMHRHGVTVGV

SEQ ID NO: 43635 - protein, 289 aa, Pseudomonas aeruginosa
MKRWNFSNVMLIVGLLFIYLPMLILVIYSFNASKLVTVWGGWSVKWYVGLLDNTQLVSSVGRSLEIAFYTAFSSVFLGTLAAFVLTRIPRFRGRTLFGGMVTAPLVMPEVITGLSLLLLFVAMAQLIGWPQERGIVTIWIAHTSFCSSYVAVVVSARLRELDLSIEEAAMDLGAKPWKVFLLITIPMIAPSLAAGGMMSFALSLDDLVLASFVSGPGSTTLPMEVFSAVRLGVKPEINAVASLILLSVSLFTFFAWYFTRQAEERRRRAIQQAMEETATDWQKGSPTPA

SEQ ID NO: 43636 - protein, 487 aa, Pseudomonas aeruginosa
MVQEAPRNSRDRAQLFAVGIQRAIRSLCGPLIRASQLYCPVPEGLWLELHQLYQLASQRGVHRLAVRDELAKHTPGLSVEQAYLIPLLLGCARCNQMRQNNIARLAEVLEPWSQLLSIQSATLPGSLFIAVPQIDGPPRYRSLYPETQLASALGIDTQPLVELIREYLLQPEAERAKARLPLIEGVTLDLLQHLSSAWGDIAERTFQRTQGQGQLTLCIGMSALHYFLAGRRPFNEVLQIQEAPEAPRFKADVQDAWAGAFDAQKVTDWQPGMPLEEIEYRPHQSPRSVQPGHPQAHAQADATEDYPTYALPIVNHSPGGYCLSWPKEVPAQLQAGELVGLQDLPGQAWSIAVVRWIRQVRNGGTQMGIEMIAPAAQPCGLQLLRKTEQSSHYLRALLLPAIAAISRPATVITPRLPFQEGSRVQINLHGEERRAVLNRRQASTGSFSQFEYRSAEPVNTPSDKPVTAPVARPPAGEEDFDSLWKSL

SEQ ID NO: 43637 - protein, 830 aa, Pseudomonas aeruginosa
MPELLAHYPFTDTAYHELLDRQGGVRPHWQRLFRQLERSSPEQLRQRQALVERQIQENGVTYNVYADPKGTDRPWALDLLPNLLSAAEWQPIAAGVAQRARLLNALLADLYGDQRLLAEGLLPSELVFGHPNFLWPALGIRPPGGIFLHSYAVDLARDADGRWQVLADRTQAPSGAGYALENRQIVSRALPELYRDLRVQHLAGYFRTLQETLASQAAGDGETPLVVLLTPGRFNETYFEHLYLARQLGFPLVEGHDLTVRDATLYLKTLGGLKRVHAVLRRLDDDFCDPLELRTDSALGIPGLLEAVRQGRVLVANALGSGVLESPGLLGFLPQACRRLLGEELALPSLDTRWCGEPQALEAILAALPDLVIKPAFPGQRCEPLFGHALDSAGLASLGERLRERPQAYVAQRLAQLSQAPVWRDGKAGVGLQSRAIGMRVFAVAASDGRYWVMPGGLTRVASAADAEVVSMQRGGASKDTWVLAERAVGGEPLRPRRLGVRDLVREDPYLPSRVVENLFWYGRYAERCDDHARLLRVVLSRYVDADGDEEALRSALALAGGIGLLPGDGEPLERCLLRALLDEHWPASLCANLRRLHWAAAQVRGRLSGENWLALLELQRDMQALDPARTDLGEALDFLNRLVMSLAALSGFALDDMTRDDGWRFLMIGRRIERVRFFAESIAAFLGSAWDAGALEWLLELGNSGITYRSRYLASPQLVPVLDLLLLHEQNPHSLRFQLQALERSLERLHEEFGAPRERELRTLGERLRSFDLAALESPLFGAAGLDEVLVGLARLLRDIAACAGQVSDRLGLRYFAHVDDVSQRTVST

SEQ ID NO: 43638 - protein, 234 aa, Pseudomonas aeruginosa
MLRSSRRLLVRPVNSSRMVGFPVLGVGRRGPSYASAPRRPSRRRGERNRAVLVLCGPRITSGDARVKRALALLSLFALPVLAAEPNLYGRYEWVSLPELDRTLQAKMDTGAYTSSLSAKDIELFQRDGEEWVRFRLATKEADGSVFEHKLARIGKIKNRADNRSGEDEDEDRLSERPVIDLQVCLGGAMKTIEVNLTDRSAFNYPFLMGTKGLRKFHVAVDPSERFVADKPTCK

SEQ ID NO: 43639 - protein, 329 aa, Pseudomonas aeruginosa
MPASLPLSAAETVAPPSPRTLIIDTDPGADDVIALLFAMASPKELKIQALTTVAGNVPLEKTARNARLAREWGKRPDIPVYAGAPRPLLRTPIYAADVHGSEGISGVEVHEPKQPLAEGNAVDYLIRTLRAAPEKSVTLAMLGPETNLALALTQAPDIVKGVREIVIMGGAHFNGGNITPAAEFNIFADPHAAEIVLKSGAPITMLPLDVTHKILTSPERIAKLRNLGNQAGKTVADILDAYVQYDIKYYGLKGGPVHDATVVAYLLKPSLFKGKRINVQVDSREGITFGQTVADWYGGLKQPANVEWINEGDAQGFFDLLTERIARLP

SEQ ID NO: 43640 - protein, 153 aa, Pseudomonas aeruginosa
MAHLVWQDDLNTGIQVIDNQHKRIVEMINHLHDAQQGKEHAAIAEVIEELVDYTLSHFAFEETLMEDAGYQFSRAHKKIHELFIRRVSEYRVRFQAGEDVGDELKGLLSRWLFNHIRNDDAGYVDAVRHSMSELVKDKSEGGWLSRSMKRFFG

SEQ ID NO: 43641 - protein, 324 aa, Pseudomonas aeruginosa
MGQLIDGRWHDQWYDTQKDGRFQRENAQRRHWLGEPAFPAEGGRYHLYVSLACPWAHRTLIVRKLKGLESLVDVSVVSWLMRENGWTFDPAHGSTGDRLDGLAFLHQRYTRDDPHYSGRVTVPLLWDKQAQKIVNNESADIVRIFNSAFDAIGANALDFYPEPLREEIERLNGRIYPAVNNGVYRAGFATRQDAYEEAFVQLFEELDYLEGLLGERRYLAGEYLTEADIRLFTTLVRFDAVYHGHFKCNLRRIEDYPNLSGWLRELYQRPGIGETVDFEHIKGHYYASHRTINPTGIVPLGPRLDLARAPGRERLPGKGIWGEG

SEQ ID NO: 43642 - protein, 421 aa, Pseudomonas aeruginosa
MTQTLSLRAVLCATTLVSPFLAQAATESEVEALKKELLELRQRYEAQQNALMVLEQRVRQVEAQPQAPQPQRLVKSIQPPAQARNDANAVAGTYGASLKDDGAPAPSVENIYQDASGFFGGGTFSLETGLTYSHYDTRQLFLNGFLALDSIFLGNIGVDQIDADIWTLDLTGRYNWNQRWQVDINAPVVYRESTYQSAGAGGSTSQITEKSVTGDPRLGDVSFGVAYKFLDESESTPDAVVSLRVKAPTGKDPYGIKLKQVPGNNNLNVPDDLPTGNGVWSITPGISLVKTVDPAVLFGSLSYTYNFEESFDDINPQQGVKTGGKVKLGNWFQLGVGVAFALNEKMSMSFSFSELISQKSKVKQDGQSWQTVSGSDANAGYFGLGMTYAVSNRFSIVPSLSIGITPDAPDFTFGVKFPYYF

SEQ ID NO: 43643 - protein, 375 aa, Pseudomonas aeruginosa
MRQRFWQGTFKTLGFLGLTAGLAAQAAEPSGKALSAAAGVPWPAVIAHRGASYDAPEETAAAYLLARDLGADYLEADVQRSRDGVLVALHDDTLERTTDVAEVFPERAKDPVSSFTLAELKRLDAGSWFNRAFPQRARPGFVGLRILTLDEMLDIAEGGANKPGLYLETKVPAQFPGIEDDLRKLLERRGWLQPRERAAAGHVDVAHGNGRVILQTFEKSSLELLQESMPQVPKILLLWLGDGYLEARSPVTFKESGETDKAAFYARQEVKSEAEFGAWLDWAKAHGALGTGPSATLSERGEQSYADLVKPWMNRMTHARGLFIHAYSVDSAEDFKALGAAGVDGFFTNRTSELLKFQGRPAAQDMDALLRRHGY

SEQ ID NO: 43644 - protein, 381 aa, Pseudomonas aeruginosa
MKMLKRFIVKKNERGLLYSEGDFLAVLEPGTYRRFDPYDRLSLESFSLNTPQFEHRLAGYLRQSEPQLVERYFTRMDLGDNEAGLRYEDGVLVELLAPGSRRLYWKGQTEQRLERIDLTQDYRLSAALVAQLHQPNLRDRALAGLDAVLLVQVPAFQVGVLKVDGALAGLLQAGQYGFWRYNRQVSVELVDTRIQALEVSGQEILTRDKVSLRLNLAANWRYSDVLTAFSRLSKPLEYLYRELQFGLRAAVGTRTLDELLENKQSIDEAVSAHLAAKLEDNGLEVSGLGVRDIILPGEMKTLLAQVVEAEKAAQANVIRRREETSATRSLLNTAKVMEENPTALRLKELETLERVAERIDRISVFGGLDQVLNGLVTLKQA

SEQ ID NO: 43645 - protein, 231 aa, Pseudomonas aeruginosa
MSSAEVLASVDIVALRLNPGHGLELLLIRRAQAPFAGQWALPGVLVNGRSADHSLDDAAVRALRDKARLEPAYIEQVATVGNAVRDPRGWSLSVFYLVLVGPDTQVEDDDLDFVPLRDVRSERFALPFDHAQLVQQACERLASKSVYSALPLFLLAPRFTVAEALKAFECAIGQEVQHSSLRGRLERMKEAGWVEDTGERQRPPMGRPQHVLHFTPKPGGAFVFDRSLLAS

SEQ ID NO: 43646 - protein, 741 aa, Pseudomonas aeruginosa
MALAQQTRLVRVDSPLGAEVLQLQRMEGREELGRPFAYELELISENPDLPLDGLLGKPASLALELHDGSRRHFHGIVAACSQGSGNGQFASYQVTLRPWLWLLTRTSDCRIFQNQKVPDIIKQVFRDLGFSDFEDALSRSYREWEYCVQYRETSFDFVSRLMEQEGIYYWFRHEQSRHILVLSDAYGAHQSPPNYASVPYYPPTLEQRERDHFYDWHMAREVQSGSLSLNDYDFQRPGARLEVRSNIARSHAAADYPLYDYPGEYVQSQDGEQYARTRIEALQARYERVRLRGRARGLGSGHLFKLSGYPREDQNREYLVVGAEYRVVQELYETGGGGVGAQFESELDCIDAGQAYRPLPTTPLPIVRGPQTAVVVGPKGEEIWTDQYGRVKVHFHWDRHDQSNENSSCWIRVSQAWAGKNWGSMQIPRIGQEVIVSFLEGDPDRPIITGRVYNAEQTVPYELPANATQSGMKSRSSKGGTPANFNEIRMEDKKGAEQLFIHAEKNQDIEVENDETHWVGHDRTKTIDHDETVHVKHDRTETVDNNETITIGVDRTEKVGNNEKISIGANRTEDVGSNETISIGVDRTEKVGSNEKISIGANRTEDVGNDETISIGANRSESVGNNETISIGADRSESVGANETIDIGGNQSTSIGKNESRSVGQGRDTSVGKDDSLDVGKSFTLNAGDSITLVTGAASIRMKKDGSIVISGKNITIDGSGAINVKADKNVVVKGRKILQN

SEQ ID NO: 43647 - protein, 643 aa, Pseudomonas aeruginosa
MQLTRLVQVDCPLGPDVLLLQRMEGREELGRLFAYELHLVSENPNLPLEQLLGKPMSLSLELPGGSRRFFHGIVARCSQVAGHGQFAGYQATLRPWPWLLTRTSDCRIFQNQSVPEIIKQVFRNLGFSDFEDALTRPYREWEYCVQYRETSFDFISRLMEQEGIYYWFRHEQKRHILVLSDAYGAHRSPGGYASVPYYPPTLGHRERDHFFDWQMAREVQPGSLTLNDYDFQRPGARLEVRSNIARPHAAADYPLYDYPGEYVQSQDGEQYARNRIEAIQAQHERVRLRGVVRGIGAGHLFRLSGYPRDDQNREYLVVGAEYRVVQELYETGSGGAGSQFESELDCIDASQSFRLLPQTPVPVVRGPQTAVVVGPKGEEIWTDQYGRVKVHFHWDRHDQSNENSSCWIRVSQAWAGKNWGSMQIPRIGQEVIVSFLEGDPDRPIITGRVYNAEQTVPYELPANATQSGMKSRSSKGGTPANFNEIRMEDKKGAEQLYIHAERNQDNLVENDASLSVGHDRNKSIGHDELARIGNNRTRAVKLNDTLLVGGAKSDSVTGTYLIEAGAQIRLVCGKSVVEFNADGTINISGSAFNLYASGNGNIDTGGRLDLNSGGASEVDAKGKGVQGTIDGQVQAMFPPPAKG

SEQ ID NO: 43648 - protein, 726 aa, Pseudomonas aeruginosa
MAIGQPFATALGCTIIWRAAGALFGPPAAGDYQGRFPMLFSQHTRLVHVDSPLGPEVLQLQRLEGREELGRLFSHELELVSSNPALPLDALLGKPMSLALELPGGSRRYFHGIVARCSQGAGAGQFASYQVTLRPWLWLLTRTSDCRIFQNQKVPDIIKQVFRDLGFSDFEDALSRSYREWEYCVQYRETSFDFVSRLMEQEGIYYWFRHEKKRHILVLSDAYGAHHSPAGYTSVPYYPPSLGHRERDHFFDWHMAREVQPGSLSLNDYDFQRPGTRLEVRSNVGRAHAAADYPLYDYPGEYVQSQDGEHYARTRIEAIQTQYERVRLRGCARGIGAGHLFHLSNYPRLDQNREYLVVGAEYRVVQELYETGNGGGGAQFESELDCIDAGQAFRPLPSTPVPVVRGPQTAVVVGPKGEEIWTDQYGRVKVHFHWDRHDQSNENSSCWMRVSQAWAGKNWGSIQIPRIGQEVIVSFLEGDPDRPIITGRVYNAEQTVPYELPANATQSGTKSRSSKGGTPANFNEIRMEDKKGAEQLFIHAERNQDIEVENDESHWVGHDRTKTIDHDETVHVKHDRTETVDNNETITVHANRSKTVDRNETVRIGMNKTETILMASLQNVGMGRMENVGLGYSLNVGMMMNTVVGLNQSTQVMKKKTLSVGDSYEVSVGGSDDGSKITLDGQSITLGSQRIELTADREILLRCGQSTIRLTPGEIEILSPNVDINC

SEQ ID NO: 43649 - protein, 424 aa, Pseudomonas aeruginosa
MQSQDGEHYARTRIEAIQTQYERVRLRGCARGIGAGHLFHLSNYPRLDQNREYLVVGAEYRVVQELYETGNGGGGAQFESELDCIDAGQAFRPLPSTPVPVVRGPQTAVVVGPKGEEIWTDQYGRVKVHFHWDRHDQSNENSSCWMRVSQAWAGKNWGSIQIPRIGQEVIVSFLEGDPDRPIITGRVYNAEQTVPYELPANATQSGTKSRSSKGGTPANFNEIRMEDKKGAEQLFIHAERNQDIEVENDESHWVGHDRTKTIDHDETVHVKHDRTETVDNNETITVHANRSKTVDRNETVRIGMNKTETILMASLQNVGMGRMENVGLGYSLNVGMMMNTVVGLNQSTQVMKKKTLSVGDSYEVSVGGSDDGSKITLDGQSITLGSQRIELTADREILLRCGQSTIRLTPGEIEILSPNVDINC

SEQ ID NO: 43650 - protein, 309 aa, Pseudomonas aeruginosa
MSRLMTYRTLLACLLAALLALLVAGQQQRAFERIWFKLEQRYGGDVARENALRLADYRVDIEARVLGAESNVSALSFDPSRRSLVSVTNQDPHFLELSLDGELLRRIPLRGFQDPEAIEYIRPGVYVVAEERRQRLVEIHVDADTRVIDIDDPRNARKFSLGSANKRNKGFEGLAYDPLRERLFVAREKAPVGIIEVNGFFNDRGEALDLSVGGDPQRDRGLFLTDLSSLYYDKASDHLLVLSDESRVVIELDRAGDPLGSLTLRGGNHGLTDDVPQAEGLAMDDRGSLYVVSEPNLFYRFSRALPAAD

SEQ ID NO: 43651 - protein, 2448 aa, Pseudomonas aeruginosa
MQALIEKVGSLSPQERKALAVLLKQQGVNLFEIAPVFKRQDGEPLRLSYAQERQWFLWQLEPESAAYHIPSVLRLRGRLDLDALQRSFDSLVARHETLRTRFRLDGDEARQEIAASMALPLDIVALGPLEEGALARQVETTIARPFDLERGPLLRVSLLRLAEDDHVLVLVQHHIVSDGWSMQVMVEELVQLYAAYSRGLEVALPALPIQYADYALWQRSWMEAGEKERQLAYWTGLLGGEQPVLELPFDRPRPVRQSHRGAQFILELDIDLSQALRRVAQQEGATAFALLLASFQALLYRYSGQADIRVGVPIANRNRVETERLIGFFVNTQVLKADLDGRMGFDELLAQARQRALEAQAHQDLPFEQLVEALQPERSLSHNPLFQVLFNYQSEARGNGQAFRFDELQMESVQFDSRTAQFDLTLDLTDEEQRFCAVFDYATDLFDASTVERLAGHWRNLLRGIVANPRQRLGELPLLDAPERRQTLSEWNPAQRECAVQGTLQQRFEEQARQRPQAVALILDEQRLSYGELNARANRLAHCLIARGVGADVPVGLALERSLDMLVGLLAILKAGGAYLPLDPAAPEERLAHILDDSGVRLLLTQGHLLERLPRQAGVEVLAIDGLVLDGYAESDPLPTLSADNLAYVIYTSGSTGKPKGTLLTHRNALRLFSATEAWFGFDERDVWTLFHSYAFDFSVWEIFGALLYGGCLVIVPQWVSRSPEDFYRLLCREGVTVLNQTPSAFKQLMAVACSADMATQQPALRYVIFGGEALDLQSLRPWFQRFGDRQPQLVNMYGITETTVHVTYRPVSEADLEGGLVSPIGGTIPDLSWYILDRDLNPVPRGAVGELYIGRAGLARGYLRRPGLSATRFVPNPFPGGAGERLYRTGDLARFQADGNIEYIGRIDHQVKVRGFRIELGEIEAALAGLAGVRDAVVLAHDGVGGTQLVGYVVADSAEDAERLRESLRESLKRHLPDYMVPAHLMLLERMPLTVNGKLDRQALPQPDASLSQQAYRAPGSELEQRIAAIWSEILGVERVGLDDNFFELGGHSLLATRVISRVRQEQQLDASLKALFERPVLEAFAQGLERTTDAVSTIPLADRQQPLALSFAQERQWFLWQLEPESAAYHIPSALRLRGRLDVDALQRSFDSLVARHETLRTRFRLEGGRSYQQVQPAVSVSIEREQFGEEGLIERIQAIVVQPFDLERGPLLRVNLLQLAEDDHVLVLVQHHIVSDGWSMQVMVEELVQLYAAYSQGLDVVLPALPIQYADYALWQRSWMEAGEKERQLAYWTGLLGGEQPVLELPFDRPRPARQSHRGAQLGFELSRELVEAVRALAQREGASSFMLLLASFQALLYRYSGQADIRVGVPIANRNRVETERLIGFFVNTQVLKADLDGRMGFDELLAQARQRALEAQAHQDLPFEQLVEALQPERNASHNPLFQVLFNHQSEIRSVTPEVQLEDLRLEGLAWDGQTAQFDLTLDIQEDENGIWASFDYATDLFDASTVERLAGHWRNLLRGIVANPRQRLGELPLLDAPERRQTLSEWNPAQRECAVQGTLQQRFEEQARQRPQAVALILDEQRLSYGELNARANRLAHCLIARGVGADVPVGLALERSLDMLVGLLAILKAGGAYLPLDPAAPEERLAHILDDSGVRLLLTQGHLLERLPRQAGVEVLAIDGLVLDGYAESDPLPTLSADNLAYVIYTSGSTGKPKGTLLTHRNALRLFSATEAWFGFDERDVWTLFHSYAFDFSVWEIFGALLYGGRLVIVPQWVSRSPEDFYRLLCREGVTVLNQTPSAFKQLMAVACSADMATQQPALRYVIFGGEALDLQSLRPWFQRFGDRQPQLVNMYGITETTVHVTYRPVSEADLKGGLVSPIGGTIPDLSWYILDRDLNPVPRGAVGELYIGRAGLARGYLRRPGLSATRFVPNPFPGGAGERLYRTGDLARFQADGNIEYIGRIDHQVKVRGFRIELGEIEAALAGLAGVRDAVVLAHDGVGGTQLVGYVVADSAEDAERLRESLRESLKRHLPDYMVPAHLMLLERMPLTVNGKLDRQALPQPDASLSQQAYRAPGSELEQRIAAIWAEILGVERVGLDDNFFELGGHSLLLLMLKERIGDTCQATLSISQLMTHASVAEQAACIEGQARESLLVPLNGRREGSPLFMFHPSFGSVHCYKTLAMALRDRHPVKGVVCRALLGAGREVPEWDDMVAEYAEQLLQEHPEGVFNLAGWSLGGNLAMDVAARLEQRGRQVAFVGWIDAPAPVRVEAFWNEIGPTPEAVPNLSVGEMRVELLGVMFPERAEHIERAWSSICSATTDDEQRWTRMSDWAEAEIGAEFATLRSEIAQSNELEVSWELKQILDERLKAMDYPRLTAKVSLWWAARSTNAIQRSAVERSMAEAIGAERVEPVRVLDTRHDKIIDHPEFVQSFRAALERAGR

SEQ ID NO: 43652 - protein, 375 aa, Pseudomonas aeruginosa
MQIRADFDSGNIQVIDASDPRRIRLAIRPDLASQHFQWFHFKVEGMAPATEHCFTLVNAGQSAYSHAWSGYQAVASYDGERWFRVPSQYDADGLHFQLEPEESEVRFAYFEPYSRERHARLVERALGIEGVERLAVGTSVQGRDIELLRVRRHPDSHLKLWVIAQQHPGEHMAEWFMEGLIERLQRPDDTEMQRLLEKADLYLVPNMNPDGAFHGNLRTNAAGQDLNRAWLEPSAERSPEVWFVQQEMKRHGVDLFLDIHGDEEIPHVFAAGCEGNPGYTPRLERLEQRFREELMARGEFQIRHGYPRSAPGQANLALACNFVGQTYDCLAFTIEMPFKDHDDNPEPGTGWSGARSKRLGQDVLSTLAVLVDELR

SEQ ID NO: 43653 - protein, 690 aa, Pseudomonas aeruginosa
MNAQTQASKNALHKSLERRHNASTSLAALWRPALLQAFVKLDPRQLLRSPVMLVVELTAVLTTLLCFVPDQAVPTSVALQIALWLWFTVLFANFAEALAEGRGKARADSLKAGSQGLSANKRRADGSFESVVASSLRKGDVVRVQAGEMIPGDGEVIEGVAAVNEAAITGESAPVIRESGGDRSAVTGNTQVVSDWLLVRIGANPGESTLDRMIALVEGAKRQKTPNEVALDILLIGLTLIFLLVVVTLKPFALFAGGNLPLVFLVALLVTLIPTTIGGLLSAIGIAGMDRLVRLNVIAKSGRAVEAAGDVHVLLLDKTGTITFGNRRCSALYAAPGVSGKELAEGALLASLADDTPEGKSIVEYLRILHPIEEPRREELTPIAFSAETRLSGVDWNGQVYRKGAVDAALRFIDLPREKMPEVLSREVDKIAQSGGTPLLVVANGRLLGAIHLKDVVKPGIRERFAELRRLGIRTVMVTGDNPLTAAAIAAEAGVDDVIAEATPEKKLARIRQEQGEGRLVAMCGDGANDAPALAQADVGMAMNDGTQAAREAANLVDLDSDPTKLLDVVQVGKELLVTRGALTTFSIANDVAKYFAILPALFVGIYPQLDVLNVMRLQSPQSAILSAIVFNALIIVALIPLALRGVRVQAADASQLLQRNLLIYGVGGLVAPFLGIKAIDLLLTAVGLA

SEQ ID NO: 43654 - protein, 1046 aa, Pseudomonas aeruginosa
MSKFFIDRPIFAWVIALVIMLAGGLSILSLPVNQYPAIAPPAIAVQVSYPGASAETVQDTVVQVIEQQMNGIDNLRYISSESNSDGSMTITVTFEQGTDPDIAQVQVQNKLQLATPLLPQEVQRQGIRVTKAVKNFLMVVGVVSTDGSMTKEDLSNYIVSNIQDPLSRTKGVGDFQVFGSQYSMRIWLDPAKLNSYQLTPGDVSSAIQAQNVQISSGQLGGLPAVKGQQLNATIIGKTRLQTAEQFENILLKVNPDGSQVRLKDVADVGLGGQDYSINAQFNGSPASGIAIKLATGANALDTAKAIRQTIANLEPFMPQGMKVVYPYDTTPVVSASIHEVVKTLGEAILLVFLVMYLFLQNFRATLIPTIAVPVVLLGTFGVLAAFGFSINTLTMFGMVLAIGLLVDDAIVVVENVERVMAEEGLSPREAARKSMGQIQGALVGIAMVLSAVFLPMAFFGGSTGVIYRQFSITIVSAMALSVIVALILTPALCATMLKPIEKGDHGEHKGGFFGWFNRMFLSTTHGYERGVASILKHRAPYLLIYVVIVAGMIWMFTRIPTAFLPDEDQGVLFAQVQTPPGSSAERTQVVVDSMREYLLEKESSSVSSVFTVTGFNFAGRGQSSGMAFIMLKPWEERPGGENSVFELAKRAQMHFFSFKDAMVFAFAPPSVLELGNATGFDLFLQDQAGVGHEVLLQARNKFLMLAAQNPALQRVRPNGMSDEPQYKLEIDDEKASALGVSLADINSTVSIAWGSSYVNDFIDRGRVKRVYLQGRPDARMNPDDLSKWYVRNDKGEMVPFNAFATGKWEYGSPKLERYNGVPAMEILGEPAPGLSSGDAMAAVEEIVKQLPKGVGYSWTGLSYEERLSGSQAPALYALSLLVVFLCLAALYESWSIPFSVMLVVPLGVIGALLATSMRGLSNDVFFQVGLLTTIGLSAKNAILIVEFAKELHEQGKGIVEAAIEACRMRLRPIVMTSLAFILGVVPLAISTGAGSGSQHAIGTGVIGGMVTATVLAIFWVPLFYVAVSTLFKDEASKQQASVEKGQ

SEQ ID NO: 43655 - protein, 600 aa, Pseudomonas aeruginosa
MKRTLYSGVGLLLVGLLFLAFNLLSSLLLRDQQFDLTQQKLYTFSAGTQEVLDSLDEPLNLYLFFSKSRASDLPALRNYARRVEEVLDLYARRSHGNVRLFVIDPLPFSDDEDRAARFGLQAPPIGPNGEAIYFGLAATNPTDGLQVIPFFSPEEEPLLEYDLSRLVQALAQRERTVVGLMSSLPMTGQAPTDGQPGSRPWAMMDKLYQQFDIRTLGLASTEIPAEVSVLMLVHPRQLSEQTQYAIDQFVLRGGKLLAFVDPLSLADADGGKSSDLAPLLRSWGVQLRPDTLLADASFAMIKPNAERRPERNPTWLHLPGDTFPHDNVLTTGLESLNLASVGLLEPLGGASTRFIPLLHSSAHSMPLSLERFRQSSTEQLNATLVPTGERYVLAAKVEGPATSAFPADRGKQGEGLSDSANIHVLLVADTDLLSNPLWLQEQPGHNEPQVWADNDLFVGNALDYLSGSDALIDLRSRGHTKRPFTRVEALRREAGLRAQEQLNALQQSLNDTDRNLRTLQQSMDAGDQEVTPEMEATLRRFIDDKLRIRQQLRQLQFQLNADVERLGEQVKLANTVLLPALLTLFLLLHWSWRSMRRRRG

SEQ ID NO: 43656 - protein, 535 aa, Pseudomonas aeruginosa
MAILHTQINPRSAEFAANAATMLEQVNALRTLLGRIHEGGGSAAQARHSARGKLLVRERINRLLDPGSPFLELSALAAHEVYGEEVAAAGIVAGIGRVEGVECMIVGNDATVKGGTYYPLTVKKHLRAQAIALENRLPCIYLVDSGGANLPRQDEVFPDREHFGRIFFNQANMSARGIPQIAVVMGSCTAGGAYVPAMSDETVMVREQATIFLAGPPLVKAATGEVVSAEELGGADVHCKVSGVADHYAEDDDHALAIARRCVANLNWRKQGQLQCRAPRAPLYPAEELYGVIPADSKQPYDVREVIARLVDGSEFDEFKALFGTTLVCGFAHLHGYPIAILANNGILFAEAAQKGAHFIELACQRGIPLLFLQNITGFMVGQKYEAGGIAKHGAKLVTAVACARVPKFTVLIGGSFGAGNYGMCGRAYDPRFLWMWPNARIGVMGGEQAAGVLAQVKREQAERAGQQLGVEEEAKIKAPILEQYEHQGHPYYSSARLWDDGVIDPAQTREVLALALSAALNAPIEPTAFGVFRM

SEQ ID NO: 43657 - protein, 532 aa, Pseudomonas aeruginosa
MCGILGYVGTGFSVSRFAGALRLLAHRGPFGEGIAALPNGAIGMTRLPMSGAAAVPLPPQEGQRRVAYNGEVYQAGCEIHGEIRLLLDGLQRGVLPDGMYALASWDPQTRQLTLLRDEFGIKPLYYSYQPERGLLAFASEPRALLHLLGGARADAEAIAQVVAAGVPLEGQTLFQQVRLLLPGEVLRFDLSQERPRLCQRQRLATAPASEVDSLDEQLGETLERCRQTFRPCALLVSGGVDSNLLGSYLDPQLQRFHLCLEGDEESLLPHPRLQRFELRQEAFMPLLRRAVGNFGGATRMSSLLMYQRLADGIGEQGYHCVLLGEGADELFWGYPRHLELWRRRDTPEPRRFAAAWFGEYRRKAALLAEPAGRRVAERIEELAHEALGQGLEAAIGQFDLHYSLEPLLRRADHLLMSRTIEARTPYLHGALAQRAGRLQRIVGDTAKAPLVALLEQREKRWQAQPKRHFRLPFERWPQALGEMRRHLAERLPALHDLGLEGLDAPSVAALPGDQLFTLTTLSLWQQEYGASL

SEQ ID NO: 43658 - protein, 428 aa, Pseudomonas aeruginosa
MLLDNSYRNLCLIYAVMRAGKHLVLIDPEWGEAAKQAIVDEMRLEALASEHPLEGALAGLRLALDFERSATRRLDRAAHSHMILFTSGTTGQPKGIELSQQAMLHAYRIGRDCLGIGEHTRSGCFYRISGLGILGINFLFPLLYGGSAVLLPLHCWADSEGFWECVERFGISFLYLVPPVVNHMVKEGSPPPRRLPLQRLLCVAGSARLDADLQAAFQRDYAALANIYGLSECGFAFLFGKRRGDAFDNSVGPAVGLELKLTDPDGRPLEGSGERGRLWVRTPSLFSGYVNRPDLTAQVLEDGWLNTQDLAYFDEDRCVHVLGRCDGTINKGGNLFHLNECERALNGLDEVIDVCCLKVDCPLYGEDYVAVIHTAPQVEFAFLPWLQQQLGTLRAPQRVVLSHQALPLNGAGKHDRRALAALLQREAS

SEQ ID NO: 43659 - protein, 240 aa, Pseudomonas aeruginosa
MCGILGYVGTGFSVSRFAGALRLLAHRGPFGEGIAALPNGAIGMTRLPMSGAAAVPLPPQEGQRRVAYNGEVYQAGCEIHGEIRLLLDGLQRGVLPDGMYALASWDPQTRQLTLLRDEFGIKPLYYSYQPERGLLAFASEPRALLHLLGGARADAEAIAQVVAAGVPLEGQTLFQQVRLLLPGEVLRFDLSQERPRLCQRQRLATAPASEVDSLDEQLGETLERCRQTFRPCALLVSGGV

SEQ ID NO: 43660 - protein, 455 aa, Pseudomonas aeruginosa
MFGSNDDKKAPQGGEKKGLFGWWRKKPQAGEQPADQPVEPVSETAAAEQRAPADDVAQSLTEQPGRQQPSAAEPAEPPAPVAEAPLAGDEPASAEEHSPRPEAPVAQPEPILAAEPEPEPEPEPEPEPEPVAPLAAAPAVSEPATRPGFFARLRQGLSKTSASIGEGMASLFLGRKEIDDDLLDDIETRLLTADVGVEATTLIVQNLTKRVARKELADSGALYKALQEELASLLRPVEQPLQVDVAREPYVILVVGVNGVGKTTTIGKLAKKLQLEGKKVMLAAGDTFRAAAVEQLQVWGERNRIPVIAQHTGADSASVIFDAVQAAKARGIDVLIADTAGRLHTKDNLMEELKKVRRVIGKLDETAPHEVLLVLDAGTGQNAINQAKQFNLAVELTGLALTKLDGTAKGGVIFALAKQFGLPIRYIGVGEGIDDLRTFEADAFVQALFAERENA

SEQ ID NO: 43661 - protein, 255 aa, Pseudomonas aeruginosa
MKGPEKKRAKIAIDPSSERQMVDLQRRLLLRGGLSLGALAMLSGCRLQDGDSVDKVLWAMSRWNDRVQAWLFSRTRLAPTFDPSQVASPFPFNAFYPAYNVPEIDLPEYRLQVSGRVRDKRPWSLEQLRRLPQASQVTQLICIEGWSAIGQWSGVPLRTFLELVGADTSAKYVGFKCADRYYSSLDMPSALHPQTLLALEMSGQALPEENGYPLRLRIPTKLGFKNAKHVVEIFVSNSNPGGYWEDQGYNWFSGV

SEQ ID NO: 43662 - protein, 251 aa, Pseudomonas aeruginosa
MTTRLPQLLLALLASAVSLAASADEVQVAVAANFTAPIQAIAKEFEKDTGHRLVAAYGATGQFYTQIKNGAPFQVFLSADDSTPAKLEQEGEVVPGSRFTYAIGTLALWSPKAGYVDAEGEVLKSGSFRHLSIANPKTAPYGLAATQAMDKLGLAATLGPKLVEGQNISQAYQFVSSGNAELGFVALSQIYKDGKVATGSAWIVPTELHDPIRQDAVILNKGKDNAAAKALVDYLKGAKAAALIKSYGYEL

SEQ ID NO: 43663 - protein, 259 aa, Pseudomonas aeruginosa
MKHARIRYQGRVHQVTVEDANAVRLADGTLLAEDRVEWLPPATGSMFALGLNYADHAAELSFKAPSEPLAFLKSPGTYTGHRQVSWRPDNVDYMHYECELVAVIGKPARNVRREDALGYLAGYTVCNDYAIRDYLENYYRPNLRVKNRDATTPVGPWIVDAAEVPEPNRLTLRTWVNGELRQEGSTADMIFDIPYLIEYFSSFMTLQPGDMIATGTPEGLSDVVPGDEVVVEVEGVGRLVNRIVSEAEFFRARAQEHAE

SEQ ID NO: 43664 - protein, 275 aa, Pseudomonas aeruginosa
MDKPASRHFSVLIIDDEPQVTSELRELLENSGYRCVTSTHRESAIASFQADPNIGLVICDLYLGQDNGIRLIESLKEVAGNGRFFESIILTGHDGRQEVIEAMRVGAADYYQKPVAPQELLHGLERLESRLHERVRSQLSLSHVNQRLEYLAESLNSIYRDIHKIKYEVHGNSQPSALRSEDSQPSAPPAPVAESQVSPSNPLFGKLSPRQQAVARLVSKGLTNYQIAYELGITENTVKLYVSQVLRLMHMHNRTQLALALSPAAMQQGSGAVVH

SEQ ID NO: 43665 - protein, 160 aa, Pseudomonas aeruginosa
MEQLALALWASVCGYQDIKRLRVSNWLILGGFLISFVYLYVKESSLTGATVNMAMTALFIGVCLSLPGYLLGRLGAADVKYLAALGLASDPLTVLYSLAFGCLLCIALFILVKLFKRSVEKSAMNEEVRLRRAPSKNKSFPFIFAMGAGLLAHLIINKII

SEQ ID NO: 43666 - protein, 607 aa, Pseudomonas aeruginosa
MSNTIQAKKTGVTDTILRDAHQSLLATRMRTEDMLPICDKLDRVGYWSLEVWGGATFDACVRFLKEDPWERLRKLKAALPNTRLQMLLRGQNLLGYRHYSDDVVRAFVAKAAVNGIDVFRIFDAMNDVRNLRVSIEAVKAAGKHAQGTICYTTSPVHTIEAFVAQGKAMADMGVDSIAIKDMAGLLTPYATGDLVKALKDALPLDVVVHSHDTAGVASMCQLKAVENGADRIDTAISSMAWGTSHPGTESMVAALRGTPYDTGLDLELIQEIGMYFHAVRKKYHQFESEFTGVDTRVQVNQVPGGMISNLANQLKEQGALNRMGEVLEEIPRVRADLGFPPLVTPTSQIVGTQAFFNVLAGERYKTITNEVKLYLQGRYGKAPGEVNEQLRRQAIGSEEVIDVRPADLIKPELNKLRSEIGNLAKSEEDVLTYAMFPDIGRKFLEEREAGTLKPEELLPIPTGKGVAAAGAEGTPTEFVIDVHGETYRVDITGVGVKSDNKRHFYLSIDGMPEEVVFEPLNEYVAGSASGRKHASEPGHVSTTMPGNIVDVLVKEGDSVKAGQAVLITEAMKMETEVQAGIAGTVKAIHVAKGDRVNPGEILIEIAG

SEQ ID NO: 43667 - protein, 296 aa, Pseudomonas aeruginosa
MQYLFPLLAVFIWAGNTVVNKLAVGIIQPAEIGFFRWLLVGLALTPFMLGPVLRNRRYILANLGKFVVLGLLGMAVYQSLAYYAAALTSATNMGIILSLMPLMSLGLASSILAHRLNAGALLGALVSLAGVVLVISQGHLGALLEHGVNLGDAMMIVATLAYAVYSVLLKKWSLKLPAMQLLYLQVLVAILALLPLYLLSPRTGLNAANLPLVLYAALFASIVAALAWMHGVARLGPSRMALFFNLLPIITACIATLVLGERLTVHHLVGGALTLAGVLLAEFWQRRPARLRSATC

SEQ ID NO: 43668 - protein, 338 aa, Pseudomonas aeruginosa
MSENRLAAKLTKVDKAAILLLSLGETDAAQVLRHMGPKEVQRVGVAMASMRNVHREQVEQVMGEFVEVVGDQTSLGVGADGYIRKMLTQALGEDKANNLIDRILLGGSTSGLDSLKWMEPRAVADVIRYEHPQIQAIVVAYLDPDQAAEVLSHFDHKVRLDIVLRVSSLNTVQPSALKELNLILEKQFAGNSNATRTTMGGVKRAADIMNYLDSSIEGQLMDSIREVDEDLSGQIEDLMFVFDNLADVDDRGIQALLREVSSDVLVLALKGSDEAIREKVFKNMSKRAAELLRDDLEAKGPVRVSEVEGAQKEILTIARRMAESGDIVLGGKGGEEMI

SEQ ID NO: 43669 - protein, 265 aa, Pseudomonas aeruginosa
MKPYDLSEAVAVVTGGSSGIGLATVELLLEAGAAVAFCARDGERLRAAESALRQRFPGARLFASVCDVLDALQVRAFAEACERTLGCASILVNNAGQGRVSTFAETTDEAWSEELQLKFFSVIHPVRAFLPQLESRADAAIVCVNSLLASQPEPHMVATSAARAGVKNLVRSMAFEFAPKGVRVNGILIGLVESGQWRRRFEAREERELDWAQWTAQLARNKQIPLGRLGKPIEAARAILFLASPLSAYTTGSHIDVSGGLSRHA

SEQ ID NO: 43670 - protein, 419 aa, Pseudomonas aeruginosa
MDRTLSDRIFPPVLLLLALAWLLPWMPAHAEAPAEWVALPLSERVVDATHTLDEATRQRLVEKLEALERRRGAQIAVVMLPTTGTLDIEAFSDKLFQAWKLGRKAVDDGLLLVVAKDDRRMRIEVGYGLEGAVPDVVAGRIIRERMAPAFREGDYAGGIEAAVDELIRLVDGETLPAAASSGAPKVSLGQLPAEAWALLVAFIYGSLAGVLLSARALRWPWLLGGALLCWLLGTLAGASGEWMSVLLVAPLCMLVGGATFGALWTVRPAFYLVIGVLVYVALLGLAAHWFSAVSFIYGLLWPAGVLMLAVLCWSNYRLMRSLWRERRKSFHRRLWALLAAYLLLGLLSGGLDAPLVWLALLPFQLMLGLLVFGQVRLSGGGGGSSGSSGGGSSSSSSSSSGGFSGGGGSSGGGGASDSW

SEQ ID NO: 43671 - protein, 251 aa, Pseudomonas aeruginosa
MVRRRVIPCLLLKDRGLVKTVKFKEPKYVGDPINAIRIFNEKEVDELILLDIDASRLNQEPNYELIAEVAGECFMPICYGGGIKTLEHAEKIFSLGVEKVSINTAALMDLSLIRRIADKFGSQSVVGSIDCRKGFWGGHSVFSENGTRDMKRSPLEWAQALEEAGVGEIFLNSIDRDGVQKGFDNALVENIASNVHVPVIACGGAGSIADLIDLFERTCVSAVAAGSLFVFHGKHRAVLISYPDVNKLDVG

SEQ ID NO: 43672 - protein, 147 aa, Pseudomonas aeruginosa
MNYPVNPDLMPALMAVFQHVRTRIQSELDCQRLDLTPPDVHVLKLIDEQRGLNLQDLGRQMCRDKALITRKIRELEGRNLVRRERNPSDQRSFQLFLTDEGLAIHQHAEAIMSRVHDELFAPLTPVEQATLVHLLDQCLAAQPLEDI

SEQ ID NO: 43673 - protein, 292 aa, Pseudomonas aeruginosa
MLDLVLLRTFVSVVDTGNFTRAGEHLHLTQSTVSQQVIRLEQNLGCRLLDRSQRQVLPTEEGERLLGYARRLLRLSDEASEALSPAHGDGVLRLGVPEDLAGEVLMPVLTRFTEERPRLRLEVESGLSHHLLRLYRSGELDLLLVKQWGADSDCHARWAEPLGWFGSAARPFGEGSPEEPVPLVVFPVGALYRQEMIHALESIGRRWRIGYSSASLASLVAAVGAGLGVSLLPLGCVGPEHRLLGAQAGFPPIAGLELALYARPELDSAGRTLRDRLRDLCDARLEGLQGER

SEQ ID NO: 43674 - protein, 324 aa, Pseudomonas aeruginosa
MSHPFDQLTPDLVLDAVESLGYLSDARVLALNSYENRVYQVGIEDGEPLIAKFYRPDRWSDAAIREEHAFSAELAECEVPVVAPLSRDGESLFAFSGFRFALFPRRGGRAPEPGNLDQLYRLGQLLGRLHAVGATRPFEHREALAVDNFGHASLATLLEGNFIPRSLLPAYESVARDLLKRLDALFAEVPYQPIRLHGDCHPGNLLCRDDVYHMVDLDDCRMGPALQDLWMMLAGERHERLAQIAELVDGYNEFHDFDPRQLPLLEGLRSLRLMHYSAWLARRWDDPAFPPSFPWFGSERYWGEQVLVLREQLAALDEEPLRLF

SEQ ID NO: 43675 - protein, 132 aa, Pseudomonas aeruginosa
MSARVRPFLMFQGVQAEAAMNFYLSLFDDAEILQIQRYGAEGPGPEGSVLKALFRLGDQSVHCIDSHVRHAFDFTPAFSFFVDCESNAQIERLAEALSDGGKALMPLGDYGFSQRFAWLADRFGVSWQLNLA

SEQ ID NO: 43676 - protein, 442 aa, Pseudomonas aeruginosa
MPAVPLESRLLQALAPWREAGGWCVAFSGGLDSTVLLHLLAQLARSEALPALSALHVHHGLQAAADGWPAHCQAVCRSLGIPLRVERVQVAVGGSIEQAARDARYRAFQANLGEGQVLLTAQHLDDQAETLLFRLLRGAGLRGLAAMPASRPLGGGRLCRPLLGVSRAELEAYAQAHRLDWVEDPSNQDPRFSRNYLRREIMPRLASHWPQAVAGMARCAAHLREAEDLLAELAAIDLRACRQPSELDWPDWLDLPRIALEPLRRLSAARQRNLLRAWLGQLTRLPDSDHWAGWESLRDAGDDADPIWRLESGELRRGAGRIWWLPADWRAAAGPFVWERPAHPLLLPGNGRLALLGEVPAGPLRVDYRRGGEVLALAGRGRRDLKRLLNEAGVPSFLRGRLPLLFRADELLAVANIPGLDSPREGGWRLSWSPPTNDPGLS

SEQ ID NO: 43677 - protein, 314 aa, Pseudomonas aeruginosa
MDILFNMRAFVSVAETGSFTAAAQRLDLTTAYVSRAVAKLEAHLQTRLLHRTTRRIALTEAGQRYLMRAQQILAYIEEAEAEAGDAHARPSGTLKVHAMTGIGQHYLIKAISQYCETYPEVGFDLTLANRITDILDEGYDISVVIAPELPDSGFVSKCIGQTYSILCASPGYIAAHGFPKLPAELSAHRCLRLVNSVMSLDRWLFDGPDGQELACINQTHFQVNTADAMTEAVVSGMGIGALPVYAAVNGLKDGSLVRVLPRYSLFHLNVYALYPSRQYLDAKIRTWVEFLREHMPAMLAADEHSLAESGGLAN

SEQ ID NO: 43678 - protein, 215 aa, Pseudomonas aeruginosa
MSADRHYSPIDRFLLQADSALRTLLPFSGQPARPSPAIVEPDGELSEEDTRHIAGLMRINHTGEVCAQALYQGQSLTAKLPEVREAMEEAAEEEIDHLAWCEQRIRQLGSRPSVLNPIFYGLSFGVGAAAGLVSDRVSLGFVAATEDQVCKHLDEHLAQIPQEDRKSRAILEQMRIDEEQHSSNALAAGGLRFPAPVKLGMSLLAKVMTKSTYRI

SEQ ID NO: 43679 - protein, 1481 aa, Pseudomonas aeruginosa
MKAGLYHPETFKDNCGFGLIAHMQGEPSHQLLQTAIEALTCMTHRGGINADGKTGDGCGLLIQKPDLFLRAVAREAFSVDLPEQYAVGMVFFNQDPVKAEAARENMNREIVAAGLELVGWRKVPIDTSVLGRLALERLPQIEQVFIGGAGLSDQDFAIKLFSARRRSSVANAADSDHYICSFSHKTIIYKGLMMPADLAAFYPDLGDERLQTAICVFHQRFSTNTLPKWPLAQPFRFLAHNGEINTITGNRNWAQARRTKFTNELIPDLEELGPLVNRVGSDSSSMDNMLELMVTGGMDLFRGLRMIIPPAWQNVETMDADLRAFYEYNSLHMEPWDGPAGVVLTDGRYAVCLLDRNGLRPSRWVTTKNGYITLASEIGVWDYKPEDVIAKGRVGPGQILAVDTETGQVLHSDDIDNRLKSRHPYKQWLRQNALRIQATLDDDHGVASYDADQLKQFMKMFQVTFEERDQVLRPLGEQGQEAVGSMGDDTPMAILSRRIRSPYDYFRQQFAQVTNPPIDPLREAIVMSLETCLGVEQNIFEEAPHHANQAILTTPVISPAKWRTIMTLDRPGFDRHFIDLNYDESMGLEAAVRNIADQAEEAVRGGKVLLILSDRHIAPGKLPVHAALAVGAVHHRLVQTGLRCDSNILVETATARDPHHFAVLIGFGASAVYPFLAYEVLADLIRTGEVLGDLYEVFKYYRKGISKGLMKILSKMGISTVASYRGAQLFEAVGLSDEVTDLCFTGVASRIQGARFVDIENEQKLLAAEAWSNRKPIQQGGLLKFVYGGEYHAYNPDVVNTLQAAVQQGDYEKFKEYTALVDQRPVSMIRDLLQVKTAAQPLALDEVEPLEAIFKRFDAAGISLGALSPEAHEALAEAMNTLGGRSNSGEGGEDPARYGTLKSSKIKQVATGRFGVTPEYLVNAEVLQIKVAQGAKPGEGGQLPGGKVNGLIARLRYAVPGVTLISPPPHHDIYSIEDLAQLIFDLKQVNPQALVSVKLVSEPGVGTIAAGVAKAYADLITISGYDGGTGASPITSIKYAGSPWELGLAETHQTLRGNDLRGKVRVQTDGGLKTGLDVIKAAILGAESFGFGTAPMIALGCKYLRICHLNNCATGVATQNDKLRKDHFIGTTAMVINFFTFIATETREWLARLGVRSLGELIGRTDLLEILPGETAKQQNLDLAPLLGSELIPADKPQFCEVEKNPPFDQGLLAEKMVELSKAAIEGLSGGEYELDICNCDRSIGARVSGEIARLHGNQGMAKAPVVFRFKGTAGQSFGVWNAGGLHLYLEGDANDYVGKGMTGGKLVITPPKGSPFKTQESAIVGNTCLYGATGGKLFAAGTAGERFAVRNSGSHAVVEGTGDHCCEYMTGGFVCVLGKTGYNFGSGMTGGFAYVLDMDNTFVDRVNHELVEIQRISGEAMEAYRSHLRKVLVEYVNETASEWGANILENLDDYLRRFWLVKPKAASLGSLLTSTRANPQ

SEQ ID NO: 43680 - protein, 313 aa, Pseudomonas aeruginosa
MSRKLHIHAPAIHYFDMVRRCHSIREAARRLNVASSAVNRQILKLEDEIGAPLFDRLPGGLRLTGAGEIFARHVTVVLQDMERVRSELDALQGLRTGHVEIATIEAVTSDLLPCVLKAMRERYPDITVGVTLLGSQAIPEAVSSGAVDLGLAFALPRSADLQQVSVGHFRLGAIVSPQHPLARHQAIAFADCVEHGLIMAKSELSIHHLLAPLQRRLREPRRAVLESSSLELSRQLARRGLGVAFQTRLGIEADIAQGELRFLPLKDNGGIHSDLGLYVRTGRYLPVAVDALARQIAEEVRLREREEARLNEA

SEQ ID NO: 43681 - protein, 352 aa, Pseudomonas aeruginosa
MFKSLHQYAHVFSRLSLFGLAFAAAAQAQSQSLTVISFGGATKAAQEQAYFKPFERSGGGQVVAGEYNGEMAKVKAMVDVGKVSWDVVEVESPELLRGCDEGLFERLDPARFGDPAQFVPGTFSECGVATYVWSMVMAYDSTKLARAPQSWADFWNVREFPGKRGLRKGAKYTLEVALLADGVKAEDLYKVLATPEGVSRAFAKLDQLKPNIQWWEAGAQPPQWLAAGDVVMSAAYNGRIAAAQKEGVKLAIVWPGSLYDPEYWAVVKGTPNKALAEKFIAFASQPQTQKVFSEQIPYGPVHKGTLALLPKTVQEALPTAPANLEGARAVDAEFWVDHGEELEQRFNAWAAR

SEQ ID NO: 43682 - protein, 246 aa, Pseudomonas aeruginosa
MFQYSARPDLLKDRVILVTGAGRGIGAAAAKTFAAHGATVLLLGKTEEYLNEVYDAIEAAGHPQAAVIPFNLETAQPHQFEELAATLENEFGHIDGLLHNASILGPRSPMQQISGENFMRVMQVNVNAMFMLTTAMLPLMKLSSDASIIFTSSSVGRKGRAYWGAYSVSKFATEGLMQTLADELDGTSAIRANSVNPGATRTSMRALAYPGENPLNNPTGEEIMPVYLYLMGPDSAGVNGQAFDAQ

SEQ ID NO: 43683 - protein, 161 aa, Pseudomonas aeruginosa
MGRSSSPRVGWAGPLPAHFPPGKERNSFPRFPQRSWMKKSPLLILSVLLAACGPDKLISDLPSPNGQYHVEVRKCPEKGSITWGEEIQVSLLETGKSEKCHAVVRSLAQFDLRASADQLQLEWLSDTELRAWHPSFEPGNQPNGSRLKHDAPVKMVFAPKR

SEQ ID NO: 43684 - protein, 370 aa, Pseudomonas aeruginosa
MKHFKLPDLGEGLQEAEIVEWHVKAGDSVRADQRLVSVETAKALVDIPAPYDGVVGKLFGAEGDILHVGEPLVGFEGEEADAGTVVGRLEGGGSALEDRFFIGAAPSTREHLAPRATPAVRQFARQQGVELAGLSGSGPDGLITRADVEAAAQGTRERFGGERLRGVRRSMALNMARSHAEVVPVTIYGDADLHRWKTARDPLIRLAQALAEACRAEPTLNAWFDGASLSLKLHERLDLGIAVDTPDGLFVPVLRDVGARSAEDLRAGMRRLREDVQARSIPPAEMLGATLTLSNFGTLFGRYANPVVVPPQVAILGAGGIRDEVVAWRGEMAIHPILPLSLSFDHRAATGGEAARFLKVLVNALEQPDG

SEQ ID NO: 43685 - protein, 130 aa, Pseudomonas aeruginosa
MKFRLLLWMLGRLMAKASRDNPAFQKQLEGKDLVFQLHTLDGKVARHYLVRDLRVSSKRGTHPQPAFSLGFKDGAYGFAAMTSKNPQLAFMQGIQNKDIQIQGNPALVIWFQGLVKYLKPKKKAPEKKAA

SEQ ID NO: 43686 - protein, 186 aa, Pseudomonas aeruginosa
MRYPEDHKQKTRRRIVEEAARLFRQDGVGATGLQPLMKALGLTHGGFYAHFKSKDDLVETALRHAAAQLDEITAPLAEAERPLALLIEQYLSPRHRDNPGAGCPLPTLSAELGQRGTPSPTTDSIVRKRLAMIEAALEGEDAGERAVLLLASLVGALQLSRSVQDEALSQRILEATRKKLLEQMER

SEQ ID NO: 43687 - protein, 428 aa, Pseudomonas aeruginosa
MIHAARSLAGSRAGPLLALLLLGLATARAEPVDGLPLRADGDGRWSLAAGRYAGNFVIDRPLHLRCEAGAELDGGGHGSLLTLTSPGITVEGCRLRNWGRNLTELDAAIFVGKAASGAVIRGNDLRGAGFGVWLDATVGAQVLDNRIEGDESVRSQDRGNGIHLYAVKDALVRGNRVSHTRDGVYIDTSNDSSIEANRFEELRYGVHYMFTHNSRVTDNLTRRTRTGYALMQSRKLTVTGNRSIDDENYGILMNYITYSTLAGNRVEGVRSGSTGDAMISGAEGKALFIYNSLFNRIEGNSFADSALGIHLTAGSEDNRIAGNAFIGNRQQVKYVASREQEWSADGRGNYWSDYLGWDRDDDGLGDVAYEPNDNVDRLIWLYPQVRLLLNSPSIELLRWVQRAFPVVRSPGVRDSHPLMRMPAAEPRP

SEQ ID NO: 43688 - protein, 457 aa, Pseudomonas aeruginosa
MKIIILGAGQVGGTLAEHLASEANDITVVDTDGDRLRDLGDRLDIRTVQGKASFPTVLRQAGADDADMLVAVTNSDETNMVACQVAYTLFNTPTKIARVREPAYLTRTGLFDNEAIPVDVLISPEQVVTNYIKRLIEHPGALQVIDFAEGKAQLVGIKAYYGGPLVGQELRQLREHMPNVDTRVAAIYRRNRPIIPQGDTVIEADDEVFFIAAKAHIRAVMGEMRRLDDSYKRIIIAGGGNVGERLAEAIESRYQVKIIERSPLRCRHLSDTLDSTIVLNGSASDRDLLLEENIGETDVFLALTNDDEANIMSSLLAKRLGASKVMTLINNPAYVDLVQGGEIDIAISPQLATIGTLLAHVRRGDIESVHSLRRGAAEAIEVVAHGDAKSSKVIGRSINEIKLPPGTTIGALVRDEEVLIAHGDTRIESGDHVLLFLVDKKYIRDVERLFQAGLTFF

SEQ ID NO: 43689 - protein, 1809 aa, Pseudomonas aeruginosa
MSLGELLETCRSRRIELWSEAGRLRYRAPQGALDAGLAERLRAEREALLEHLEGGPGWRAEPDMAHQRFPLTPVQAAYVLGRQAAFDYGGNACQLYAEYDWPADTDPARLEAAWNAMVERHPMLRAVIEDNAWQRVLPEVPWQRLTVHACAGLDEAAFQAHLERVRERLDHACAALDQWPVLRPELSIGRDACVLHCSVDFTLVDYASLQLLLGEWRRRYLDPQWTAEPLEATFRDYVGVEQRRRQSPAWQRDRDWWLARLDALPGRPDLPLRVQPDTRSTRFRHFHARLDEAAWQALGARAGEHGLSAAGVALAAFAETIGRWSQAPAFCLNLTVLNRPPLHPQLAQVLGDFTALSLLAVDSRHGDSFVERARRIGEQMFDDLDHPTFSGVDLLRELARRRGRGADLMPVVFTSGIGSVQRLLGDGEAPRAPRYMISQTPQVWLDCQVTDQFGGLEIGWDVRLGLFPEGQAEAMFDDFVGLLRRLAQSPRAWTDGDATEPVEAPPQALPGSARSIAAGFAERALLTPDATAIHDAAGSYSYRQVAQHASALRRVLEAHGAGRGRRVAVMLPKSAAQLVAVIGILQAGAAYVPVDIRQPPLRRQAILASAEVVALVCLESDVPDVGCACVAIDRLAADSAWPPPPAAEVAADDLAYVIYTSGSTGTPKGVMLSHAAVSNTLLDINQRYGVDANDRVLGLAELSFDLSVYDFFGATAAGAQVVLPDPARGSDPSHWAELLERHAITLWNSVPAQGQMLIDYLESEPQRHLPGPRCVLWSGDWIPVSLPTRWWRRWPDSALFSLGGATEAAIWSIEQPIRPQHTELASIPYGRALRGQSVEVLDARGRRCPPGVRGEIHIGGVGLALGYAGDPQRTAERFVRHPDGRRLYRTGDLGRYLADGSIEFLGREDDQVKIRGHRIELAELDAALCAHPQVNLAATVVLGETHERSLASFVTLHAPVEAGEDPRTALDAVRQRAAQALRRDWGSEEGIAAAVAALDRACLASLAAWLAGSGLFASATPLDLATLCQRLGIAEARQRLLRHWLRQLEEGGYLRAEGEGWLGCAERPAQSPEDAWTAFAGCAPAALWPAELVAYLRDSAQSLGEQLAGRISPAALMFPQGSARIAEAMYSQGLHAQALHEAMAEAIAAIVERQPQRRWRLLELGAGTAAASRTVIARLAPLVQRGAEVDYLFTDVSSYFLAAARERFADQPWVRFGRFDMNGDLLDQGVAPHSVDILLSSGALNNALDTPALLAGLRELLSADAWLVIQELTREHNEISVSQSLMMENPRDLRDERRQLFVHTGQWLEWLAAQGGDLACGVVPPGSALDLLGYDVLLARCKTDRARLEPAELLAFVEARVPRYMLPAQLRVLERLPVTGNGKIDRKALTGFARQPQADLRHGVAQAPADELENALLALWREVLDNPSLGVEQDFFGAGGDSLLIAQLIARLRERLESARRHPFDRLLRWALSQPTPRGLAERLRSAPEEGRGPALAAARGVAPAPAGMSRAPLAEGAVALDPLVRLVPGEGVPRVLVHEGLGTLLPYRPLLRALGEGRPLLGLAVHDSDAYLAIPAEHLNACLGRRYAEALHRAGLREVDLLGYCSGGLVALETAKSLVQRGVRVRQLDIVSSYRIPYRVDDERLLLFSFAATLGLDTAALGFPAPERLGQAVQAALAQTPERLVAEALAGLPGLADLVALRGRVLQAASGSADAVSVERDTLYRLFCHSVRASQAEAPEPYVGALRLFVPDAGNPLVPRYAEALETQWRAAALGACGIHEVPGGHFDCLGEALAQSLSKPMPEEASR

SEQ ID NO: 43690 - protein, 337 aa, Pseudomonas aeruginosa
MPERTTLSSWVQGIVLALELEGLDGRQLFAELGLDYQALQDPDARFPQDAMSRLWQRAVALSGNPAIALNIARVRRPAFHVVGYALMSSRNLAEGFARLERYQRIIAEASDLTFRRTPQGYRIGVTVHGDRLPAPPQSAECSLAYLVDMVRWITGRSLDPLAVELPGAPREPLAPYVELFRAPLRFHAEEFALVFSRVDLETPLPSANEALAQLHDRFAGEYLARFSTSRITHLTRQTLCRLLPQGEPKRERVAQALHLSQRTLQRRLQEEGTSYQQLLDDTRRDMAEQYLQQPGLTLLEVAYLLGFADPSNFFRAFRRWFGCTPNEYRARRQERPG

SEQ ID NO: 43691 - protein, 158 aa, Pseudomonas aeruginosa
MPSRLSLIAALLLPLAVQAEPADTRALLADSLADSQAQVEAAEQAMRRSENKAVQLYAKRVLTEQQEFDHQLRALAGEKALALPSPRQTERQAAAPGGFDERGFLDAQIRQQDRLVARFEGIARDSADPDLRRFADEWLARFYHHRELADQLRSGRAD

SEQ ID NO: 43692 - protein, 568 aa, Pseudomonas aeruginosa
MKPSQWTLRWVTLCGCGMLAASAAAVELPGTVQPSQLDERFKPRSEPQAKPEAPLVVPKQVAPQGSEQIRFKLREIRIEGNTRYDKAVLESYYQHMLGEQVSLAELVDLANRLTAKYRQDGFLLTQVVVPEQSIEGGKVRLQVIEGYLEHVQIKGTVDGPRVRVEELLAPLTEKRPLDADTLERGLLLVGDLPGVNVQSVLSPGQALGSSNLDVALQQQRYEGFVSLDNRGSHYTDPTTLAFGATEFSRLGFYEQIDVLGAISPFSDATRYIQLRGTLPLGGMFAGDTLQIMGSYSKVNPDIPDSVFPFDSVSKSTEGSISYNHPFIRSRSQNLSGGLALQWKDTETRLRDFASDASNPGRDHVRVFQQRLTYDWVDRWMGINLAEVRNNIGLDMWGATKKDDERRSREVADGRFVYLNGNIGRLQGLGGPWSVYGELQWQYSFDPLLPSERFGVGGSGIGRGFAPGNITGDRGFALKLEPRYGQAVGYSWLRSYQAYAFYDWGKTYNLDVDDDEQQKLGSIGAGVRFNLTDQLSFNPEIARQVIGEPADQRDGKRETRVLFNVVARF

SEQ ID NO: 43693 - protein, 202 aa, Pseudomonas aeruginosa
MRYWYLRLAVFLGALAVPAWWLYQAWIFALGPDPGKTLVDRLGLGALVLLLLTLAMTPLQKLSGWPGWIAVRRQLGLWCFTYVLLHLSAYYVFILGLDWGQLGIELSKRPYIIVGMLGFVCLFLLAITSNRFAMRKLGSRWKKLHRLVYLILGLGLLHMLWVVRADLEEWTLYAVVGASLMLLRLPSIARRLPRLRTRHGVS

SEQ ID NO: 43694 - protein, 295 aa, Pseudomonas aeruginosa
MRVDLHCHSTASDGVLAPAALVQRAHEKGVGLLALTDHDTLEGLPEAHQAAARLGIELVNGVELSCTWGGATIHVLGYGFDLDAAPLRQATEALHRGRWARAEEIDRRLAAKGMPGALEGARAIQQALGDSGNAPARPHFAEFLVQGGWVKDRADAFRKWLGAGKLGDVKQHWPTLEEVVGCLREARAWISLAHPYHYDFTRTKRRRLVADFLQAGGHAIEVVNGVQPAEQVGTLSILAREFGLMVTAGSDFHAPGDWSELGMYRAVPEDLPAMWPRFARHFRDTERHSEAKGAE

SEQ ID NO: 43695 - protein, 404 aa, Pseudomonas aeruginosa
MAQREFSATSGGVLLASVVAIMLGPTGILLNTFSLFIAPMSAEYAWDRAEVSLLVTLFGLAVAITSPLKGWLIDRWGARRTMLGLTAALSLPLLGLAAVNAVWQLYALFLLIGLLAPGNLPYGRILGLWFRQRLGVAYGLLGLGFGVGGPLGLLVGHQSLEAWGWRGAFLVYGVLELGLALPLLAWLFREPAPDAGVAAGTAVAETALSGSTAPQAWRSASFWLVLGNQVLAVFVMSGIMTHGVPMLVERGLSRGEAGTALSALWVGMMLSQPLMGWLLDRVATPRVALPFALAAVLGMAWFLVGDTPSGLWLAVFLVGLGGGGESGTTKYLLMRYFGLRSFGVIYGSIQPFTFALSISLGAYLLGWLYDRAEGYGTAEWVLLAAFSLAACSLFAFRPYPQKLP

SEQ ID NO: 43696 - protein, 192 aa, Pseudomonas aeruginosa
MRVTTHATLAAALLLSAASAFAFNLGDAAKAVAGASQGDSAQVATTPQTSGLLGALTGQLGVSQEQAVGGTGALLGLAKNQLAGNDYSQLVKTIPGLDKLAGNNALAGLGGLGNVLGKSGGDSKGLGSLLGNADSMGDVNKAFGTLGMDSGMTEKFAQVLVDYFGKQGANSELLGSLSNLWGVSKAGGSSLL

SEQ ID NO: 43697 - protein, 242 aa, Pseudomonas aeruginosa
MRVTRFLAAAALGLMSTLALADNADQNIRKTLQALQPDLPIDSIASSPLQGLYQVQLKGGRVLYASADGQFVMQGYLYQVKDGKPVNLTEKAESQAIAKAINGVPASEMVVYPAKGQAKAHITVFTDTTCPYCQKLHAEVPDLTEQGIEVRYMAFPRQGPQSAGDKQLQAVWCAKEPTKAMDAMMNGKEIKSSECKNPVDKQFQMGQMVGVQGTPAIVLANGQLLPGYQPAKQLAKLALEAK

SEQ ID NO: 43698 - protein, 464 aa, Pseudomonas aeruginosa
MAVYNYDVVILGTGPAGEGAAMNASKYGRKLAVVDSRRVVGGNCTHLGTIPSKALRHSVKQIIEFNTNPMFRQIGEPRWFSFPDVLKSADRVISKQVASRTGYYARNRIDMFTGTASFVDERTVEVVTPSGAVERLVADQFVIATGSRPYRPSDINFNHPRVYDSDTILSLSHTPRRLIIYGAGVIGCEYASIFSGLGVLVDLIDTRDQLLSFLDDEISDALSYHLRNNNVLIRHNEEYERVEGLDNGVILHLKSGKKIKADALLWCNGRTGNTDKLGLENVGIKVNSRGQIEVDENYRTSVSNIFAAGDVIGWPSLASAAYDQGRSAAGNIVESDSWRFVNDVPTGIYTIPEISSIGKNESELTAAKIPYEVGKAFFKGMARAQISNEPVGMLKILFHRETLEILGVHCFGDQASEIVHIGQAIMNQPGELNTLKYFVNTTFNYPTMAEAYRVAAFDGLNRLF

SEQ ID NO: 43699 - protein, 684 aa, Pseudomonas aeruginosa
MSAKDFLVELGTEELPPKALNSLGEAFLSGIEKGLKAAGLSYAAARFYAAPRRLAVLVEQLAVQQPDRTVNLDGPPLQAAFDASGNPTQAALGFAKKCGVDLQQIDKSGPKLRFIQTIAGQPAAGLLPGIVEASLNELPIPKRMRWAARREEFVRPTQWLVMLFGDDVVECEILAQKAGRESRGHRFHNPDNVRISSPAAYLEDLRGAHVLADFAERRELIAKRVAELAAEQQGSAIVPPSLLDEVTALVEWPVPLVCSFEERFLEVPQEALITTMQDNQKYFCLLDANGKLLPRFITVANVESKAPENIVSGNEKVVRPRLTDAEFFFKQDKKQPLESFNERLRNVVFQAQLGTVFEKAQRVSGLAAYIAERIGGNAQNASRAGILSKCDLATEMVGEFPEMQGIAGYYYATHGGEAEDVALALNEQYMPRGAGAELPSTLTGAAVAVADKLDTLVGIFGIGMLPTGSKDPYALRRAALGVLRILIEKQLDLDLVAAVNAAVEQYGDKVKAAGLAEQVLDFVFDRLRARYEDEGVDVAVYQSVRALKPSSPLDFDQRVQAVQAFRQLPEAEALAAANKRVSNILAKSEDEVPPNVDASLLVEAAEKALGSAVANAESEVAPLAAARDYRAALARLAALREPVDTFFADVMVNVDDAAVRANRYALLAKLRGSFLGVADISLLG

SEQ ID NO: 43700 - protein, 370 aa, Pseudomonas aeruginosa
MFELDSTLAQHIVDRAMAILPHNINVMDAQGMIIGSGDPSRLHTRHEGAQLVLANRRVVEIDEQAAACLRGVRPGVNLPLLHAERLVGVLGITGAPEVVRPYAELVRMAAEMLMEQRQMQDERHWQRQRHEAWLRQLLDPGHGLGALAADAEHLGLAMHWPRQAVFLELPEHADPLPCQARLLAALGGRAEHWSAALGERLVFWCRPVAHADTLEHWLERADARGWGVARLCAGDPAHDLAELRASACAARDLLDYARSRLPGRRVVTLDGHRLASLLFSQRDSWQVRQLLAPLQRLLDHDPQGSLAATLESWCAHDGHAQACAQALGIHRNSLRYRLERIASISGLDLARLEHRQQLLLGLQLLVPRRG

SEQ ID NO: 43701 - protein, 594 aa, Pseudomonas aeruginosa
MSVFATAAQDRLLDLGDLLRELVAQGRVGQEQAEQCLAIRRSAVRNQQHPLEFLAAQQVEDLKRPGRKLDLETLTQWLAEYAGQPYLRIDPLKIDVAAVTPLMSYAFAQRHGILAVALSPEEVTIASAQPFVQGWESNLVHVLKRPIKRVVANPADIQRYTVEFFRLARSVSGATSPDQKISGVGNFEQLLNLGAADQEPDANDAHIVTIVDWLFQYAFQQRASDIHIEPRREQGTVRFRIDGVLHNVYQFPPQVTMAVVSRLKSLGRMNVAEKRKPQDGRVKTKTPDGAEVELRLSTLPTAFGEKMVMRIFDPEVLLKSFDQLGFSADDLRRWQSMTSQPNGIILVTGPTGSGKTTTLYTTLKQLATDEVNVCTIEDPIEMIEPSFNQMQVQHNIDLTFASGVRALLRQDPDIIMVGEIRDLETAEMAIQAALTGHLVLSTLHTNDSPTAITRLLELGVPYYLIRATVLGVMAQRLVRTLCPHCKAPMQLADSDWHELTRPWSAPPPSGAHQAVGCLECRDTGYRGRAGVYEIMLLSDSLKELITADTDLVALRRQAYKEGTRSLRLSGAQKVAAGISTLEEVLRVTPQSEQK

SEQ ID NO: 43702 - protein, 288 aa, Pseudomonas aeruginosa
MDILQSSSAAPLAPREAANAPAQQAGGSFQGERVHYVSVSQSLADAAEELTFAFSERAEKSLAKRRLSDAHARLSEVQAMLQEYWKRIPDLESQQKLEALIAHLGSGQLSSLAQLSAYLEGFSSEISQRFLALSRARDVLAGRPEARAMLALVDQALLRMADEQGLEIELGLRIEPLAAEASAAGVGDIQALRDTYRDAVLDYRGLSAAWQDIQARFAATPLERVVAFLQKALSADLDSQSSRLDPVKLERVMSDMHKLRVLGGLAEQVGALWQVLVTGERGHGIRAF

SEQ ID NO: 43703 - protein, 494 aa, Pseudomonas aeruginosa
MPKSSAAEQSGESSTQTLSLLDEIIAKGRMAHDDSQQDYARDMLAEFATQVLDEGMAVDKDTVAMINDRISQIDALISDQLNQIIHHPELQKLEASWRGLHQLVSNTETSARLKLRLLNVGKNELQNDLEKAVEFDQSALFKKIYEEEYGTFGGHPFSLLIGDFTFGRHPQDIGLLEKLSNVAAAAHAPFIAAASPRLFDMNSFTELAVPRDLTKIFESLELIKWRAFRESEDSRYVSLVLPNFLLRLPYGPETRPVEGMNYVEDVNGTDHSKYLWGNAAWVLAQRITEAFAKYGWCAAIRGAEGGGAVEGLPAHTFRTSSGDLSLKCPTEVAITDRREKELNDLGFISLCHKKNSDVAVFFGGQTTNKARLYNTNEANANARLSAMLPYVLAASRFAHYLKVIMRDKVGSFMTRDNVQTYLNNWIADYVLINDNAPQEIKAQYPLREARVDVSEVAGKPGAYRATVFLRPHFQLEELSASIRLVANLPPPVAA

SEQ ID NO: 43704 - protein, 314 aa, Pseudomonas aeruginosa
MQRIRIIDSHTGGEPTRLVIGGFPDLGQGDMAERRRLLGERHDAWRAACILEPRGSDVLVGALLCAPVDPEACAGVIFFNNSGYLGMCGHGTIGLVASLAHLGRIGPGVHRIETPVGEVEATLHEDGSVSVRNVPAYRYRRQVSVEVPGIGRVSGDIAWGGNWFFLVAGHGQRLAGDNLDALTAYTVAVQQALDDQDIRGEDGGAIDHIELFADDPHADSRNFVLCPGKAYDRSPCGTGTSAKLACLAADGKLLPGQPWRQASVIGSQFEGRYEWLDGQPGGPIVPTIRGRAHVSAEATLLLADDDPFAWGIRR

SEQ ID NO: 43705 - protein, 207 aa, Pseudomonas aeruginosa
MTCTMLPEIDQFLACSTPAAWVEAALERQDVMLLDHKACEMKAAATAMQLIGKYSGRLDLVNKMSRLAREELRHFEQVLAILKKRGIRVVNVSASRYASALRDLVRKQEPQRLTDTLVVGAFIEARSCERFAALVPHLDAELAKFYGGLLKSESRHFQDYLKLAYQYGDEADVERTIEVVRAKEAELISSPDNEFRFHSGLPVDLVA

SEQ ID NO: 43706 - protein, 372 aa, Pseudomonas aeruginosa
MQIGVPLETHAGETRVSATPETVKKLIGQGHQVIVQSGAGVSASQPDSAYEAAGATIGSAAEAFGADLVLKVVAPSAAELAQMKSGAVLVGMLNPFDNENIARMAERGITAFALEAAPRTSRAQSLDVLSSQANIAGYKAVMLAANHYPRFMPMLMTAAGTVKAARVLILGAGVAGLQAIATAKRLGAVIEASDVRPAVKEQIESLGAKFVDVPYETDEERECAEGVGGYARPMPASWMERQAKAVHERAKQSDIVITTALIPGRKAPTLLHEATVAEMKPGSVVIDLAAAQGGNCPLTEADQVVVRHGVTIVGHSNLAALVPADASALYARNILDFLKLTLNAEGFSVNLEDDIVAACLMCRDGQAVRKNG

SEQ ID NO: 43707 - protein, 544 aa, Pseudomonas aeruginosa
MTVSRRGFMAGLALTGAAALPVAYYTHRHLTREEEPQTPDEASLDLAATDGIRLGDRLRGLWDLRLVGGDAELPGLPREGLQLVLDVAPKGRGLIGYLDTPERLLAAEPPRFRVLGDLLGASSASIRWRLVDQASGSVAPTHDCSAVFDEVWADYANAGDGTLSGRIQRLERSPLSPNEDFRFVAVKRHFPLAHERIVLNEKLLGWLVSPQHRLFHQLWHASRDKWHRLSEKQRNALRGVGWQPGPLDRERDARGPRKDRNASGIDFFFMHRHMLHTARSMQDLPSWERLPRPVVPLEYDRPGFIRYFDNPDGFSVPPAWVAVDDDEYSEWLHGLKSAEAYHANFLVWESQYQDPAYLAKLTLGQFGSELELGMHDWLHMRWASVTRDPSNGAPVMTDRFPADFAPRWFRPENDFLGDPFSSHVNPVFWSFHGWIDDRIEDWYRAHERFHPGEVQRREVEGIQWFAPGRWVEVGDPWLGPATHGCGLSDVQASSNSVELDVETMKLALRIIFSEEDQLSGWLKRAPRRPWYARNLKLARDQLRR

SEQ ID NO: 43708 - protein, 306 aa, Pseudomonas aeruginosa
MASYTLRQLKYFVTTVECGSVAEASRKLYIAQPSISTAVKGLEESFGVQLFIRHHAQGVSLTPAGARFYRKAQELLRMAHEFEQNALADNDVIAGQIDIGCFETVAPLYLPGLIAGFRQAYPGVEIRIRDGEQQELVQGLTSGRFDLAFLYEHDLDSTIETEPLMPPQRPHALLPEGHRFAGQAQVSLRDLCLEPMILLDVQPSRTYFVSLFEELGLTPNIAFSSPSIEMVRGMVGQGFGFSLLVTRPHSECTYDGKKVVMVDLAEPVSTSGLAAAWLKRAQLTKPARLFVDYCREQLGKLAERRH

SEQ ID NO: 43709 - protein, 312 aa, Pseudomonas aeruginosa
MLNKRRLPSMTALQCFEAVARHLSFTRAAEELSLTQSAMSKQVAQLEEQLQHALFRRVRKRLQLTPAGELYLAEVRRILQQVELSTRFLLSYGGETEVLRVATPPTFGARWLIPQLNGWRHRHPNIHLDLRQELEPDDLRQGHCDLAFFFGPGTLPGAECIRLFGEQLVAVCAPSLLPAGGLDEPTQLAGLVLLQNASRAEAWHDWFASLERNCQGCYHGPRFDTFYMCIRAAQAGCGVALLPRFLVEEELAEGKLAIAWPHALPSQEAYYLAYPEHAAEVPKVRHFIEWMVERLEQEQPSAGPRQTRHGPV

SEQ ID NO: 43710 - protein, 131 aa, Pseudomonas aeruginosa
MMFERSPDDPLPLVYACSGCSNVAQLANDLALRLDRARLAEMSCIAGVGGDVPLLVRRARSGRPILALDGCPLHCVKGCLARHEVVPTLHLTLSEHGLKKRYGEDCEAQDAERLFVELERLLTPGGKRRCE

SEQ ID NO: 43711 - protein, 492 aa, Pseudomonas aeruginosa
MRLAELQAAGRQPQLPLRVTLADGAGAAELRLDSLLRVLPGQRYVGAGEWRGRKVLAKLLVGGKAARHFQRELEGARLLAAQGLTTPALLADGLQQGEGGWLLFDYLDAAQSLGDAWRAVEAQAPLGDAQQAVLGEALAAIGELHAKGLWQDDLHLDNLLRHAGRLYLIDGGGVRAETPGQPLSRQKVLENLGVFFAQLPALLDPFLEELLVHYLLANGEHALPLEALQKEIAKVRRWRVRDLLRKVGRDCSLFSVVRGPFRLFAARRSEAETMAPLLADADRLIAAGHVYKDGGAATVARVEANGRTLIIKRYNIKGWVHWLKRFWRPSRAWASWREGNRLEFLGIATARPLAMLERRWCWLRGRAYLITDYLGGQDIIARFKPCLDMPDGAVSPPEAELAALDRLFSTLIRERISHGDLKGHNLFWQAHEQGGEWALIDLDAMRKHHSQASFARAYARDRARFLRNWPQDSGLYRLLEQRIPRLGDAAGA

SEQ ID NO: 43712 - protein, 125 aa, Salmonella typhimurium
LSLRTLHAVLRTSLLTVFNAGAVKRATNGVVTNTREVFNTTATDQDHGVLLQVVTFTTDVGSHFKTVSQTNTANFTQCGVRFFRSGSIYTSTYATFLRACFQRRHVAFRNFASTWFAYQLVNCCH

SEQ ID NO: 43713 - protein, 145 aa, Salmonella typhimurium
SGKSSPVFNPGIGLALRLRMFAGVNEHLPHPLRALLLQQGIKLFAAITEIGVAAITRNHPVTQVWLKTDCIFNAVKERRNAIRIALPGRRGNDQRNLILILLPVGQFRIFKHGRAVALSGEDRFRFFRHQQVAIHGPDKNTNFRH

SEQ ID NO: 43714 - protein, 463 aa, Salmonella typhimurium
LAPPASQQAASHPGVKAPDMIENAHDAGFAVRRHRHRMESMLVKTLQLSHFAHHVIRQALGDKIRNDHRIGIKPFPSLHSFNNGAKTAGDIRAAAKTLTKADGLLDTFRAGEFIAHNVSGKQHNKAAAVIRQRNAHQRQAERFCALLVKSSHRASIDADNKRSARLLVDILVYYRPFGHFLTPRFAMQAIGEELFFHPAVKFIFQLGDAERRQLWRQQAQNIIALLNTVNLLRHRCGFAYQCTKGFHRRVFFRYRFGFPRTSQLFRQLHLRLGGEKFAVFYDQLIITTFKLARAHIPQAACGIIIFRQRRFQLPAQRHPFLNVTQQLLALFFQLLVRGGLHDQTPPALQKKRVRRGKGTVALRQLLRLRGIRMQAVKQRQYLRQLHDELWGREKLALLITHDLFREFRRNACVFKTAARFPPAREIGGHGVFTRKLFKENDQLWGSQREDHLFDHSLFADGQH

SEQ ID NO: 43715 - protein, 122 aa, Salmonella typhimurium
MANNTTGFTRIIKAAGYSWKGFRAAWTHEAAFRQESLAVLLGVIIACWLDVDAITRVLLIGSVLLIMIVEILNSAIEAVVDRIGSEYHELSGRAKDMGSAAVLLSIFVALMTWGILLWSHFR

SEQ ID NO: 43716 - protein, 266 aa, Salmonella typhimurium
MYQVVASDLDGTLLSPDHTLSPYAKETLKLLTARGIHFVFATGRHHVDVGQIRDNLEIKSYMITSNGARVHDTDGNLVFTHNLDSDIASDLFGVVNANPDIVTNVYRDDEWFMNRHRPDEMRFFKEAVFNYSLFEPALLEPEGVSKVFFTSDTHEKLLPLEQAINARWGDRVNVSFSTLTCLEVMAGGVSKGHALEAVAQAMGYSLKECIAFGDGMNDAEMLTMAGKGCIMGNAHQRLKDLYPELEVIGINADNAVPHYLRDLFLR

SEQ ID NO: 43717 - protein, 329 aa, Salmonella typhimurium
MASQLTDAFARKFYYLRLSITDVCNFRCTYCLPDGYKPGGVTNNGFLTVDEIRRVTRAFASLGTEKVRLTGGEPSLRRDFTDIIAAVGENDAIRQIAVTTNGYRLARDAANWREAGLTGVNVSVDSLDARQFHAITGQDKFRQVMAGIDAAFDAGFEKVKVNTVLMRDVNHHQLDTFLAWIQPRPIQLRFIELMETGEGSDLFRKHHISGQVLRDELIKRGWIHQLRQRSDGPAQVFCHPDYAGEIGLIMPYEKDFCATCNRLRVSSVGKLHLCLFGDGGVSLRDLLQDDAQQYALEERISDALREKKQTHFLHQSNTGITQNLSYIGG

SEQ ID NO: 43718 - protein, 170 aa, Salmonella typhimurium
MSQVSAEFIPTRIAILTVSSRRGEEDDTSGHYLRDSAQEAGHEVVAKAIVKENRYAIRAQVSAWIASDEVQVVLITGGTGLTEGDQAPEALLPLFDREVEGFGEVFRMLSFEEIGTATLQSRAVAGVANNTLIFAMPGSTKACRTAWENIIAPQLDARTRPCNFHPHLKK

SEQ ID NO: 43719 - protein, 64 aa, Salmonella typhimurium
LSVQIFAIAFVGITIQAVCLHRLHPHFGIRENLVHLLRQFGQNDLAGPFESFNITLVINQFYEH

SEQ ID NO: 43720 - protein, 729 aa, Salmonella typhimurium
MSFVSTNNKSGMGGLTTTTPPITGESGGVTADSVAGSVADAAESAVEQAAGSLFGALPEPSGLVKAAVAAAQAAAAAGMAQDAVSAIVSAVAGGPGAHNVTVSGSAVPPGALLFASLDGGETLSELFSYVVQLKTPDTLNLGYVSPAANLPLKPMVGKDLCVNIELDGGGKRHISGLVTAARVVGHEGRSVTYELRMEPWVKLLTHTSDYKAFQNKTVVDILDEVLAEYPYPVEKRLVESYPVRTWQVQYGETDFDFLQRLMQEWGIYWWFEHSEDSHTLVLADAISAHKACPDSPLVEWHQEGLKLDKEFIHTITANESLRTGQWVLDDFDFTKPRSLLANTVANPRETGHATYEHYEWPGDYFDKSEGEMLTRIRMEAQRSPGSRVLGGGNIRTLMTGYTFTLENYPTAEVNQEYLLMQTLLFVQDNAQHSGQDQHFTFSTRFELHPTREVFRPQRTVSKPHTKGPQSAIVTGPAGQEIWTDQYGRVKVQFGWDRYGKMDENSSCWIRVSYPWAGKGFGMIQIPRIGQEVLVDFKNGDPDLPIIVGRTYNQDTMPPWGLPGMASQSGIFSHSLYGGPTNGNMLRFDDKTGAEEVKFHAEKDLNTTVKNNETHTVMVDRTKTIIKNETNSIGEDRNTTVTKNDGLSVKLAQTINIGTTYRLDVGDQFTLRCGNAALVLHKDGSIEFCGKQLMLHTSDVMQLIGKGIDMNPDGGTAVTADDIAPLLTSE

SEQ ID NO: 43721 - protein, 373 aa, Salmonella typhimurium
SLIKPVFHLFLETLRYIFPTVFKHQGFCFFGNLVAFLISKRTVNIINYTVARHRFCEVIARYAIHKFANPPFFAGKNRFSCCHRFYSHHAKCFFNLRWHNNQIGYMIEVMHLVRRLPPSHNTIRSNLFCGVQYFLLILCFFTLAACIRVANNDKFNITSGTLFERLQKQQDAFIRRNSPGIQENGGIFRNILLTKIILWVSFISLSTKTIRHNTNSSGGQSFFIKRFKKLTGHDNFCIIIRKFWFKCIMHVHNQFCIRIALSDLPIQFHTIMNNNDAIFLGSHFISNIKDALGIGWVETSPFLKKTLINFTKPDVMNITVIVYFIIFRIASILYTSNSIRYSFCNLVNPGFYRSRTTRRNKYRSNSKYDFFNH

SEQ ID NO: 43722 - protein, 259 aa, Salmonella typhimurium
LDNFIVIYFILKLRGCNIWNNIVMNCSIIIKDIITHIFSHKSKKWQYFKQIFTKLRWHRAGRFVIETWATPCVKPRTYNTAILEGIGNLNSGISNSMARAIPDADILAKSSQSPSFRKRNNKCFMNPLEDIKFNFLKAPFFSAIKGANNTVFFNIFLIIHSLFVHIKIDDSKLTVTAKVIKIFAPTMEEANIRQKVQKWLDVIVQILNRTIDCNDIFHSQGQRRLSGRRTRKKNNTIFSRSFRNKLQNIGVSYEVNAAH

SEQ ID NO: 43723 - protein, 314 aa, Salmonella typhimurium
LTCSLVLRQTHNHELRRRQDDKGDHKQDQPQLHQRCHVQARFRLSEFVRQRGSDAVARHIQRRAVELVSVADDKSDRHRFTQSTAQPQHNAADHAIFGERHDAPDNFPGSTADTVSGLFHHYRCLLEDVAHNRRNVGDDHDGEDDARRQNADTKGRAGEQRADKRNVGKNIADRLLEVRRKQRREDKQPPHAVHDTGNCRQQFNGDAERTLPAWRQLGKQGNAETDRNGDQQCDKGGHQRAINGHQSAVDIVWRVPFLSPKKETKFLNTWPGGDDQDDNTAQHQHNQRSQFYQRAENHVAFFTRRVKSRLGCSH

SEQ ID NO: 43724 - protein, 238 aa, Salmonella typhimurium
LLRKPFLLHLRIFRRRFHLVERGINFLQRVVVFAYRNAPFSVVVRIAGAFIHDGVIRIVFPLTNRGDIAKHALKTVVFQIGKGVIAVIGDRRDSLLFILQIALMRCTVFQTDFFAFQIGKSVISPFTRDDYRRTFVIGLAKGDLLLTFGRHIHTGDHRIKLFEAAGDQTIKALVSEALRLHLFADRVGDINIETNNFIIGIDKLIGRIGGGGAKMCSGGNGSGVNGEAGQHDNKFFFH

SEQ ID NO: 43725 - protein, 663 aa, Salmonella typhimurium
LYCFYNIHLAICYLTERNLQIRKTTFNHFLNKSTDIDRRKEDKIFMCNQIIQLKCNEIHQISGGFRVKAEEGTARGLTDPFANNILNFSRYHYCSFAAIGEFMTNITRHCSTNMLHKVNDIFFSWRPQCERFHNLHITHGNTFAQTLQNFRYTLYRGMSEHFFKIRKFRFQLVQHMFCFLNTEIFIDVARQRHRQTVVKLIKRVPQHIAKLPEFLPLFMRYPEILTATLLMDCWINTKGHDFIGIIYHSHQIKIDRKLFNTDLINQQYDAVIVQALAIAQYFRQAHAIINKELTTTLRKLSFFQIFTPALRHKYQRYGLCRDFIEIANQSRRPFFFLNTERLLAFAGFRFGGATFCFTEFKIEEYANHRNNKNRQWESRQSSHNGQNSRNNQYKWVVQQLRHDIPPHIIAIAIYAGHDKTGTNRNQQCGDLGDKTITNGQHGISRQGGGQIHTMASHPHRNTANKVHKDNNDAGNSVTFDKLHRTVKGTVKLAFPFQYASPFARGIRINNTGLQIGINTHLFTGHTIQRKSGRDFRDTFTFGNNDKLDHGDNREDNKTHRQAIANNELPERGDNFTGIGFNQDKTTGTDRCQTKERGNQYRRKRKTEDSVNVERPHKHQYRQYDIQCDQEINQIGRWNDEHRNDHHHYQNQFRSTSTVKRKQH

SEQ ID NO: 43726 - protein, 201 aa, Salmonella typhimurium
SSLWRFGAGKTFALKKRFDQFDQVGAANTPARRDPAEVEIAYRTGNRDSRQIDRIRFRPVAQITFEHIQAAVDFFPLAQQFRFRLLRRRARLFAYRHQRCIHNAVSQRFKLANFKRCHRVTREHRWRDIQQFNIFRDDRRIEPVLPFLRHQRWHLTQRVVLRHAVIRLVRFINKFEGNTLFEQQNRDFAHKRAGVATDEFH

SEQ ID NO: 43727 - protein, 104 aa, Salmonella typhimurium
MKSKLLPCALLLATSFAWAAPATTGIDQYELKSFIADFTHFKPGDTVPQMYRTDEYNIKQWKLRNLPAPDAGTHWTYMGGAYVLINDTDGKIIKAYDGEIFYHR

SEQ ID NO: 43728 - protein, 508 aa, Salmonella typhimurium
LSGLRVLFADAEHVNQLFMRLFVQRRRGGNRLFHKAGVLLRGGVNQANRAVNLRNTVSLLTAGLPNLAYHIHLFDVIHHAINQGAGFLHQVHPFLSLTGIFNQITDFTGRGALLRQLANLSGDNGKTTSMFARTRRFNRRVQRQNIGLKGNGINDIDDIRHTICRIVNDAHFLRHLIHHLPIVFHYAGGAGREFGRFTGMVSCVFNRGGNLFHRRRRFFNRAGLFFRTRGQILVTGDNLRRRRGDTLRTVLHFLYDIQQTRFHRHCLQYACFIFIVGGDMASQIAIGNRLGKAYRFIKRSGNGTYDIPSHYASGSDAYQRQGNQRPVSFKISFDLHARVVHLRILNGDKFLNFVLIDLLHLHRSGHHLLNGRLTIMALNILQNTESGLQVLLARFTDLGNDFLRSRIVTIAGKLIQRRNTLAYFIQLFLRTLAPAPLFIQHELLRDDEIIKIIDQIGFHRGGIIIGNNVLHTRISPIKAKQRQSGTHHHENNEAKGHKFTYFNVMQKH

SEQ ID NO: 43729 - protein, 450 aa, Salmonella typhimurium
VFIGFDYGTANCSVAIMRDGHPQLLTMENNSALLPSMLCAPTREAVSEWLYRHHDVPATDEETQALLRRAIRYNREEDIEVGAQSVQFGLASLAHYIDDPQEVWFVKSPKSFLGASGLKPQQVALFEDLVCAMMVHIRHTAHSQLPEAITQAVIGRPINFQGLGGDDANRQAQGILERAAKRAGFQEVVFQYEPVAAGLDYEATLREEKRVLVVDIGGGTTDCSMLLMGPQWRQRADRENSLLGHSGCRVGGNDLDIALAFKNLMPLLGMGGETEKGIALPVLPWWNAVAINDVPAQSDFYSSANGRLLNDLVRNAREADKVALLLKVWRQRLSYRLVRCAEESKIALSGQADVTARLPFISDDLAVAISQQGLEAALDQPLTRILEQVQLALDSAQEKPDVIYLTGGSARSPLIKKALSEQLPGIPVAGGDDFGSVTAGLARWAEVVFR

SEQ ID NO: 43730 - protein, 1953 aa, Salmonella typhimurium
MNPMQKKKLISIAIALTLQSYYIPAIAAENNDDEKECPSNISSLPKEKRAKLSPTCLATPENDNHWGWVAGGVAALVAGVAIGVENNGGGDSNHSYTPPKPDNGGDVTPPDDGGNVTPPDDGGNVTPPDDGGDDNVTPPDDSGDDDVAPPDDSGDDDVTPPDDSGDDDVTPPDDSGDGDVTPPDDSGDDDVTPPDDSGDDDVTPPDDSGDDDVTPPDDSGDDDVTPPDDSGDDDVTPPDDSGDDDDTPPDDSVITFSNGVTIDKGKDTLTFDSFKLDNGSVLEGAVWNYSEQDNQWQLTTADGKTLNVTGWDVTDANAAVIEGTQENGLYWKYDSRGYLIIADDNTTVISGDDQAHNSDRGMDISGQDRTGVIISGDRTVNTLTGDSSVTDGATGMVISGDGTTNTISGHSTVDNATGALISGNGTTTNFAGDIAVSGGGTAIIIDGDNATIKNTGTSDISGAGSTGTVIDGNNARVNNDGDMTITDGGTGGHITGDNVVIDNAGSTTVSGADATALYIEGDNALVINEGNQTISGGAVGTRIDGDDAHTTNTGDIAVDGAGSAAVIINGDNGSLTQAGDLLVTDGAMGIITYGTGNEAKNTGNATVRDADSVGFVVAGEKNTFKNKGDIDVSLNGTGALVSGDMSQVTLDGDINVVSVQDSEGVFSSATGVSVSGDSNAVDITGNVNISADYGQDDLAAGAPPLTGVVVGGNGNTVTLNGALNIDDNDLSATGGQYLDVVGLSVTGDDNDVEIDGGINITHSEDPLDGTSADITGISVSGNSTVTLNGHSTIDTNTVVGGHVVLARVNNGGSLILGDDSVVDVNVSYIPTGYYTYNALLMADGEGTSIENKGDITSHGVYSVIRADNGSEVSNSGDILVYATSSNSSEDRAAITRASGEGSAVHNKAGGDITLISDQTPQGSGGIEVYPLKWYTHTFYAMMASDYGDVVNDEGATIHLQGAGVYGVTASRGKALNEGNIYLDGLVPTLDDENNITSTSYWQPSSLYLTSSGMVAGSTDADGDATAINTGNITVNNAGFGMMALNGGTAINQGVITLTADDGVTGQADELVGMAALNGGVVINDTSGVINIDADYGQAFLSDSSSYIINNGSINLNGSPMDDTDSHMGGTPTDKIWIQSLPGSGDSDTRTSDTGFFTAGTLANYGTETLNGDVDVNGGWLYNEAGASLTVNGTVTINGGANALANYGTLDADAISTWHSLFNEADGSITTDLLTLNGDVTFYNNGDFTGSIAGTSYQQEIVNTGDMTVAEDGKSLVSGSFYFYNEEDATLTNSGSAVEGGENTIINLTRANDSLTQVNSGTITATNGYSAITTVNGSNDPKWIWNTATGVINGINPDAPLINLGRGYNFGNQGTINVQGDNAVAISGGTSSYVINLVNSGTINVGTEQGKEDGTNGTGLIGIKGNGNATTINNTADGVINVYADDSYAFGGKTKAIINNGEINLLCDSGCDIYAPGTTGTQNDHNGTADIVIPDATTAPTEGSIPTPPADPNAPQQLSNYIVGTNADGSSGTLKANNLVIGDNVKVDTGFTSGTADTTVVVDNAFTGSNIQGADNITSTSVVWNAQGSQDADGNVDVTMTKNAYADVATDSSVSDVAQALDAGYTNNELYTSLNVGTTAELNSALKQVSGAQATTVFREARVLSNRFTMLADAAPQIKDGLAFNVVAKGDPRAELGNDTQYDMLALRQTLDLTASQNLTLEYGIARLDGDGSKTAGDNGLTGGYSQFFGLKHSMAFDEGLAWNNSLRYDVHNLDSSRSVAYGDVNKIADSDMRQQYLEFRSEGAKTFTMMGDALKVTPYAGVKFRHTMEDGYKERSAGDFNLSMNSGNETAVDSIVGLKLDYAGKDGWSATATLEGGPNLSYSKSQRTASLQGAAGQSFGVDDGQKGGGVNGLATIGVKYSSNDTALHLDAYQWKEDGISDKGFMLNVKKTFR

SEQ ID NO: 43731 - protein, 367 aa, Salmonella typhimurium
LFSPVSVIFLLLTPQFTYRHHADAGNQTDYAAKQTDSARRDIAAFFHIDVRFLTRSLVFDMSKLVNALMEADTFFVTAIARMTDRHWPDAANVTELRRTVAPGFRPFTAKMVETPALTVAFVAKFFGKTACVEVWTTFAMLMNQTAIGKGWTIFRIQLRRRAVSDDMRDGRQEVMRVWRTTWNIDNRFARDFLQTDSAGWVYASRSNAAPCRAGTDSDNRGCAISGFADVIHDRLAGNHAVDTVIFWDRTIHHQNILPFILLQSVMFVFFDLVTECGGKHLVVFQRDGLQNEVFNGWVCSTKQFGTTGTLLSANPDNGRTLWIGYRFCHFCGGFATEPHSSGQCCTKLHEITTVNAVRSDESIISSH

SEQ ID NO: 43732 - protein, 344 aa, Salmonella typhimurium
LRQLFNSTTLFCHFMLVGNIGHTTRHQFFLPIFFIKERGYGFTYLIKYLQKGCMFFMTKQRIQTYNIGQRIHFMWLLQRKHQPRRLLRIKRFGKRIRQQCTHKQVSGAQHFKLRQASKLAKLQARTAGVIRVNIGRTLNKIQYHQSTLIAITGYPVRVNLHFMFTLDKLPIAGAQAWFRCFPKKPGLQRTINPCLEGLRIGLLFNVLKRLQLFPHDLFQVFTTKQFAHKDITGVRKATRLTKIFRAAMYANLDLLRLRSLILQHAFKTVRITGFFFIIATVTKLRQRRHFVRRLDKFLYFRPWRRILCGLLYFRLLRISMLGRILMRCLPGQYSGKNTGGARNH

SEQ ID NO: 43733 - protein, 782 aa, Salmonella typhimurium
MKISSGAINFSTIPNQVKKLITSIREHTKNGLTSKITSVKNTHTSLNEKFKTGKDSPIEFALPQKIKDFFQPKDKNTLNKTLITVKNIKDTNNAGKKNISAEDVSKMNAAFMRKHIANQTCDYNYRMTGAAPLPGGVSVSANNRPTVSEGRTPPVSPSLSLQATSSPSSPADWAKKLTDAVLRQKAGETLTAADRDFSNADFRNITFSKILPPSFMERDGDIIKGFNFSNSKFTYSDISHLHFDECRFTYSTLSDVVCSNTKFSNSDMNEVFLQYSITTQQQPSFIDTTLKNTLIRHKANLSGVILNEPDNSSPPSVSGGGNFIRLGDIWLQMPLLWTENAVDGFLNHEHNNGKSILMTIDSLPDKYSQEKVQAMEDLVKSLRGGRLTEACIRPVESSLVSVLAHPPYTQSALISEWLGPVQERFFAHQCQTYNDVPLPAPDTYYQQRILPVLLDSFDRNSAAMTTHSGLFNQVILHCMTGVDCTDGTRQKAAALYEQYLAHPAVSPHIHNGLFGNYDGSPDWTTRAADNFLLLSSQDSDTAMMLSTDTLLTMLNPTPDTAWDNFYLLRAGENVSTAQISPVELFRHDFPVFLAAFNQQATQRRFGELIDIILSTEEHGELNQQFLAATNQKHSTVKLIDDASVSRLATIFDPLLPEGKLSPAHYQHILSAYHLTDATPQKQAETLFCLSTAFARYSSSAIFGTEHDSPPALRGYAEALMQKAWELSPAIFPSSEQFTEWSDRFHGLHGAFTCTSVVADSMQRHARKYFPSVLSSILPLAWA

SEQ ID NO: 43734 - protein, 111 aa, Salmonella typhimurium
SAIGHNHSDVAGALQDAICTTFCTRHNALHARAFVYENFRNFQIVNVSAIVVFSVSNGRFQNFLDQYSRFLVGVGQNIQSLRHFLTANQVSNKANLLSRRTSMAMFSDSFH

SEQ ID NO: 43735 - protein, 92 aa, Salmonella typhimurium
LFLLRFFISSVAAISTSRCEFTQFVTDHFVGNKYRNVLTTIMDSDGQTDHVRKDRTTGPSAQGLLVSAFHRFLYLLQQVQVNKRTFLERTWH

SEQ ID NO: 43736 - protein, 316 aa, Salmonella typhimurium
SIILNIIRCGKCIRIEMFYREIFHHKVLFTGIDHHRTTCIYIEELRIKIIHHGMMDKSLSSPPFGVITRNNRDIMNVVVLFTPLLRCRVKIFTILHSPVNVDLTTTFSLNEMLNHFNWSESSTACKEDYRSVTFTNKKCSARPFNAHKSIFLLPKNERTHLTIGNIPYMQLNTIRLITISDRITASYTFIMIDILPWKEANFCCWWCALQSHNIANQYSTIYLAWDNFFCLSSFRKKMRILKGGFRFTAAGYFITLSKNITFGVNNFSRQQIGLTDTTITRFAAMFKMDTSRRSIEDFILSTGKFNIWKNLNNMRH

SEQ ID NO: 43737 - protein, 933 aa, Salmonella typhimurium
LCPRFTYPLGIHRQRLFQHIQRHRLRQTAVHTGLQATLFLFRQRVRRHADDRQRQPKLTDTLRQAIAVHVRHVHIAQNNIDSIFTQHIQSVYAIIGCLTLIPQRSQLIGQQAAIDRMIVNDQNHHVVIICSFIRRRQCAGKRFTIQLNTIDTRQQRGQLMHRRHTMHPLARRSFQRNPDMTAAKDDRRPPLPGMLQRVIDNQNIVRGGFLPFITLRMNAATRQTGLNKLAQRSIAHRQPTAGSGESFHALFHRVLRAIKRDAQRKLASHARLRIDGNIAVHHADQFFANRQPQTGPLKVTLYAGSHLEEGIEQANHLFCRNTDAGIPHANAEIIPITAHMQHDAANIGKLNGVAQQVNNLLTHRVAVQRYRHVRLNKTIQTELLTHHQRQIIGGDMVHHLSRKFARLNLLFRLNFREVENVADNFQQQTGGVIHRRDQTFHAFWQLFGLQQIEIADDTVQRCAQFMADRRKEHGFRLACLLRRLRHLLQRLFHFDARTHIYQHANRDVFIAIAGMDEANLQIGIIAGQYINKVDLLAANNLRQALSVFMREHVQVGVRQFVTQNIDTINSAQNTDPHRRGGDDFTVELFMLFQTLSIALRRNKNSPLIHPRKRKQPCAHQHVQQDSVQDKNTNTLQDIYRHRIDNTERGWRQAFFEYQFAKTWRITKPGTLLHPARLRFNNAVRTGQRNQRMAVLINNSDAHRQTAGREKIFHTDGLLDAQQRLQTVGQIHRRQRIKVAHALTRALAYPEKVIPTFFLRRVAVFHNPLMRFRIIALHGHFTQAEIRHTEVIAANQENAVKIIRRKVVAPVTHKPGQRLQRSAPGGAHRRTVVGKRFKVRHHHFVITRTRRHDAVFRRTVLGDIFELFHHIRRALDKTLRLIGAKVELLTNFRLPLVQGIDDVKHRNKGDEPNERRSEVARDFQRSSKGSKVFQ

SEQ ID NO: 43738 - protein, 876 aa, Salmonella typhimurium
LLVSVIRNVVIAFRFRGDILIPFRHAAVDSVEFFVIYRFSNALQTHHVFIFRRADKDNALGITSHYADLGHTGTHQSTGIRDHHDLVAIVYLYRTDNGTVALGHFDRDNALRRTRLGRVLVRCGTLPVAVLRYGQNSAFAAWDDQRDDFIVSRQLNTAHTGRGTPHRTDGVFFEAHHFTRGREQHDFVRTRSQVNANQLVAVVEVHRDNTGGTRTAEFGQRRFLHGTAGGRHKDVDAFFILTNRQNRGDTFVGFQRQQVDDRTTARAAAGFRQLIDLHPVQTAPAGEAEDGVMGVSHQQAVDKVFFFNTRGRFTFPTTTLRFVICQRLIFDVTLVRQRHDNIFLANQIFDINIGAVGGDFGTTLIAELIANLHLFADHFHQAIGAAQNVQQFSNLLQQLFVFVEQFFMLQAGQFLQTQIQNRLRLLFSQVVLTVTHAKFWLQPFRTRGVITSALQHRSNVAQIPRTRNQRRFCFRRRWRAANQFDNRVDVGQRNRQSFKDMRTVTGFTQFKNSPTRHHFTAVAHERNDIFQVHDLRLAVMQRHHVNTEGNLLGLGVEIIKHHLAHRIAFHFNHDAHPVFVGFVTQRADAFHAFIFHQLGDFLDQARFVHLIGNFMDDDGFTARFGVSFNFRAGANVHFATTGAVGFFDTTTTVDDRGGREVRPRNMFHQPFNADVFVVDIRQAAVNHFRQVVRRDIRRHTYCDTGRTVHQQIRNFGRHDVRNFFRTVIVIHEIHRLFFEIGHQFVGDFRQTDLRITHCRRGVAVNRTEVTLTIHQHVTQREWLRHTNDGVIHCGIAVGMVFTDYVTNDTGRFFIGFVPVIAQYVHGVKYATVYRLQAISDIRQRTANNDRHRIIQIGALQLLLNVDRCNFSRKVAH

SEQ ID NO: 43739 - protein, 315 aa, Salmonella typhimurium
MTVLFHQLKIIMIVRPQQHWIRLIFVWHGSVLSKIFSRLLLNFLLSIAVIIMLPWYTMLGIKFTLAPFSILGVAIAIFLGFRNNACYARYVEARHLWGQLMIASRSILREVKTTLPDERGIEDFVRLQIAFAHCLRMTLRRQPQTQVLGNYLDQEALQKVVASHSPANRILLLMGEWLAIRRRSGKLSDILFHSLNNRLNDMSSVLAGCERIANTPVPFAYTLILHRTVYLFCIMLPFALVVDLHYMTPFISVLISYTFIALDALAEELEDPFGTENNDLPLDAICNAIEIDLLQMNDERDIPAKRIPDKRYQLT

SEQ ID NO: 43740 - protein, 239 aa, Salmonella typhimurium
SHKIKCLGQRRITFRIMLVPANYSVAKALPGLRGECEQNPVRQARFVFRNVSTPQMPSHVERLLRKSVTYLFRQDYAKKAIFGNTIRRNSQRLVIQRSGVTRLLPLRRGAFHTGFVIRRVADNKIKAYRLARRPTLNIVSMHRYSMRPGRVSNVFLRLHGSPGIQFHGVNRHIVIRPLRQHRQQTASSTDIQNSLYIRDRRPRPENTVSSHFHRTPIVCDKKLFKRKSVTTKNGARLRH

SEQ ID NO: 43741 - protein, 148 aa, Salmonella typhimurium
MDRPYRIQEGCFVLPETFTDRSVNIFILEGNERTSPSLNISRDTLKPDEDLPAYIDRQIALMKKNLGQHRVLSRAPAQAGTGNDALMGEQIAATHKSGKTEVYQRQAGFIATPGKVLVFTLTSPRPFDDKADLLWNTWLAGFQPDKNE

SEQ ID NO: 43742 - protein, 705 aa, Salmonella typhimurium
LLNISVQALNSIGIGLAIYPLQFRRKTRQQIDALFQRQKITLRRAAPNLPRHHAQYARRVWQCPLGSNTPARLADTHQLYIAANKGAVGILWVHRHMRQAFFAEHRFLQILNVKANVQVVHLLTLTQGVIAVAHRVFLKNRRQYIRKRRIVFNVPFKLRQHRDQSRQLLFALGGCQQEQNRVEIALLRHNTVLTQIVGENGRRDAEFGVSPTIGINTWRGQQFTGVDKILVIRIALKAMPFRPGFKTEETTIAGNGLRRICLPRLAVNHQWDKGLKQFATGENGFTRVNAQRNALRPQAATALPFVDFGIDIQRRKQRVERTGSMQHEGVVQAFVRAKTRLAANMVIFFVDLRGLEPRLLLMYRLGHKDPRVVFIKLQPQRRGIRHHIDKLLIAYPRGVKQNVIAEMPDFIHHLTGVVNSAVIGTQLNDRQAERTRRIGAFRHHVTNLVAQVRFIKTVRINATDKTKRVTRRFKIDWRRPGLNQGAVVVGFVIITIKQHQIAARQQGVGDHFIRRRSPIQHKVGFIRIKHFCRKFLRVFGRTFMYQIAKFHIGVTHIRTKQVFTKKVIKMAACGMFSKKFAMLVPRASKSTIPHVDILGQGAIKGRQKFRFVATGSVFQLQPFLRVPDYYRRNADRRADGFIRKHKHRQVKTGAFKQRQNTATAVGSGNDDCGHIGKVGTVQRHYVSVGGETGNEFTAGGNIHFH

SEQ ID NO: 43743 - protein, 457 aa, Salmonella typhimurium
MEKTRADGLPLPQRYGAILTIIIGISMAVLDGAIANVALPTIATDLHASPASSIWIVNAYQIAIVVSLLSLSFLGDMFGYHRIYKCGLVVFLLSSLFCALSDSLQMLTLARIAQGFGGAALMSVNTALIRLIYPQRHLGRGMGINSFIVAVSSAAGPTIAAAILSISSWKWLFLINVPLGIIALILAIRFLPANIAHDTKPRFDLPSAVMNALTFGLLITALSGFAQGQSLTLIGAELLVLVVVGFFFVRRQLSLPVPLLPIDLLRIPLFSLSIGTSICSFCAQMLAMVSLPFYLQTVLGRSEVETGLLLTPWPLATMVMAPLAGYLIERLHAGLLGALGMVIMAAGLFALVMLPASPSDLNIIWPMILCGAGFGLFQSPNNHTIITSAPRERSGGASGMLGTARLLGQSTGAALVALMLNQFGDSGTHLSLLAAAILAILAAVVSGLRITQPRVQA

SEQ ID NO: 43744 - protein, 306 aa, Salmonella typhimurium
LYLFFNKNFPLFGIWRHSLGWSIKSYFYGYPITFFFRCSNNSFSLYILPGKALRYPGNTIARSDHCQCCCQIGHKGNIYIMGNSVNRRCICYYSSQTLKRKVRELNLIIYIPQRFRFVWFTEWNCIKPKTNAHKVIFIIMHMWVMVTQQKLISLPHHFFARIQVRKTKTKFCNFITLFQMRYKRERQSMRCKNKTGLFITCGLKGITFQCVQGVDQFGKLVCKYFSGLGKGDSPFTSFKKGRTHPFFERLYPTTKCGLSHISGRRFEIQRFFSQTVFEPCFEVMPILHKLQPYHWMSFIYISSIIH

SEQ ID NO: 43745 - protein, 122 aa, Salmonella typhimurium
MKIALPLSLNLPSMGLRLSTVIERCRLVSRSEYLISAGIRKNSPNGSIHPNSLTKKFVAARKLTGINFSENPPPFHEIRSLSGRLYKDAYGEGFAQKLLGHTSENTTKLYLDERDNKAYVML

SEQ ID NO: 43746 - protein, 357 aa, Salmonella typhimurium
LAHPRQRYRLAQLPNRHRIMRAVVISGNCVEVRQAVPVLVSRTDIQTQQAGFLMIAQRLLRRACGGKLRDAVFCFETIRQPRRLTTRRHRNHIAFHPTMRLEIVRHAADGIYRIPQVNVPITIEIDRIFFIGRWHKLAVAHRARKGTFQIERIVLLIARHEQEGFQLAGEIFRPARIVKQRRQRVQNPRFPHDTSPAGFHADDAHDDLRRYAVYLPGAVQRVFILIPERDAVLHVIRRNKLFAVAQPGAIWSGGRLSGRRLSVHQTQDVIQSFRLREDLLQLLTVETVFTDHFINELLRIRVVGEVAAHLHDVMLRLKQKAAGRRARRRLSLGRFWRAATGSKQYAKWKRYITTLEH

SEQ ID NO: 43747 - protein, 338 aa, Salmonella typhimurium
MFQQQNDWETRENAFAAFAMGPLTDFWRQREEAEFIGVGNIPVRFVRFRNDSNDRTIVICPGRIESYVKYAELAYDLFHLGFDIFIIDHRGQGRSGRMLSDPHRGHVDHFNDYVEDLAAFWQQEIEPGPWRKRYILAHSMGGAIATLFLQRHRVRCDAIALTAPMFGIVIRLPSFMVRHILDWAEGHQRIREDYAIGTGQWRALPFGMNALTHSRQRYQRNLRFYADEPQLRVGGPTWHWVREGILAGEQVLAGASDDTTPTLLIQAEEERVVDNRTHDRFCEIRAAAGYPCEGGKPLVIKGAYHEILFEKDAMRSVALNAIVEFFNKPNLSSGNRFA

SEQ ID NO: 43748 - protein, 179 aa, Salmonella typhimurium
LLAEREVKGSQQSTAFFVRFRSSGNGNIQTTNAVDFIVVDFWEDDLLTDTHAVVTTTVELSGQATEVTDTRNSNSDQALKELPHAFATQSYFTADRIALTDFEACNRFACFGDQRFLTGDCCQVCCCVIQQFLVSDRFTNTHVQGDLLDPRDLHDRIVVKLSHEFVNYFVFVVIMQFRH

SEQ ID NO: 43749 - protein, 289 aa, Salmonella typhimurium
MRPRRSMLFIPGANAAMLSTSFVYGADAVMFDLEDAVALREKDTARLLVHHALQHPFYQDVEKVVRINPLNTPFGLADLEAVVRGGADIVRLPKTDSKNDVLELEAQVERIERECGREVGSTRLMAAIESAKGVVNAVDIATSSPRMVAIALAAFDYVMDMGTSRGDGTELFYARCAVLHAARVAGIAAYDVVWSDINNEEGFLKEVQLAKGLGFNGKSLVNPRQIELLHQAYSPTRKEVEHAYEVIAAAEEAESRGLGVVSLNGKMIDGPIIDHARKVVALSASGIRD

SEQ ID NO: 43750 - protein, 714 aa, Salmonella typhimurium
VSRIIMLIPTGTSVGLTSVSLGVIRAMERKGVRLSVFKPIAQPRAGGDAPDQTTTIVRANSTLPAAEPLKMSHVESLLSSNQKDVLMEEIIANYHANTKDAEVVLVEGLVPTRKHQFAQSLNYEIAKTLNAEIVFVMSQGTDTPEQLNERIELTRSSFGGAKNTNITGVIINKLNAPVDEQGRTRPDLSEIFDDSSKAQVIKIDPAKLQESSPLPVLGAVPWSFDLIATRAIDMARHLNATIINEGDIKTRRVKSVTFCARSIPHMLEHFRAGSLLVTSADRPDVLVAACLAAMNGVEIGALLLTGGYEMDARISKLCERAFATGLPVFMVNTNTWQTSLSLQSFNLEVPVDDHERIEKVQEYVANYVNAEWIESLTATSERSRRLSPPAFRYQLTELARKAGKRVVLPEGDEPRTVKAAAICAERGIATCVLLGNPDEINRVAASQGVELGAGIEIVDPEVVRESYVARLVELRKSKGMTEPVAREQLEDNVVLGTLMLEQDEVDGLVSGAVHTTANTIRPPLQLIKTAPGSSLVSSVFFMLLPEQVYVYGDCAINPDPTAEQLAEIAIQSADSAIAFGIEPRVAMLSYSTGTSGAGSDVEKVREATRLAQEKRPDLMIDGPLQYDAAVMADVAKSKAPNSPVAGRATVFIFPDLNTGNTTYKAVQRSADLISIGPMLQGMRKPVNDLSRGALVDDIVYTIALTAIQASQQQQ

SEQ ID NO: 43751 - protein, 506 aa, Salmonella typhimurium
MSVVTESKTARKWAMPDTLVIIFFVAILTSIATWVVPVGMFDSQEVQYQVDGQTKTRKVVDPHSFRIVTNEAGEAQYHRVQFFTTGDERPGLMNFPFEGLTSGSKFGTAVGIIMFMLVIGGAFGIVMRTGTVDNGILALIRHTRGNEVLFIPVLFVLFSLGGAVFGMGEEAVAFAIIIAPLMVRLGYDSITTVLVTYIATQIGFASSWMNPFCVVVAQGIAGVPVLSGSGLRIVVWIVATLIGLVFTLVYASRVKKNPLLSRVHESDRYFREQQDEVVQRPFTFGDWLVLLVLTGVMIWVVWGVIVHAWFIPEIASQFFTMGVVIGLIGVIFRLNGMTVNVMASSFTEGARMMIAPALLVGFAKGILLLVGNGEAGEPSVLNTLLNSIAHGISGLNNAIAAWFMLLFQAVFNFFVTSGSGQAALTMPLLAPLGDLVGVNRQVTVLAFQFGDGFSHIIYPTSASLMATLGVCRVDFRNWLKVGASLLGLLFIMSSVVVIGAQMMGYH

SEQ ID NO: 43752 - protein, 307 aa, Salmonella typhimurium
LRGLRDLPLKLKHCVKQRCFSWRLENGVTATGNEGHLRLRQQPVQLGNFFNGEKFIPVAVQHRNVDFFHLFFRQRCGRCPHWPDTFEERAPVVFLLWMMHVLIKFNHPGRIRSHFIQIAIRQLPLRHSFTIKNFHPLHVMGRSKAMRCAADDSSARIRVSAGLQNDHAAIAVTHHQRFFQLQRFNKSRHIFRHQIIAKRSLRVIGSMSTTVRHDDAKISRCLFRSLPTFRRQTTTVNQQQRRPLALFNVMNFDTIRFHKFIFVHRCCSIYKYNIDNKNKCFKNMIHNTSPITFRVKDHIIQIEQKHQ

SEQ ID NO: 43753 - protein, 885 aa, Salmonella typhimurium
MAHYKKFRLSTLAAVVGIVLAVGPENSYAEAPIQFNTRFLDVKDDASLDLSRFSRKGYIMPGSYHLQVLVNQSQIVQDNVITYSVDNNDPDNTYPCLSPELVSLLGLKPEIADKMIWINAGQCLQPDQLEGMETQTDLSQSTLTVIIPQAYLEYSDEEWDPPSRWDEGIPGVLFDYNVNSQWRHAEHDDGDEYDISGNGTVGANLGAWRLRADWQANYRHENDSEDKDNFGSSSEQNWDWNRYYAWRAIPQLRAQLTLGEGSLESDIFDGFNYVGGSLITDDQMLPPNLRGYAPDISGVARTNAKVTVTQRGRVIYESQVPAGPFRIQDINETVSGDLHVKIEEQSGQVQEYDVSTASIPFLTRPGQVRYKLAAGRPQDWDHNMEGGFFTSAEASWGIANGWSLYGGAIGEQDYQALALGLGRDLALLGAFSVDVTHSRATLPEGSAYGDGTIQGNSFRASYAKDFDDIDSRLTFAGYRFSEENYMTMDEFIDTHNDDNDRQRTGHDKEMYTLTYSQNFSAINVNAYINYTHRTYWNQPNQDSYNLTLSHYFDVGEVRGISLSVNGFRNEYDNERDDGVYVSLSIPWGNNRTLSYNGSFSDDNNSNQVGYYERIDDRNNYQINAGRADNGATLDGYYRYQASYADIDVSANYQEGDYTSGGLNIQGGATLTAKGGALHRTSVNGGSRLLVDVGDEANVPISGYSTPVYTNAFGKAVIVDVNDYYRNQVKIDITQLPEDAEAILSIAQATLTEGAIGYRRMEVLSGKKAMASIRLRDGGTPPFGAEVYNSRQQQLGIVGEDGSVYLIGINPGERLQVTWEGKTQCEATLPDPLPGDLFSGLLLPCIGDASSPEATQPEEKPLLQLHTQRRTSSTQPEALSSRYPTH

SEQ ID NO: 43754 - protein, 561 aa, Salmonella typhimurium
SRPNIIDNNLTTVAAKLVNVQFISQFYLPHAVIRPTGRINIKCDAIQQRAAADRLHHHLEVTLAHQTLLQTETTIERFREHLPPRSGIPQQLRHFHRHLRRAWTIGDHLALQQGRIEPFRHQLAKPLLKLLEFMLFQRQSRRHRMTAELDHQIRVKGIQPFQRIAHMQPLNRTAAFRAVARRRKGDHRAVKTLFNARRQNSDHALMPFRMIHRQTARKRFTTALKLFAQDKRFRLHPLLYFFARLVKRIQLAGQNTRFAEVIAQQRHANGHIIQPAGGIQARPQREAITGGKLLRIAIRYLQQRFNSRTAFPGTNTTPLPGQNTVVSVQRHNVCYRTQRHIQQLRQIRRRDVALVEPSFVAQKCSQRQHQVKRHADARQRLRREFAVAQIGINNRFGIRQRVAWQVVIGHDHRNPQRLCMRYAGVGNAVVYGDDKLRAARLRLIDHFRATVAVFKAIRHQITDVVTSQRTHSQYARSTGRAVGVKIANNNNAGTFAKGVVEDLHRVIYAAKLLPGQHSFHAALQFAGATNAPAGITSWRKIGGEFRRLISLAPTKLSLLFH

SEQ ID NO: 43755 - protein, 524 aa, Salmonella typhimurium
MQEFYARVWNTKEMNLLKSLAAVSSMTMFSRVLGFARDAIVARIFGAGMATDAFFVAFKLPNLLRRIFAEGAFSQAFVPILAEYKSKQGEEATRIFVAYVSGLLTLALAVVTVAGMLAAPWVIMVTAPGFADTADKFALTTQLLRITFPYILLISLASLVGAILNTWNRFSIPAFAPTFLNISMIGFALFAAPYFNPPVLALAWAVTVGGVLQLVYQLPYLKKIGMLVLPRINFRDTGAMRVVKQMGPAILGVSVSQISLIINTIFASFLASGSVSWMYYADRLMEFPSGVLGVALGTILLPSLSKSFASGNHDEYCRLMDWGLRLCFLLALPSAVALGILAKPLTVSLFQYGKFTAFDAAMTQRALIAYSVGLIGLIVVKVLAPGFYSRQDIKTPVKIAIVTLIMTQLMNLAFIGPLKHAGLSLSIGLAACLNASLLYWQLRKQNIFTPQPGWMWFLMRLIISVLVMAAVLFGVLHIMPEWSQGSMLWRLLRLMAVVIAGIAAYFAALAVLGFKVKEFVRRTA

SEQ ID NO: 43756 - protein, 394 aa, Staphylococcus aureus
MAKEKFDRSKEHANIGTIGHVDHGKTTLTAAIATVLAKNGDSVAQSYDMIDNAPEEKERGITINTSHIEYQTDKRHYAHVDCPGHADYVKNMITGAAQMDGGILVVSAADGPMPQTREHILLSRNVGVPALVVFLNKVDMVDDEELLELVEMEVRDLLSEYDFPGDDVPVIAGSALKALEGDAQYEEKILELMEAVDTYIPTPERDSDKPFMMPVEDVFSITGRGTVATGRVERGQIKVGEEVEIIGLHDTSKTTVTGVEMFRKLLDYAEAGDNIGALLRGVAREDVQRGQVLAAPGSITPHTEFKAEVYVLSKDEGGRHTPFFSNYRPQFYFRTTDVTGVVHLPEGTEMVMPGDNVEMTVELIAPIAIEDGTRFSIREGGRTVGSGVVTEIIK

SEQ ID NO: 43757 - protein, 652 aa, Staphylococcus aureus
MRVTELLTKDTIAMDLMANDKNGVIDELVNQLDKAGKLSDVASFKEAIHNRESQSTTGIGEGIAIPHAKVAAVKSPAIAFGKSKEGVDYQSLDMQPAHLFFMIAAPEGGAQTHLDALAKLSGILMDENVREKLLHASSPEEVLAIIDEADDEVTKEEEAEAEAQQVATAEQSSKQSNEPYVLAVTACPTGIAHTYMARDALKKQADKMGIKIKVETNGSSGIKNHLTEQDIENATGIIVAADVHVETDRFDGKNVVEVPVADGIKRPEELINKALDTSRKPFVARDGQRKGNSNDSQEKLSPGKAFYKHLMNGVSNMLPLVISGGILMAIVFLFGANSFNPKSSEYNAFAEQLWNIGSKSAFALIIPILSGFIARSIADKPGFASGLVGGMLAISGGSGFIGGIIAGFLAGYLTQGVKAMTRKLPQALEGLKPTLIYPLLTVTATGLLMIYVFNPPASWLNHLLLDGLNNLSGSNIVLLGLVIGAMMAIDMGGPFNKAAYVFATGALIEGNAAPITAAMIGGMIPPLAIATAMLIFRRKFTKEQRGSIIPNYVMGMSFITEGAIPFAAADPLRVIPSMMIGSGIGGAIALGLGSRITAPHGGIIVIVGTDGAHLLQTLIALLVGTLVSALIYGLIKPKLTETEIEASKSMDE

SEQ ID NO: 43758 - protein, 195 aa, Staphylococcus aureus
MKEIVIASNNQGKINDFKVIFPDYHVIGISELIPDFDVEETGSTFEENAILKSEAAAKALNKTVIADDSGLEVFALNGEPGIYSARYAGENKSDEANIEKLLNKLGNTTDRRAQFVCVISMSGPDMETKVFKGTVSGEIADGKYGENGFGYDPIFYVPKLDKTMAQLSKEQKGQISHRRNAINLLQAFLEGEKNV

SEQ ID NO: 43759 - protein, 266 aa, Staphylococcus aureus
MNKPIGVIDSGVGGLTVAKEIMRQLPNETIYYLGDIGRCPYGPRPGEQVKQYTVEIARKLMEFDIKMLVIACNTATAVALEYLQKTLSIPVIGVIEPGARTAIMTTRNQNVLVLGTEGTIKSEAYRTHIKRINPHVEVHGVACPGFVPLVEQMRYSDPTITSIVIHQTLKRWRNSESDTVILGCTHYPLLYKPIYDYFGGKKTVISSGLETAREVSALLTFSNEHASYTEHPDHRFFATGDPTHITNIIKEWLNLSVNVERISVND

SEQ ID NO: 43760 - protein, 277 aa, Staphylococcus aureus
MAIKKYKPITNGRRNMTSLDFAEITKTTPEKSLLKPLPKKAGRNNQGKLTVRHHGGGHKRQYRVIDFKRNKDGINAKVDSIQYDPNRSANIALVVYADGEKRYIIAPKGLEVGQIVESGAEADIKVGNALPLQNIPVGTVVHNIELKPGKGGQIARSAGASAQVLGKEGKYVLIRLRSGEVRMILSTCRATIGQVGNLQHELVNVGKAGRSRWKGIRPTVRGSVMNPNDHPHGGGEGRAPIGRPSPMSPWGKPTLGKKTRRGKKSSDKLIVRGRKKK

SEQ ID NO: 43761 - protein, 668 aa, Staphylococcus aureus
MVINLNDKQTKTSKEGLISVSHPLAAKIGKDVLDQGGNAMDAVIAIQLALNVVEPFASGIGGGGYLLYYEQSTGSITAFDARETAPEHVDKQFYLDDSGEYKSFFDMTTHGKTVAVPAIPKLFDYIHKRYAKLSLEDLINPAIELAIEGHAANWATEKYSRQQHARLTKYHETAQVFTHENQYWREGDWIVQPELGKTFQILREQGFNAFYKGDIAKQLVNVVKACGGTIILEDLANYDIQIKAPISATFKDYDIYSMGPSSSGGITVIQILKLLEHVDLPSMGPRSVDYLHHLIQAMHLAYSDRAQYLADDNFHEVPVQSLIDDDYLKARSTLINSNKANIDIEHGVVSDCISHTDVEENHTETTHFCVIDKEGNIASFTTSIGMIYGSGITIPGYGVLLNTTMDGFDVVDGGINEIAPYKRPLSNMAPTIVMHHGKPILTVGAPGAISIIASVAQTLINVLVFGMDIQQAIDEPRIYSSHPNRIEWEPQFSQSTILALIARGHAMEHKPDAYIGDVHGLQVDLNTRDASGGADDTREGTVIGGDVLSIRKQPLPSPKIYDNDTHRVYFNDMQLPLYAEQVRWMHDKYWVDESVIRIIFPEVSVHIEDLRSYEIAGKNYIDIAWLARKKGYQVTLKDDSLYLTDETYHSVKANTNAYYRYDRDSITR

SEQ ID NO: 43762 - protein, 2481 aa, Staphylococcus aureus
MNLFRQQKFSIRKFNVGIFSALIATVTFISTNPTTASAAEQNQPAQNQPAQPADANTQPNANAGAQANPAAQPANQGGQANPAGGAAQPAGQGNQADPNNAAQAQPGNQAAPANQAGQGNNQATPNNNATPANQTQPANAPAAAQPAAPVAANAQTQDPNASNTGEGSINTTLTFDDPAISTDENRQDPTVTVTDKVNGYSLINNGKIGFVNSELRRSDMFDKNNPQNYQAKGNVAALGRVNANDSTDHGNFNGITKTVNVKPDSELIINFTTMQTNSKQGATNLVIKDAKKNTELATVNVAKTGTAHLFKVPTDADRLDLQFIPDNTAVADASRITTNKDGYKYYSFIDNVGLFSGSHLYVKNRDLAPKATNNKEYTINTEIGNNGNFGASLKADQFKYEVTLPQGVTYVNDSLTTTFPNGNEDSTVLKNMTVNYDQTANKVTFTSQGVTTARGTHTKEVLFPDKSLKLSYKVNVANIDTPKNIDFNEKLTYRTASDVVINNAQPEVTLTADPFSVAVEMNKDALQQQVNSQVDNSHYTTASIAEYNKLKQQADTILNEDANHVETANRASQADIDGLVTKLQAALIDNQAAIAELDTKAQEKVTAAQQSKKVTQDEVAALVTKINNDKNNAIAEINKQTTSQGVTTEKDNGIAVLEQDVITPTVKPQAKQDIIQAVTTRKQQIKKSNASLQDEKDVANDKIGKIETKAIKDIDAATTNAQVEAIKTKAINDINQTTPATTAKAAALEEFDEVVQAQIDQAPLNPDTTNEEVAEAIERINAAKVSGVKAIEATTTAQDLERVKNEEIFKIENITDSTQTKMDAYKEVRQAATARKAQNATVSNATDEEVAEANAAVDAAQTEGLHDIQVVKSQQEVADTKAKVLDKINAIQTQAKVKPAADTEVENAYNTRKQEIQNSNASTTEEKEAAYTELDAKKQEARTNLDAANTNSDVTTAKDNGIAAINQVQAATTKKSDAKAEIAQKASERKTAIEAMNDSTTEEQQAAKDKVDQAVVTANADIDNATANTDVDNAKTTNEATIAAITPDANVKPAAKQAIADKVQAQETAIDANNGSTTEEKEAAKQQVQTEKTAADAAIDAAHSNVEVEAAKNAEIAKIEAIQPATTTKDNAKQAIATKANERKTAIAQTQDITAEEIAAANADVDNAVTQANSNIEAANSQNDVDQAKTTGETSIDQVTPTVNKKATARNEITAILNNKLQEIQATPDATDEEKQAADAEANTENGKANQAISAATTNAQVDEAKANAEAAINAVTPKVVKKQAAKDEIDQLQATQTNVINNDQNATNEEKEAAIQQLATAVTDAKNNITAATDDNGVDTAKDAGKNSIQSTQPATAVKSNAKNEVDQAVTTQNQAIDNTTGATTEEKNAAKDLVLKAKEKAYQDILNAQTTNDVTQIKDQAVADIQGITADTTIKDVAKDELATKANEQKALIAQTADATTEEKEQANQQVDAQLTQGNQNIENAQSIDDVNTAKDNAIQAIDPIQASTDVKTNARAELLTEMQNKITEILNNNETTNEEKGNDIGPVRAAYEEGLNNINAATTTGDVTTAKDTAVQKVQQLHANPVKKPAGKKELDQAAADKKTQIEQTPNASQQEINDAKQEVDTELNQAKTNVDQSSTNEYVDNAVKEGKAKINAVKTFSEYKKDALAKIEDAYNAKVNEADNSNASTSSEIAEAKQKLAELKQTADQNVNQATSKDDIEVQIHNDLDNINDYTIPTGKKESATTDLYAYADQKKNNISADTNATQDEKQQAIKQVDQNVQTALENINNGVDNGDVDDALTQGKAAIDTIQVDATVKPKANQAIEAKAEDTKESIDHSDQLTAEEKTEALAMIKQITDQAKQGITDATTTAEVEKAKAQGLEAFDNIQIDSTEKQKAIEELETALDQIEAGVNVDADATTEEKEAFTNALEDILSKATEDISDQTTNAEIATVKNSALEQLKAQRINPVVKKNALEAIREVVNKQIEIIKNADADASAKEIARTDLGRYFDRFADKLDKTQTNTEVAELQNVTIPAIEAIVPQNDPDANDTNNGTDNNDATANSNANATPENTGQPNVSETTDNGKADASPTTPNNSDAATGETTVTSATDDAKDKPQANNNSSADASTNSPTMDNDVTSKPEVESTNNGTTDKPVTETDNATPAESTTNNNSTTTATNENAPTGSTATAPTTASTEAASSADSKDNASVNDSKQNAEVNNSAESQSTNGKVAQPKSENKAKAEKDGRDSTNQSMVESTTETLPSADITEPNVPSNTSKDKEESTTNQTDAGQLKSETNVASNEADKSPSKADTEVSNKPSTSASSEAKDKMTSTNVSQKDDTATADTNDTQKSVGPVANNKAKDMQTNDTQKSVGSAANNKATQNDGANASPATVSNGSHSMHQDMLNVTKPEENKANAKSDQQGKVNKPKQQAKTLPDTGMSHNDDLPYAELALGAGMAFLIRRFTKKDQQTEE

SEQ ID NO: 43763 - protein, 686 aa, Staphylococcus aureus
MDNGDVDDALTQGKAAIDAIQVDATVKPKANQAIEVKAEDTKESIDQSDQLTAEEKTEALAMIKQITDQAKQGITDATTTAEVEKAKAQGLEAFDNIQIDSTEKQKAIEELETALDQIEAGVNVDADATTEEKEAFTNALEDILSKATEDISDQTTNAEIATVKNSALEQLKAQRINPVVKKNALEAIREVVNKQIEIIKNADADASAKEIARTDLGRYFDRFADKLDKTQTNTEVAELQNVTIPAIEAIVPQNDPDANDTNNGTDNNDATANSNANATPENTGQPNVSETTDNGKADASPTTPNNSDAATGETTVTSATDDAKDKPQANNNSSADASTNSPTMDNDVTSKPEVESTNNGTTDKPVTETDNATPAESTTNNNSTTTATNENAPTGSTTTAPTTASTEAASSADSKDNASVNDSKQNAEVNNSAESQSTNGKVAQPKSENKAKAEKDGRDSTNQSMVESTTETLPSADITEPNVPSNTSKDKEESTSNQTDAGQLKSETNVASNEADKSPSKADTEVSNKPSTSASSEAKEKMTSTNVSQKDDTATADTNDMQTSVGSVANNKAKDMQTNDTQTSVGPVANNKATQNDGANASPATVSNGSHSMHQDMLNVTKTEENKANAKSDQQGKVNKPKQQAKTLPDTGMSHNDDLPYAELALGAGMAFLIRRFTKKDQQTEE

SEQ ID NO: 43764 - protein, 140 aa, Staphylococcus aureus
MAKKVDKVVKLQIPAGKANPAPPVGPALGQAGVNIMGFCKEFNARTQDQAGLIIPVEISVYEDRSFTFITKTPPAPVLLKKAAGIEKGSGEPNKTKVATVTKDQVREIANSKMQDLNAADEEAAMRIIEGTARSMGIVVE

SEQ ID NO: 43765 - protein, 325 aa, Staphylococcus aureus
MSVDKYGKVYLIGAGPGNPNYLTKKAERLIREADVILYDRLVNPLILQYANLTTEIIDVGKKPYAKHIQQEKINECIVEAARRYNKVVRLKGGDPAIFGRVQEEVDTLNNFNIAFEIVPGVTSASAAVATMQTGLTMRAVAKSVTFSTGHFKDSEENEVDVNALVNGGTLAIYMGVKRLGKIIAQIQQYTDIDYPIAIVFQASCFNEFVVKGRLSNIVGKLEHYAIEAKPGICIIGEVVGYTENVSTTSNPTQQFYVVSGSRHDALMLCEHLYDEGYGCLLNPNDTSNGTYHSSQYDYYDAFIKQQENVTYISTDRADANTVLCH

SEQ ID NO: 43766 - protein, 104 aa, Staphylococcus aureus
METKEKIKVTTIDELTPLIGKKVIVKGKEVGLFLTESGTIHAIHNICPHKQGPLSEGTVSGEYVFCPLHDQKIDLNTGIVQEPDEGCVDVYEVEVTDGNVYICL

SEQ ID NO: 43767 - protein, 901 aa, Staphylococcus aureus
MTTQLNINSVIENAKRVITPLSPISIFAARNPWEGLEADTFEDVAKWLRDVRDVDIFPNKALIESAVARGELDESVFNQLVTDMLLEHHYNIPQHYINLYIDNIKTLKDVPASYMNHSNVDVVADLLLEKSKRDMAESYHHYDVRPMSDAIIDEQGEPLSEQVNRQMIKWTKLYIDQFLSSWTMPKREQSFYHAWLHLAQHDHSFTKAQRQVIKGLPNDPEMTIESVLTYFSIDQEDYQAYVEGHLLALPGWAGMLYYRSQQHHFEQHLLTDYLAIRLVVEQLLVGDEFKSVTKDCESRSENWFKQTVASLCYYSDMPSDVLLQHDVNEIQTFIHFAATMNKNVFKNLWLIAWEMTYESQLKQKIKAGHESVAGALDVNQVNVSENDNANQPHSVLLNDTQAVDENNSELNQVGTSTKAQIAFCIDVRSEPFRRHIEAAGPFETIGIAGFFGLPIQKDAVDEQFKHDSLPVMVPPAYRIKEFADRYDMNVYRQQQQTMSSMFYTFKLMKNNVMPSLLLPELSGPFLSLSTIVNSIMPRKSRASLQKIKQKWLKKPETKLTIDREFDRTSDLPVGFTEQEQIDFALQALKLMDLTEAFAPFVVLAGHASHSHNNPHHASLECGACGGASSGFNAKLLAMICNRPNVRQGLKQSGVYIPETTVFAAAEHHTSTDTLAWVYVPDTLSALALDAYESLNDAMPMISEQANRERLDKLPTIGRVNHPVEEAQRFASDWSEVRPEWGLAKNASFIIGRRQLTKGIDLEGRTFLHNYDWRKDKDGKLLNTIISGPALVAQWINLQYYASTVAPHFYGSGNKATQTVTSGVGVMQGNASDLMYGLSWQSVMAADRTMYHSPIRLLVVIQAPDYVVARLFANNEHFARKVSNHWLRLMSVNEEGRFKSWI

SEQ ID NO: 43768 - protein, 372 aa, Staphylococcus aureus
MSNKDIRVVVGMSGGVDSSVTAHVLKEQGYDVIGIFMKNWDDTDENGVCTATEDYNDVIEVCNQIGIPYYAVNFEKEYWDKVFTYFLDEYKKGRTPNPDVMCNKEIKFKAFLDHAMNLGADYVATGHYARIHRHEDGHVEMLRGVDNNKDQTYFLNQLSQQQLSKVMFPIGDIEKSEVRRIAEEQGLVTAKKKDSTGICFIGEKNFKTFLSQYLPAQPGDMITLDGKKMGKHSGLMYYTIGQRHGLGIGGDGDPWFVVGKNLKDNVLYVEQGFHHDALYSDYLIASDYSFVNPEDNDLDQGFECTAKFRYRQKDTKVFVKRENDHALRVTFAEPVRAITPGQAVVFYQGDVCLGGATIDDVFKNEGQLNFVV

SEQ ID NO: 43769 - protein, 644 aa, Staphylococcus aureus
MVTALSDVNNTDNYGAGQIQVLEGLEAVRKRPGMYIGSTSERGLHHLVWEIVDNSIDEALAGYANKIEVVIEKDNWIKVTDNGRGIPVDIQEKMGRPAVEVILTVLHAGGKFGGGGYKVSGGLHGVGSSVVNALSQDLEVYVHRNETIYHQAYKKGVPQFDLKEVGTTDKTGTVIRFKADGEIFTETTVYNYETLQQRIRELAFLNKGIQITLRDERDEENVREDSYHYEGGIKSYVELLNENKEPIHDEPIYIHQSKDDIEVEIAIQYNSGYATNLLTYANNIHTYEGGTHEDGFKRALTRVLNSYGLSSKIMKEEKDRLSGEDTREGMTAIISIKHGDPQFEGQTKTKLGNSEVRQVVDKLFSEHFERFLYENPQVARTVVEKGIMAARARVAAKKAREVTRRKSALDVASLPGKLADCSSKSPEECEIFLVEGDSAGGSTKSGRDSRTQAILPLRGKILNVEKARLDRILNNNEIRQMITAFGTGIGGDFDLAKARYHKIVIMTDADVDGAHIRTLLLTFFYRFMRPLIEAGYVYIAQPPLYKLTQGKQKYYVYNDRELDKLKSELNPTPKWSIARYKGLGEMNADQLWETTMNPEHRALLQVKLEDAIEADQTFEMLMGDVVENRRQFIEDNAVYANLDF

SEQ ID NO: 43770 - protein, 825 aa, Staphylococcus aureus
MSDPTLFDYSMIKGTVEAILFQNSDNFYTVLKVDTIETNEDFDTMPTVVGFLPNIVEGDVYTFKGQVVDHPRYGKQLKAETFEKEMPQTKEAIISYLSSDLFKGVGKKTAQNIVNTLGDNAINDILDDHSVLEKVSGLSKKKQKQIAEQISANQESEKIMIRLHDLGFGPKLSMAIYQFYLGDTLTILDRNPYQLIYDIKGIGFNKADQLARNIGIAYNDNERLKAALLYTLEEECIKQGHTYLPINVVIDLTVDVLNYQDEEVIEPEKLDEMLQYLNEEKRLIIDNEQVAIPSLYYSEIKSVQNLFRIKTHTNKLTEIEQSDLQMHIGEIEDANQVNYAASQKEALQTAINSKVMLLTGGPGTGKTTVIKGIVELYAEIHGLSLDYDDYVNDDYPVVLAAPTGRASKRLQESTGLEAMTIHRLIGWNQDTKPEDILENEINARLIIIDEMSMVDTWLFHQFLSAVPLDAQLIFVGDEDQLPSVGPGQVFKDLIESKAIPRVNLTEVYRQQDGSSIIELAHRMKLGQKIDITQRFHDRSFINCQANQIPTVVEKVVTSAVNKGYTMADIQVLAPMYKGNAGIKRLNQVLQDILNPKKKDTREIEFGDVVFRKGDKVLQLVNRPNDNIFNGDIGVIVGIFWAKENALNKDVLVVDFEGNEITFTKQDMMELTHAYCTSIHKSQGSEFPIVIMPIVKQYFRMLQRPILYTGLTRAKTSLVLLGDPEAFDIGLKTNGQARLTQLCTLLKNYFNSEDEEMLENTATNDTGASQTTIDDQVEAPMSSNDSGEVTSDSTKTDINVLTEATMFKIDPMINMGEITPYDFIER

SEQ ID NO: 43771 - protein, 486 aa, Staphylococcus aureus
MSNNFKDDFEKNRQSIDTNSHQDHTEDVEKDQSELEHQDTIENTEQQFPPRNAQRRKRRRDLATNHNKQVHNESQTSEDNVQNEAGTIDDRQVESSHSTESQEPSHQDSTPQHEEEYYNKNAFAMDKSHPEPIEDNDKHETIKDAENNTEHSTVSDKSIAEQSQQPKPYFATGANQANTSKDKHDDVTVKQDKDESKDHHSGKKGAAIGAGTAGVAGAAGAMGVSKAKKHSNDAQNKSNSDKSNNSTEDKASQDKSKDHHNGKKGAAIGAGTAGLAGGAASKSASAASKPHASNNASQNHDEHDNHDRDKERKKGGMAKVLLPLIAAVLIIGALAIFGGMALNNHNNGTKENKIANTNKNNADESKDKDTSKDASKDKSKSTDSDKSKEDQDKATKDESDNDQNNANQANNQAQNNQNQQQANQNQQQQQQRQGGGQRHTVNGQENLYRIAIQYYGSGSPENVEKIRRANGLSGNNIRNGQQIVIP

SEQ ID NO: 43772 - protein, 312 aa, Staphylococcus aureus
MKQFVNLGKSDVEVFPIALGTNAVGGHNLYPNLDEEQGKDVVRQAINHGINLLDTAYIYGPERSEELVGEVVKEYPREQIKIATKGSHEFDENQEVHQNNQPEYLKQQVENSLKRLQTDYIDLYYIHFPDDNTPKDQAVAALQELKEQGKIKAIGVSNFTLDQLKEANKDGYVDVVQLEYNLLHRENEAVLQYCVDHLITFIPYFPLASGILAGKYDENTKFSDHRTTRRDFIPGVFEENVRRVKALESLAAAHQTSIANIVLAFYLTRPAIDVIIPGAKRAEQVIENIKAADIVLSDDEIQYIDELFPIED

SEQ ID NO: 43773 - protein, 1207 aa, Staphylococcus aureus
MIDVNNFHYMKIGLASPEKIRSWSFGEVKKPETINYRTLKPEKDGLFCERIFGPTKDWECSCGKYKRVRYKGMVCDRCGVEVTKSKVRRERMGHIELAAPVSHIWYFKGIPSRMGLLLDMSPRALEEVIYFASYVVVDPGPTGLEKKTLLSEAEFRDYYDKYPGQFVAKMGAEGIKDLLEEIDLDEELKLLRDELESATGQRLTRAIKRLEVVESFRNSGNKPSWMILDVLPIIPPEIRPMVQLDGGRFATSDLNDLYRRVINRNNRLKRLLDLGAPGIIVQNEKRMLQEAVDALIDNGRRGRPVTGPGNRPLKSLSHMLKGKQGRFRQNLLGKRVDYSGRSVIAVGPSLKMYQCGLPKEMALELFKPFVMKELVQREIATNIKNAKSKIERMDDEVWDVLEEVIREHPVLLNRAPTLHRLGIQAFEPTLVEGRAIRLHPLVTTAYNADFDGDQMAVHVPLSKEAQAEARMLMLAAQNILNPKDGKPVVTPSQDMVLGNYYLTLERKDAVNTGAIFNNTNEVLKAYANGFVHLHTRIGVHASSFNNPTFTEEQNKKILATSVGKIIFNEIIPDSFAYINEPTQENLERKTPNRYFIDPTTLGEGGLKEYFENEELIEPFNKKFLGNIIAEVFNRFSITDTSMMLDRMKDLGFKFSSKAGITVGVADIVVLPDKQQILDEHEKLVDRITKQFNRGLITEEERYNAVVEIWTDAKDQIQGELMQSLDKTNPIFMMSDSGARGNASNFTQLAGMRGLMAAPSGKIIELPITSSFREGLTVLEYFISTHGARKGLADTALKTADSGYLTRRLVDVAQDVIVREEDCGTDRGLLVSDIKEGTEMIEPFIERIEGRYSKETIRHPETDEIIIRPDELITPEIAKKITDAGIEQMYIRSAFTCNARHGVCEKCYGKNLATGEKVEVGEAVGTIAAQSIGEPGTQLTMRTFHTGGVAGSDITQGLPRIQEIFEARNPKGQAVITEIEGVVEDIKLAKDRQQEIVVKGANETRSYLASGTSRIIVEIGQPVQRGEVLTEGSIEPKNYLSVAGLNATESYLLKEVQKVYRMQGVEIDDKHVEVMVRQMLRKVRIIEAGDTKLLPGSLVDIHNFTDANREAFKHRKRPATAKPVLLGITKASLETESFLSAASFQETTRVLTDAAIKGKRDDLLGLKENVIIGKLIPAGTGMRRYSDVKYEKTAKPVAEVESQTEVTE

SEQ ID NO: 43774 - protein, 230 aa, Staphylococcus aureus
MNYSPKQGVRSHGLPHDPFKSSTVPRPIGWISTVSKDGKDNLAPYSQYQNLTWDPPMVMFAANQSVLGDHERKDTVKNAEETGWFVWNMATYDLREAVNLSSKALPPEEDEFEYAGVTKEACIEAPGYRVKESPVHFECEYVQTIRIPTGDPVSTVDIVIGRVAQVHIDDKVILDNGKLDIKSIKPIARLGYYDYTVVNEIFEMKAPAASKEELAGLEGRNFDNQSDEKR

SEQ ID NO: 43775 - protein, 525 aa, Staphylococcus aureus
MTTPTLKNPLTGEIISKGESKEEITKDPINELTEYGPETIAPGHRDEFDPKLPTGEKEEVPGKPGIKNPETGDVVRPPVDSVTKYGPVKGDSIVEKEEIPFKKERKFNPDLAPGTEKVTREGQKGEKTITTPTLKNPLTGEIISKGESKEEITKDPINELTEYGPETITPGHRDEFDPKLPTGEKEEVPGKPGIKNPETGDVVRPPVDSVTKYGPVKGDSIVEKEEIPFEKERKFNPDLAPGTEKVTREGQKGEKTITTPTLKNPLTGEIISKGESKEEITKDPVNELTEFGGEKIPQGHKDIFDPNLPTDQTEKVPGKPGIKNPDTGKVIEEPVDDVIKHGPKTGTPETKTVEIPFETKREFNPKLQPGEERVKQEGQPGSKTITTPITVNPLTGEKVGEGQPTEEITKQPVDKIVEFGGEKPKDPKGPENPEKPSRPTHPSGPVNPNNPGLSKDRAKPNGPVHSMDKNDKVKKSKIAKESVANQEKKRAELPKTGLESTQKGLIFSSIIGIAGLMLLARRRKN

SEQ ID NO: 43776 - protein, 189 aa, Staphylococcus aureus
MSLINKEILPFTAQAFDPKKDQFKEVTQEDLKGSWSVVCFYPADFSFVCPTELEDLQNQYEELQKLGVNVFSVSTDTHFVHKAWHDHSDAISKITYTMIGDPSQTITRNFDVLDEATGLAQRGTFIIDPDGVVQASEINADGIGRDASTLAHKIKAAQYVRKNPGEVCPAKWEEGAKTLQPGLDLVGKI

SEQ ID NO: 43777 - protein, 517 aa, Staphylococcus aureus
MKYMIGVDIGTTSTKSVLYDENGAFIMKHQIGYDLHTPNVDVSEENPDELFDAVLMTIKYIMRESKVNQDDIKFVSFSAQMHSLIAMDQQHQRLTNNITWADNRAAKYATVINEVHDGNAIYQRTGTPIHPMSPLVKIFWMKHEWQDVFQRTAKFADIKTYIFYHLFDTYIIDYSMASATGMFNLETLDWDVGALELLGISKEMFPELVPTTYVMKGMKERYATLMGLNEDTPFVIGASDGVLSNLGVNSVGKGEVAVTIGTSGAIRTVIDKPRTDYKGRIFCYVLTEDHYVIGGPVNNGGVVLRWLRDELLASEVETAKRLGVDPYDVLTQIAKRVKPGADGLIFHPYLAGERAPLWNANARGSFFGLTLSHKKEHMIRAALEGVLYNLYTVYLALIEVMNETPNMIKATGGFAKSEVWRQMMSDIFDTELVVPESYESSCLGACVLGLKAVGDIEDFSIVSSMVGATNNHTPFEENVAVYQELVSIFINLSRSLTENYEQIADFQRQHMAENKTQ

SEQ ID NO: 43778 - protein, 961 aa, Staphylococcus aureus
MKSNLRYGIRKHKLGAASVFLGTMIVVGMGQEKEAAASEQNNTTVEESGSSATESKASETQTTTNNVNTIDETQSYSATSTEQPSKSTQVTTEEAPTTVQAPKVETEMKSQEDLPSEKVADKETTGTQVDIAQPSNVSEIKPRMKRSADVTAVSEKEVAEEAKATGTDVTNKVEVTESSLEGHNKDSNIVNPHNAQRVTLKYKWKFGEGIKAGDYFDFTLSDNVETHGISTLRKVPEIKSSTEDKVMANGQVINERTIRYTFTDYINNKKDLTAELNLNLFIDPTTVTKQGSQKVEVTLGQNKVSKEFDIKYLDGVKDRMGVTVNGRIDTLNKEEGKFSHFAYVKPNNQSLTSVTVTGQVTSGYKQSANNPTVKVYKHIGSDELAESVYAKLDDTSKFEDVTEKVNLSYTSNGGYTLNLGDLDNSKDYVIKYEGEYDQNAKDLNFRTHLSGYHKYYPYYPYYPYYPVQLTWNNGVAFYSNNAKGDGKDKPNDPIIEKSEPIDLDIKSEPPVEKHELTGTIEESNDSKPIDFEYHTAVEGAEGHAEGIIETEEDSIHVDFEESTHENSKHHADVVEYEEDTNPGGGQVTTESNLVEFDEESTKGIVTGAVSDHTTVEDTKEYTTESNLIELVDELPEEHGQAQGPIEEITENNHHISHSGLGTENGHGNYGVIDEIEENSHVDIKSELGYEGGQNSGNQSFEEDTEEDKPKYEQGGNIVDIDFDSVPQIHGQNNGNQSFEEDTEEDKPKYEQGGNIIDIDFDSVPQIHGFNKHNEIIEEDTNKDKPNYQFGGHNSVDFEEDTLPKVSGQNEGQQTIEEDTTPPTPPTPEVPSEPETPTPPTPEVPSEPGEPTPPKPEVPSEPETPVPPTPEVPSEPGKPVPPAKEEPKKPSKPVEQGKVVTPVIEINEKVKAVAPTKQKQSKKSELPETGGEESTNKGMLFGGLFSILGLVLLRRNKKNNKA

SEQ ID NO: 43779 - protein, 315 aa, Staphylococcus aureus
MAEQQTIMERLFHTLDEKAKTLNNENGQSFIENLGLAMEQVYTNERGLLEQSTLQDRRKAFQFAYLSLMQEEKIQANHQITPDSIGLILGFLVERFMNNQEELHIVDIASGAGHLSATVKEVLPEIAVMHHLIEVDPVLSRVSVHLANFLEIPFDVYPQDAIMPLPLEEADIVIGDFPVGYYPIDERSKEFKLGFEEGHSYSHYLLIEQAINALKDAGYAFLVVPSNIFTGEHVKQLEKYIATETEMQAFLNLPPTLFKNEKARKSILILQKKKSGETKPVEVLLANIPDFKNPSQFQGFMTELNQWMDTNRPKK

SEQ ID NO: 43780 - protein, 437 aa, Staphylococcus aureus
MTHYHFVGIKGSGMSSLAQIMHDLGHEVQGSDIENYVFTEVALRNKGIKILPFDANNIKEDMVVIQGNAFASSHEEIVRAHQLKLDVVSYNDFLGQIIDQYTSVAVTGAHGKTSTTGLLSHVMNGDKKTSFLIGDGTGMGLPESDYFAFEACEYRRHFLSYKPDYAIMTNIDFDHPDYFKDINDVFDAFQEMAHNVKKGIIAWGDDEHLRKIEADVPIYYYGFKDSDDIYAQNIQITDKGTAFDVYVDGEFYDHFLSPQYGDHTVLNALAVIAISYLEKLDVTNIKEALETFGGVKRRFNETTIANQVIVDDYAHHPREISATIETARKKYPHKEVVAVFQPHTFSRTQAFLNEFAESLSKADRVFLCEIFGSIRENTGALTIQDLIDKIEGASLINEDSINVLEQFDNAVVLFMGAGDIQKLQNAYLDKLGMKNAF

SEQ ID NO: 43781 - protein, 567 aa, Staphylococcus aureus
MKQSKVFIPTMRDVPSEAEAQSHRLLLKSGLIKQSTSGIYSYLPLATRVLNNITAIVRQEMERIDSVEILMPALQQAELWEESGRWGAYGPELMRLQDRHGRQFALGPTHEELVTSIVRNELKSYKQLPMTLFQIQSKFRDEKRPRFGLLRGREFIMKDAYSFHADEASLDQTYQDMYQAYSRIFERVGINARPVVADSGAIGGSHTHEFMALSAIGEDTIVYSKESDYAANIEKAEVVYEPNHKHSTVQPLEKIETPNVKTAQELADFLGRPVDEIVKTMIFKVDGEYIMVLVRGHHEINDIKLKSYFGTDNIELATQDEIVNLVGANPGSLGPVIDKEIKIYADNFVQDLNNLVVGANEDGYHLINVNVGRDFNVDEYGDFRFILEGEKLSDGSGVAHFAEGIEVGQVFKLGTKYSESMNATFLDNQGKAQPLIMGCYGIGISRTLSAIVEQNHDDNGIVWPKSVTPFDLHLISINPKKDDQRELADALYAEFNTKFDVLYDDRQERAGVKFNDADLIGLPLRIVVGKRASEGIVEVKERLTGDSEEVHIDDLMTVITNKYDNLK

SEQ ID NO: 43782 - protein, 257 aa, Staphylococcus aureus
MKTHKIFWLNLAAIIIISIVVSGGMFLAMKWEQIHLKDGLKKVLSTYPIKNLETLYEIDGHDNPHYENNDQDTWYIESSYSVVGSDELLKEDRMLLKVDKNTHKITGEYDTTTNDRKDATDSTYKSYPVKVVNNKIVFTKDVKDPALKQKIENNQFLIQSGDLTSILNSNDLKVTHDPTTDYYNLSGKLSNDNPNVKQLKRRYNIPSNASTKVELKGMSDLKGNNHQDQKLYFYFSSPGKNQIIYKESLTYNKLSEH

SEQ ID NO: 43783 - protein, 156 aa, Staphylococcus aureus
MPRKGSVPKRDVLPDPIHNSKLVTKLINKIMLDGKRGTAQRILYSAFDLVEQRSGRDALEVFEEAINNIMPVLEVKARRVGGSNYQVPVEVRPERRTTLGLRWLVNYARLRGEKTMEDRLANEILDAANNTGGAVKKREDTHKMAEANKAFAHYRW

SEQ ID NO: 43784 - protein, 502 aa, Staphylococcus aureus
MAIKAEEISALLRSQIENYESEMSVTDVGTVLQIGDGIALIHGLNDVMAGELVEFHNGVLGLAQNLEESNVGVVILGPYTGITEGDEVKRTGRIMEVPVGEELIGRVVNPLGQPIDGQGPINTTKTRPVEKKATGVMDRKSVDEPLQTGIKAIDALVPIGRGQRELIIGDRQTGKTTIAIDTILNQKDQGTICIYVAIGQKDSTVRANVEKLRQAGALDYTIVVAASASEPSPLLYIAPYSGVTMGEEFMFNGKHVLIVYDDLTKQAAAYRELSLLLRRPPGREAYPGDVFYLHSRLLERAAKLNDDLGGGSITALPIIETQAGDISAYVPTNVISITDGQIFLQSDLFFSGVRPAINAGQSVSRVGGSAQIKAMKKVAGTLRLDLASYRELESFAQFGSDLDEFTASKLERGKRTVEVLKQDQNKPLPVEHQVLIIYALTKGYLDDIPVVDITRFEDELNHWAESNATELLNEIRETGGLPDAEKFDTAINEFKKSFSKSE

SEQ ID NO: 43785 - protein, 179 aa, Staphylococcus aureus
MVKVANKYAKALFDVSLDTNNLETINEELTVINEAVKDKIEQLKMVDSNPTQTAEQRRELINGVFTDINPYIKNMMYVLADNRHISLIADVFKAFQSLYNGHYNQDFATIESTYELSQEELDKIVKLVTQQTKLSKVIVDTKINPDLIGGFRVKVGTTVLDGSVRNDLVQLQRKFRRVN

SEQ ID NO: 43786 - protein, 485 aa, Staphylococcus aureus
MSIRYESVENLLTLIKDKKIKPSDVVKDIYDAIEETDPTIKSFLALDKENAIKKAQELDELQAKDQMDGKLFGIPMGIKDNIITNGLETTCASKMLEGFVPIYESTVMEKLHKENAVLIGKLNMDEFAMGGSTETSYFKKTVNPFDHKAVPGGSSGGSAAAVAAGLVPLSLGSDTGGSIRQPAAYCGVVGMKPTYGRVSRFGLVAFASSLDQIGPLTRNVKDNAIVLEAISGADVNDSTSAPVDDVDFTSEIGKDIKGLKVALPKEYLGEGVADDVKEAVQNAVETLKSLGAVVEEVSLPNTKFGIPSYYVIASSEASSNLSRFDGIRYGYHSKEAHSLEELYKMSRSEGFGKEVKRRIFLGTFALSSGYYDAYYKKSQKVRTLIKNDFDKVFENYDVVVGPTAPTTAFNLGEEIDDPLTMYANDLLTTPVNLAGLPGISVPCGQSNGRPIGLQFIGKPFDEKTLYRVAYQYETQYNLHDVYEKL

SEQ ID NO: 43787 - protein, 475 aa, Staphylococcus aureus
MHFETVIGLEVHVELKTDSKMFSPSPAHFGAEPNSNTNVIDLAYPGVLPVVNKRAVDWAMRAAMALNMEIATESKFDRKNYFYPDNPKAYQISQFDQPIGENGYIDIEVDGETKRIGITRLHMEEDAGKSTHKGEYSLVDLNRQGTPLIEIVSEPDIRSPKEAYAYLEKLRSIIQYTGVSDVKMEEGSLRCDANISLRPYGQEKFGTKAELKNLNSFNYVRKGLEYEEKRQEEELLNGGEIGQETRRFDESTGKTILMRVKEGSDDYRYFPEPDIVPLYIDDAWKERVRQTIPELPDERKAKYVNELGLPAYDAHVLTLTKEMSDFFESTIEHGADVKLTSNWLMGGVNEYLNKNQVELLDTKLTPENLAGMIKLIEDGTMSSKIAKKVFPELAAKGGNAKQIMEDNGLVQISDEATLLKFVNEALDNNEQSVEDYKNGKGKAMGFLVGQIMKASKGQANPQLVNQLLKQELDKR

SEQ ID NO: 43788 - protein, 1009 aa, Staphylococcus aureus
MKKKNWIYALIVTLIIIIAIVSMIFFVQTKYGDQSEKGSQSVSNKNNKIHIAIVNEDQPTTYNGKKVELGQAFIKRLANEKNYKFETVTRNVAESGLKNGGYQVMIVIPENFSKLAMQLDAKTPSKISLQYKTAVGQKEEVAKNTEKVVSNVLNDFNKNLVEIYLTSIIDNLHNAQKNVGAIMTREHGVNSKFSNYLLNPINDFPELFTDTLVNSISANKDITKWFQTYNKSLLSANSDTFRVNTDYNVSTLIEKQNSLFDEHNTAMDKMLQDYKSQKDSVELDNYINALKQMDSQIDQQSSMQDTGKEEYKQTVKENLDKLREIIQSQESPFSKGMIEDYRKQLTESLQDELANNKDLQDALNSIKMNNAQFAENLEKQLHDDIVKEPDTDTTFIYNMSKQDFIAAGLNEGEANKYEAIVKEAKRYKNEYNLKKPLAEHINLTDYDNQVAQDTSSLINDGVKVQRTETIKSNDINQLTVATDPHFNFEGDIKINGKKYDIKDQSVQLDTSNKEYKVEVNGVAKLKKDAEKDFLKDKTMHLQLLFGQANRQDEPNDKKATSVVDVTLNHNLDGRLSKDALSQQLSALSRFDAHYKMYTDTKGREDKPFDNKRLIDMMVDQVINDMESFKDDKVAVLHQIDSMEENSDKLIDDILNNKKNTTKNKEDISKLIDQLENVKKTFAEEPQEPKIDKGKNDEFNTMSSNLDKEISRISEKSTQLLSDTQESKTIADSVSGQLNQLDNNVNKLHATGRALGVRANDLNRQMAKNDKDNELFAKEFKKVLQNSKDGDRQNQALKAFMSNPVQKKNLENVLANNGNTEVISPTLFVLLMYLLSMITAYIFYSYERAKGQMNFIKDDYSSKNHLWNNVITSGVIGTTGLVEGLIVGLIAMNKFHVLAGYRAKFILMVILTMMVFVLINTYLLRQVKSIGMFLMIAALGLYFVAMNNLKAAGQGVTNKISPLSYIDNMFFNYLNAEHPIGLALVILTVLVIIGFVLNMFIKHFKKERLI

SEQ ID NO: 43789 - protein, 693 aa, Staphylococcus aureus
MAREFSLEKTRNIGIMAHIDAGKTTTTERILYYTGRIHKIGETHEGASQMDWMEQEQDRGITITSAATTAAWEGHRVNIIDTPGHVDFTVEVERSLRVLDGAVTVLDAQSGVEPQTETVWRQATTYGVPRIVFVNKMDKLGANFEYSVSTLHDRLQANAAPIQLPIGAEDEFEAIIDLVEMKCFKYTNDLGTEIEEIEIPEDHLDRAEEARASLIEAVAETSDELMEKYLGDEEISVSELKEAIRQATTNVEFYPVLCGTAFKNKGVQLMLDAVIDYLPSPLDVKPIIGHRASNPEEEVIAKADDSAEFAALAFKVMTDPYVGKLTFFRVYSGTMTSGSYVKNSTKGKRERVGRLLQMHANSRQEIDTVYSGDIAAAVGLKDTGTGDTLCGEKNDIILESMEFPEPVIHLSVEPKSKADQDKMTQALVKLQEEDPTFHAHTDEETGQVIIGGMGELHLDILVDRMKKEFNVECNVGAPMVSYRETFKSSAQVQGKFSRQSGGRGQYGDVHIEFTPNETGAGFEFENAIVGGVVPREYIPSVEAGLKDAMENGVLAGYPLIDVKAKLYDGSYHDVDSSEMAFKIAASLALKEAAKKCDPVILEPMMKVTIEMPEEYMGDIMGDVTSRRGRVDGMEPRGNAQVVNAYVPLSEMFGYATSLRSNTQGRGTYTMYFDHYAEVPKSIAEDIIKKNKGE

SEQ ID NO: 43790 - protein, 373 aa, Staphylococcus aureus
MVYSASMVPATKGTLTGGIDVPGTYFYNRQLAYVIMSFIIVFFIAFLMNVKLLSNIKVQKGMIITIVSLLLLTLVIGKDINGSKSWINLGFMNLQASELLKIAIILYIPFMISKKMPRVLSKPKLILSPIVLALGCTFLVFLQKDVGQTLLILIILVAIIFYSGIGVNKVLRFGIPAVLGFLVVFVIALMAGWLPSYLTARFSTLTDPFQFESGTGYHISNSLLAIGNGGVFGKGLGNSAMKLGYLPEPHTDFIFAIICEELGLIGGLLVITLEFFIVYRAFQFANKTSSYFYKLVCVGIATYFGSQTFVNIGGISATIPLTGVPLPFISFGGSSMISLSIAMGLLLIVGKQIKVDQQRKKQQQKVDIRRQFN

SEQ ID NO: 43791 - protein, 1183 aa, Staphylococcus aureus
MAGQVVQYGRHRKRRNYARISEVLELPNLIEIQTKSYEWFLREGLIEMFRDISPIEDFTGNLSLEFVDYRLGEPKYDLEESKNRDATYAAPLRVKVRLIIKETGEVKEQEVFMGDFPLMTDTGTFVINGAERVIVSQLVRSPSVYFNEKIDKNGRENYDATIIPNRGAWLEYETDAKDVVYVRIDRTRKLPLTVLLRALGFSSDQEIVDLLGDNEYLRNTLEKDGTENTEQALLEIYERLRPGEPPTVENAKSLLYSRFFDPKRYDLASVGRYKTNKKLHLKHRLFNQKLAEPIVNTETGEIVVEEGTVLDRRKIDEIMDVLESNANSEVFELHGSVIDEPVEIQSIKVYVPNDDEGRTTTVIGNAFPDSEVKCITPADIIASMSYFFNLLSGIGYTDDIDHLGNRRLRSVGELLQNQFRIGLSRMERVVRERMSIQDTESITPQQLINIRPVIASIKEFFGSSQLSQFMDQANPLAELTYKRRLSALGPGGLTRERAQMEVRDVHYSHYGRMCPIETPEGPNIGLINSLSSYARVNEFGFIETPYRKVDLDTHAITDQIDYLTADEEDSYVVAQANSKLDENGRFMDDEVVCRFRGNNTVMAKEKMDYMDVSPKQVVSAATACIPFLENDDSNRALMGANMQRQAVPLMNPEAPFVGTGMEHVAARDSGAAITAKHRGRVEHVESNEILVRRLVEENGVEHEGELDRYPLAKFKRSNSGTCYNQRPIVAVGDVVEYNEILADGPSMELGEMALGRNVVVGFMTWDGYNYEDAVIMSERLVKDDVYTSIHIEEYESEARDTKLGPEEITRDIPNVSESALKNLDDRGIVYIGAEVKDGDILVGKVTPKGVTELTAEERLLHAIFGEKAREVRDTSLRVPHGAGGIVLDVKVFNREEGDDTLSPGVNQLVRVYIVQKRKIHVGDKMCGRHGNKGVISKIVPEEDMPYLPDGRPIDIMLNPLGVPSRMNIGQVLELHLGMAAKNLGIHVASPVFDGANDDDVWSTIEEAGMARDGKTVLYDGRTGEPFDNRISVGVMYMLKLAHMVDDKLHARSTGPYSLVTQQPLGGKAQFGGQRFGEMEVWALEAYGAAYTLQEILTYKSDDTVGRVKTYEAIVKGENISRPSVPESFRVLMKELQSLGLDVKVMDEQDNEIEMTDVDDDDVVERKVDLQQNDAPETQKEVTD

SEQ ID NO: 43792 - protein, 318 aa, Staphylococcus aureus
MLTKEFAQRVELSEKQVRKIVQHLEERGYQLSKTEYRGREATDFKEEDIELFKDIADKVKQTNSYDLAFDELEKEKDFLQVIVKNDDKNLPTNQNVAQLVEDLRLEIQKMREERHLLGQMMNQVHQQQQELKELQNQLTSKIDSNSESLKAIQTSQEAIQEAQASQAKVLAESTNKVEKNAVTEDKADSKDSKVAGVNTSTDAKTDTKAENAGDGTATKVDKEDQISATEAIEKASVEQSKNENAAETSNKEATVDADAQHDAEQQVAEAHAEASKQATSNDSLEAKAENDSTASQSEMSEPKPQEEKKGFFARLFNL

SEQ ID NO: 43793 - protein, 436 aa, Staphylococcus aureus
MTKPIVAIVGRPNVGKSTIFNRIVGERVSIVEDTPGVTRDRIYSSGEWLTHDFNIIDTGGIEIGDAPFQTQIRAQAEIAIDEADVIIFMVNVREGLTQSDEMVAQILYKSKKPVVLAVNKVDNMEMRTDVYDFYSLGFGEPYPISGSHGLGLGDLLDAVVSHFGEEEEDPYDEDTIRLSIIGRPNVGKSSLVNAILGEDRVIVSNVAGTTRDAIDTEYSYDGQDYVLIDTAGMRKKGKVYESTEKYSVLRALKAIERSNVVLVVIDAEQGIIEQDKRVAGYAHEQGKAVVIVVNKWDTVEKDSKTMKKFEDEVRKEFQFLDYAQIAFVSAKERTRLRTLFPYINEASENHKKRVQSSTLNEVVTDAISMNPTPTDKGRRLNVFYATQVAIEPPTFVVFVNDVELMHFSYKRYLENQIRAAFGFEGTPIHIIARKRN

SEQ ID NO: 43794 - protein, 260 aa, Staphylococcus aureus
MKSIKRIGLCISLLILIIFATSCGSNKITGDSKEEQIKKSFAKSLDKYPTENLEEFYDKEGYRDGEFEKDDKGTWLIRSEMKIQLKGENLESRGAVIEINRNTRTAKGNYIVREVVEDSDGMTHNHTKRYPVKMENNKMIPLKSIDDEKVKKEIEEFKFFVQYGNFKELENYKEDEVSYNPEVPIYSAQYQLKNSDYNVEQLRKRYNIPTQKAPKLLLKGSGNLKGSSVGYKNIEFTFVENKEENIYFTDSVYFNPSEDK

SEQ ID NO: 43795 - protein, 1157 aa, Staphylococcus aureus
MTLHAYLGRAGTGKSTKMLTEIKQKMKADPLGDPIILIAPTQSTFQLEQAFVNDPELNGSLRTEVLHFERLSHRIFQEVGSYSEQKLSKAATEMMIYNIVQEQQKYLKLYQSQAKYYGFSEKLTEQIQDFKKYAVTPEHLEHFIADKNMQTRTKNKLEDIALIYREFEQRIQNEFITGEDSLQYFIDCMPKSEWLKRADIYIDGFHNFSTIEYLIIKGLIKYAKSVTIILTTDGNHDQFSLFRKPSEVLRHIEEIANELNISIERQYFNQLYRFNNQDLKHLEQEFDVLQINRVACQGHINILESATMREEINEIARRIIVDIRDKQLRYQDIAILYRDESYAYLFDSILPLYNIPYNIDTKRSMTHHPVMEMIRSLIEVIQSNWQVNPMLRLLKTDVLTASYLKSAYLVDLLENFVLERGIYGKRWLDDELFNVEHFSKMGRKAHKLTEDERNTFEQVVKLKKDVIDKILHFEKQMSQAETVKDFATAFYESMEYFELPNQLMTERDELDLNGNHEKAEEIDQIWNGLIQILDDLVLVFGDEPMSMERFLEVFDIGLEQLEFVMIPQTLDQVSIGTMDLAKVDNKQHVYLVGMNDGTMPQPVTASSLITDEEKKYFEQQANVELSPTSDILQMDEAFVCYVAMTRAKGDVTFSYSLMGSSGDDKEISPFLNQIQSLFNQLEITNIPQYHEVNPLSLMQHAKQTKITLFEALRAWLDDEIVADSWLDAYQVIRDSDHLNQGLDYLMSALTFDNETVKLGETLSKDLYGKEINASVSRFEGYQQCPFKHYASHGLKLNERTKYELQNFDLGDIFHSVLKYISERINGDFKQLDLKKIRQLTNEALEEILPKVQFNLLNSSAYYRYLSRRIGAIVETTLSALKYQGTYSKFMPKHFETSFRRKPRTNDELIAQTLTTTQGIPINIRGQIDRIDTYTKNDTSFVNIIDYKSSEGSATLDLTKVYYGMQMQMMTYMDIVLQNKQRLGLTDIVKPGGLLYFHVHEPRIKFKSWSDIDEDKLEQDLIKKFKLSGLVNADQTVIDALDIRLEPKFTSDIVPVGLNKDGSLSKRGSQVADEATIYKFIQHNKENFIETASNIMDGHTEVAPLKYKQKLPCAFCSYQSVCHVDGMIDSKRYRTVDETINPIEAIQNININDEFGGE

SEQ ID NO: 43796 - protein, 1217 aa, Staphylococcus aureus
MTIPEKPQGVIWTDAQWQSIYATGQDVLVAAAAGSGKTAVLVERIIQKILRDGIDVDRLLVVTFTNLSAREMKHRVDQRIQEASIADPANAHLKNQRIKIHQAQISTLHSFCLKLIQQHYDVLNIDPNFRTSSEAENILLLEQTIDEVIEQHYDILDPAFIELTEQLSSDRSDDQFRMIIKQLYFFSVANPNPTNWLDQLVTPYEEEAQQAQLIQLLTDLSKVFITAAYDALNKAYDLFSMMDGVDKHLAVIEDERRLMGRVLEGGFIDIPYLTDHEFGARLPNVTAKIKEANEMMVDALEDAKLQYKKYKSLIDKVKNDYFSREADDLKADMQQLAPRVKYLARIVKDVMSEFNRKKRSKNILDFSDYEHFALQILTNEDGSPSEIAESYRQHFQEILVDEYQDTNRVQEKILSCIKTGDEHNGNLFMVGDVKQSIYKFRQADPSLFIEKYQRFTIDGDGTGRRIDLSQNFRSRKEVLSTTNYIFKHMMDEQVGEVKYDEAAQLYYGAPYDESDHPVNLKVLVEADQEHSDLTGSEQEAHFIVEQVKDILEHQKVYDMKTGSYRSATYKDIVILERSFGQARNLQQAFKNEDIPFHVNSREGYFEQTEVRLVLSFLRAIDNPLQDIYLVGLMRSVIYQFKEDELAQIRILSPNDDYFYQSIVNYINDEAADAILVDKLKMFLSDIQSYQQYSKDHPVYQLIDKFYNDHYVIQYFSGLIGGRGRRANLYGLFNKAIEFENSSFRGLYQFIRFIDELIERGKDFGEENVVGPNDNVVRMMTIHSSKGLEFPFVIYSGLSKDFNKRDLKQPVILNQQFGLGMDYFDVDKEMAFPSLASVAYKAVAEKELVSEEMRLVYVALTRAKEQLYLIGRVKNDKSLLELEQLSISGEHIAVNERLTSPNPFHLIYSILSKHQSASIPDDLKFEKDIAQVEDSSRPNVNISIIYFEDVSTETILDNNEYRSVNQLETMQNGNEDVKAQIKHQLDYQYPYVNDTKKPSKQSVSELKRQYETEESGTSYERVRQYRIGFSTYERPKFLSEQGKRKANEIGTLMHTVMQHLPFKKERISEVELHQYIDGLIDKHIIEADAKKDIRMDEIMTFINSELYSIIAEAEQVYRELPFVVNQALVDQLPQGDEDVSIIQGMIDLIFVKDGVHYFVDYKTDAFNRRRGMTDEEIGTQLKNKYKIQMKYYQNTLQTILNKEVKGYLYFFKFGTLQL

SEQ ID NO: 43797 - protein, 1438 aa, Staphylococcus aureus
MAMTEQQKFKVLADQIKISNQLDAEILNSGELTRIDVSNKNRTWEFHITLPQFLAHEDYLLFINAIEQEFKDIANVTCRFTVTNGTNQDEHAIKYFGHCIDQTALSPKVKGQLKQKKLIMSGKVLKVMVSNDIERNHFDKACNGSLIKAFRNCGFDIDKIIFETNDNDQEQNLASLEAHIQEEDEQSARLATEKLEKMKAEKAKQQDNNESAVDKCQIGKPIQIENIKPIESIIEEEFKVAIEGVIFDINLKELKSGRHIVEIKVTDYTDSLVLKMFTRKNKDDLEHFKALSVGKWVRAQGRIEEDTFIRDLVMMMSDIEEIKKATKKDKAEEKRVEFHLHTAMSQMDGIPNIGAYVKQAADWGHPAIAVTDHNVVQAFPDAHAAAEKHGIKMIYGMEGMLVDDGVPIAYKPQDVVLKDATYVVFDVETTGLSNQYDKIIELAAVKVHNGEIIDKFERFSNPHERLSETIINLTHITDDMLVDAPEIEEVLTEFKEWVGDAIFVAHNASFDMGFIDTGYERLGFGPSTNGVIDTLELSRTINTEYGKHGLNFLAKKYGVELTQHHRAIYDTEATAYIFIKMVQQMKELGVLNHNEINKKLSNEDAYKRARPSHVTLIVQNQQGLKNLFKIVSASLVKYFYRTPRIPRSLLDEYREGLLVGTACDEGELFTAVMQKDQSQVEKIAKYYDFIEIQPPALYQDLIDRELIRDTETLHEIYQRLIHAGDTAGIPVIATGNAHYLFEHDGIARKILIASQPGNPLNRSTLPEAHFRTTDEMLNEFHFLGEEKAHEIVVKNTNELADRIERVVPIKDELYTPRMEGANEEIRELSYTNARKLYGEDLPQIVIDRLEKELKSIIGNGFAVIYLISQRLVKKSLDDGYLVGSRGSVGSSFVATMTEITEVNPLPPHYICPNCKTSEFFNDGSVGSGFDLPDKTCETCGAPLIKEGQDIPFETFLGFKGDKVPDIDLNFSGEYQPNAHNYTKVLFGEDKVFRAGTIGTVAEKTAFGYVKGYLNDQGIHKRGAEIDRLVKGCTGVKRTTGQHPGGIIVVPDYMDIYDFTPIQYPADDQNSAWMTTHFDFHSIHDNVLKLDILGHDDPTMIRMLQDLSGIDPKTIPVDDKEVMQIFSTPESLGVTEDEILCKTGTFGVPEFGTGFVRQMLEDTKPTTFSELVQISGLSHGTDVWLGNAQELIKTGICDLSSVIGCRDDIMVYLMYAGLEPSMAFKIMESVRKGKGLTEEMIETMKENEVPDWYLDSCLKIKYMFPKAHAAAYVLMAVRIAYFKVHHPLYYYASYFTIRASDFDLITMIKDKTSIRNTVKDMYSRYMDLGKKEKDVLTVLEIMNEMAHRGYRMQPISLEKSQAFEFIIEGDTLIPPFISVPGLGENVAKRIVEARDDGPFLSKEDLNKKAGLSQKIIEYLDELGSLPNLPDKAQLSIFDM

SEQ ID NO: 43798 - protein, 553 aa, Staphylococcus aureus
MNIIDQVKQTLVEEIAASINKAGLADEIPDIKIEVPKDTKNGDYATNIAMVLTKIAKRNPREIAQAIVDNLDTEKAHVKQIDIAGPGFINFYLDNQYLTAIIPEAIEKGDQFGHVNESKGQNVLLEYVSANPTGDLHIGHARNAAVGDALANILTAAGYNVTREYYINDAGNQITNLARSIETHFFEALGDNSYSMPEDGYNGKDIIEIGKDLAEKHPEIKDYSEEARLKEFRKLGVEYEMAKLKNDLAEFNTHFDNWFSETSLYEKGEILEVLAKMKELGYTYEADGATWLRTTDFKDDKDRVLIKNDGTYTYFLPDIAYHFDKVKRGNDILIDLFGADHHGYINRLKASLETFGVDSNRLEIQIMQMVRLMENGKEVKMSKRTGNAITLREIMDEVGVDAARYFLTMRSPDSHFDFDMELAKEQSQDNPVYYAQYAHARICSILKQAKEQGIEVTAANDFTTITNEKAIELLKKVADFEPTIESAAEHRSAHRITNYIQDLAAHFHKFYNAEKVLTDDIEKTKAHVAMIEAVRITLKNALAMVGVSAPESM

SEQ ID NO: 43799 - protein, 984 aa, Staphylococcus aureus
MQEHLVVTLDGKDYLVEPGTNLLEFIKSQDTFVPSICYNESMGPIQTCDTCTVEIDGKIERSCSTVIDRPMTVNTVNNDVKDAQKEALDRILEKHMLYCTVCDYNNGDCEIHNTMDAWGLQHQTYEYKEKPYEKDYGPFYRYDPNQCILCGRCVEACQDIEVNETIRIDWDREHPRVIWDNDVPINESSCVSCGQCATVCPCNAMMEVNMEGNAGYMTDTEPGSLAAMIDLTKKAEPGYGPLFAISDSEAEMRKERIKKTKTVCTYCGVGCSFEVWTKDREILKVQPSHDSPANKIVTCVKGKFSWGHINSDQRLTKPLVRKNGEFHEVEWDEALNVIADNFTSIKEKYGPDALSFISSSKATNEESYLMQKLARQVIGTNNVDNCSRYCQAPATKGLFRTVGHGGDSGSIEDLEKAAMSVLIGTNTAEAHPVIASRMKRAQKLFGQKIHVFDIRKHEMAERADRFYQPKPGTDLAWLSAVTKYIIDHDLHDKAFIDEWVDDFDEYYKSLETFTMAFAEEATGIPESELIKFAEECAKAESVVICWAMGITQQDIGSDSSTAISNLLLVTGNYRRPGTGAYPLRGHNNVQGCSDMGSMPDKITGYQSIEADDIRAKFEKEYGVKLNPKAGKDNHEMVEGIHDGEVHSLYLYGEDTGIVDSNINFVQAAFEKLDFMVVQDEFLTFTATYADVVLPASPSLEKDGTFTNTERRIQRLYQALEPLGDSKPDWKIFQAIANRLGFDWNYKHPSEIMDEVARLTPLYAGVSYDRLEGFNSLQWPVQPDGTDEPILYLEGFNFDNGKAKLFPLSFDNYFKQDEIYDIHVNNGRLLEHFHEGNMTYQTPMIKYKVPRAFVEISPELAEDRGIHEGAEVKLISETGEAVLQVHVTDRVKGKEIYIPLNNDAMENGDLGAINLLTNSDVDQYTDTPSYKRTSCRLEVITKRGKSPLNPNNFRVNKKRHPQYSVQVQKKWERSDYVFPGNQVDK

SEQ ID NO: 43800 - protein, 667 aa, Staphylococcus aureus
MADLSSRVNELHDLLNQYSYEYYVEDNPSVPDSEYDKLLHELIKIEEEHPEYKTVDSPTVRVGGEAQASFKKVNHDTPMLSLGNAFNEDDLRKFDQRIREQIGNVEYMCELKIDGLAVSLKYVDGYFVQGLTRGDGTTGEDITENLKTIHAIPLKMKEPLNVEVRGEAYMPRRSFLRLNEEKEKNDEQLFANPRNAAAGSLRQLDSKLTAKRKLSVFIYSVNDFTDFNARSQSEALDELDKLGFTTNKNRARVNNIDGVLEYIEKWTSQRESLPYDIDGIVIKVNDLDQQDEMGFTQKSPRWAIAYKFPAEEVVTKLLDIELSIGRTGVVTPTAILEPVKVAGTTVSRASLHNEDLIHDRDIRIGDSVVVKKAGDIIPEVVRSIPERRPEDAVTYHMPTHCPSCGHELVRIEGEVALRCINPKCQAQLVEGLIHFVSRQAMNIDGLGTKIIQQLYQSELIKDVADIFYLTEEDLLPLDRMGQKKVDNLLAAIQQAKDNSLENLLFGLGIRHLGVKASQVLAEKYETIDRLLTVTEAELVEIHDIGDKVAQSVVTYLENEDIRALIQKLKDKHVNMIYKGIKTSDIEGHPEFSGKTIVLTGKLHQMTRNEASKWLASQGAKVTSSVTKNTDVVIAGEDAGSKLTKAQSLGIEIWTEQQFVDKQNELNS

SEQ ID NO: 43801 - protein, 295 aa, Staphylococcus aureus
MSKIIGSDRVKRGMAEMQKGGVIMDVVNAEQARIAEEAGAVAVMALERVPSDIRAAGGVARMANPKIVEEVMNAVSIPVMAKARIGHITEARVLEAMGVDYIDESEVLTPADEEYHLRKDQFTVPFVCGCRNLGEAARRIGEGAAMLRTKGEPGTGNIVEAVRHMRQVNSEVSRLTVMNDDEIMTFAKDIGAPYEILKQIKDNGRLPVVNFAAGGVATPQDAALMMELGADGVFVGSGIFKSEDPEKFAKAIVQATTHYQDYELIGRLASELGTAMKGLDINQLSLEERMQERGW

SEQ ID NO: 43802 - protein, 655 aa, Staphylococcus aureus
MNRQSTKKALLIPFVIMIITAIVLMGVWFIFNSLIALIASIVLVVMIIVSIILFRQALMKMDSYVDGLSAQISTTNNKAIKHLPIGIIVLDENDHIEWVNQFMTNHMEANVISESVNEVFPNILKQLDRVKSVEIEYNQYHFQVRYSENDHCLYFFDITEQVQTNELYENSKPIIATLFLDNYDEITQNMNDTQRSEINSMVTRVISRWATEYNIFFKRYSSDQFVAYLNQKILADLEESKFDILSQLREKSVGYRAQLTLSIGVGEGTENLIDLGELSQSGLDLALGRGGDQVAIKSINGNVRFYGGKTDPMEKRTRVRARVISHALKDILAEGDKVIIMGHKRPDLDAIGAAIGVSRFAMMNNLEAYIVLNETDIDPTLRRVMNEIDKKSELRERFITSDDAWDMMTSKTTVVIVDTHKPELVLDENVLNKANRKVVIDHHRRGESFISNPLLIYMEPYASSTAELVTELLEYQPTEQRLTRLESTVMYAGIIVDTRNFTLRTGSRTFDAASYLRAHGADTILTQHFLKDDVDTYINRSELIRTVKVEDNGIAIAHGSDDKIYHPVTVAQAADELLSLEGIEASYVVARREDNLIGISARSLGSVNVQLTMEALGGGGHLTNAATQLKGVTVEEAIAQLQQAITEQLSRSEDA

SEQ ID NO: 43803 - protein, 484 aa, Staphylococcus aureus
MSDRIRVRYAPSPTGYLHIGNARTALFNYLYAKHYNGDFVIRIEDTDKKRNLEDGETSQFDNLKWLGLDWDESVDKDNGYGPYRQSERQHIYQPLIDQLLAEDKAYKCYMTEEELEAEREAQIARGEMPRYGGQHAHLTEEQRQQFEAEGRQPSIRFRVPQNQTYSFDDMVKGNISFDSNGIGDWVIVKKDGIPTYNFAVAIDDHYMQISDVIRGDDHISNTPKQIMIYEAFGWEPPRFGHMSLIVNEERKKLSKRDGQILQFIEQYRDLGYLPEALFNFIALLGWSPEGEEEIFSKEEFIKIFDEKRLSKSPAFFDKQKLAWVNNQYMKQKDTETVFQLALPHLIKANLIPEVPSEEDLSWGRKLIALYQKEMSYAGEIVPLSEMFFKEMPALGEEEQQVINGEQVPELMTHLFSKLEALEPFEAAEIKKTIKEVQKETGIKGKQLFMPIRVAVTGQMHGPELPNTIEVLGKEKVLNRLKQYK

SEQ ID NO: 43804 - protein, 800 aa, Staphylococcus aureus
MLISNEWLKEYVTIDDSVSDLAERITRTGIEVDDLIDYTKDIKNLVVGFVKSKEKHPDADKLNVCQVDIGEDEPVQIVCGAPNVDAGQYVIVAKVGGRLPGGIKIKRAKLRGERSEGMICSLQEIGISSNYIPKSFESGIYVFSESQVPGTDALQALYLDDQVMEFDLTPNRADALSMIGTAYEVAALYNTKMTKPETTSNELELSANDELTVTIENEDKVPYYSARVVHDVTIEPSPIWMQARLIKAGIRPINNVVDISNYVLLEYGQPLHMFDQDAIGSQQIVVRQANEGEKMTTLDDTERELLTSDIVITNGQTPIALAGVMGGDFSEVKEQTSNIVIEGAIFDPVSIRHTSRRLNLRSESSSRFEKGIATEFVDEAVDRACYLLQTYANGKVLKDRVSSGELGAFITPIDITADKINRTIGFDLSQNDIVTIFNQLGFDTEINDDVITVLVPSRRKDITIKEDLIEEVARIYGYDDIPSTLPVFDKVTSGQLTDRQYKTRMVKEVLEGAGLDQAITYSLVSKEDATAFSMQQRQTIDLLMPMSEAHASLRQSLLPHLIEAASYNVARKNKDVKLFEIGNVFFANGEGELPDQVEYLSGILTGDYVVNQWQGKKETVDFYLAKGVVDRVSEKLNLEFSYRRADIDGLHPGRTAEILLENKVVGFIGELHPTLAADNDLKRTYVFELNFDALMAVSVGYINYQPIPRFPGMSRDIALEVDQNIPAADLLSTIHAHGGNILKDTLVFDVYQGEHLEKGKKSIAIRLNYLDTEETLTDERVSKVQAEIEAALIEQGAVIR

SEQ ID NO: 43805 - protein, 430 aa, Staphylococcus aureus
MFVDQVKISLKAGDGGNGITAYRREKYVPFGGPAGGDGGKGASVVFEVDEGLRTLLDFRYQRHFKASKGENGQSSNMHGKNAEDLVLKVPPGTIIKNVETDEVLADLVEDGQRAVVAKGGRGGRGNSRFATPRNPAPDFSEKGEPGEELDVSLELKLLADVGLVGFPSVGKSTLLSIVSKAKPKIGAYHFTTIKPNLGVVSTPDQRSFVMADLPGLIEGASDGVGLGHQFLRHVERTKVIVHMIDMSGSEGREPIEDYKVINQELAAYEQRLEDRPQIVVANKMDLPESQDNLNLFKEEIGEDVPVIPVSTITRDNIDQLLYAIADKLEEYKDVDFTVEEEESVGINRVLYKHTPSQDKFTISRDDDGAYVVSGNAIERMFKMTDFNSDPAVRRFARQMRSMGIDDALRERGCKNGDIVRILGGEFEFVE

SEQ ID NO: 43806 - protein, 421 aa, Staphylococcus aureus
MEKMHITNQEHDAFVKSHPNGDLLQLTKWAETKKLTGWYARRIAVGRDGEVQGVAQLLFKKVPKLPYTLCYISRGFVVDYSNKEALNALLDSAKEIAKAEKAYAIKIDPDVEVDKGTDALQNLKALGFKHKGFKEGLSKDYIQPRMTMITPIDKNDDELLNSFERRNRSKVRLALKRGTTVERSDREGLKTFAELMKITGERDGFLTRDISYFENIYDALHEDGDAELFLVKLDPKENIAKVNQELNELHAEIAKWQQKMETSEKQAKKAQNMINDAQNKIAKNEDLKRDLEALEKEHPEGIYLSGALLMFAGSKSYYLYGASSNEFRDFLPNHHMQYTMMKYAREHGATTYDFGGTDNDPDKDSEHYGLWAFKKVWGTYLSEKIGEFDYILNQPLYQLIEQVKPRLTKAKIKISRKLKRK

SEQ ID NO: 43807 - protein, 193 aa, Staphylococcus aureus
MAKTLYLMRHGQTLFNFKGLIQGFGDSPLTELGIAQAQKARSYYETKGINFDLYASSTQERASDTLENVAPNQSYQRFKGLKEWHFGIFEGESVYLFDNLYKPEDLFGDRIVPFKGEARQQVEERIVKTLHDIMSQTKNNALVVSHGTIMGVFLRYCLKLDEALKHNIGNCNILKFEYDNGTFKFVELIDPNL

SEQ ID NO: 43808 - protein, 166 aa, Staphylococcus aureus
MSAIIEAKKQLVDEIAEVLSNSVSTVIVDYRGLTVAEVTDLRSQLREAGVEYKVYKNTMVRRAAEKAGIEGLDEFLTGPTAIATSSEDAVAAAKVISGFAKDHEALEIKSGVMEGNVITAEEVKTVGSLPSHDGLVSMLLSVLQAPVRNFAYAVKAIGEQKEENAE

SEQ ID NO: 43809 - protein, 259 aa, Staphylococcus aureus
MMQQLSLKHRLNNGDSVYGIFNSIPDPLMIEVIAASGYDFVVIDTEHVAINDETLAHLIRAAEAAHIIPIVRVTAVIDRDIIKVLDMGARGIIVPHVKDRETVEHIVKLSRYYPQGLRSLNGGRMARFGRTPLLDAMEMANEHIMVIAMIEDVEGVMAIDDIAQVEGLDMIVEGAADLSQSLGIPWQTRDDQVTSHVQHIFEVVNAHGKHFCALPREDEDIAKWQAQGVQTFILGDDRGKIYRHLSASLATSKQKGDDG

SEQ ID NO: 43810 - protein, 302 aa, Staphylococcus aureus
MQKNILKSGIALSELGLGCMSLGTDLKKAEQIIDCAVENGITYFDTADMYDKGINESVVGKALLKYQQRDDIFIGTKVGNRLTKDGSTTWDPSKSYIKEAVKGSLKRLGIDHIDLYQLHGGTIDDPLDETISAFDELKQEGIIRAYGISSIRPNVIDYYLKHSQIETIMSQFNLIDNRPESLLDAIHNNDVKVLARGPVSKGLLTSNSVNVLDNKFKDGIFDYSHDELGETIASIKEIESNLSALTFSYLTSHDVLGSIIVGASSVDQLKENIENYHTKVGLDQIKTARARVKDLEYTNHLV

SEQ ID NO: 43811 - protein, 6713 aa, Staphylococcus aureus
MGNLQTAINDKSGTLASQNFLDADEQKRNAYNQAISAAETILNKQTGPNTAKTAVEQALNNVNSAKHALNGTQNLNNAKQAAITAINGASDLNQKQKDALKAQANGAQRVSNANDVQRNATELNTAMGQLQHAIADKTNTLASSKYVNADSTKQNAYTTKVTNAEHIISGTPTVVTTPSEVTAAANQVNSAKQELNGDERLRVAKQNANTAIDALTQLNTPQKAKLKEQVGQANRLEDVQSVQTNGQSLNNAMKGLRDSIANETTVKASQNYTDASPNNQSTYNSAVSNAKGIINQTNNPTMDTSAITQATTQVNNAKNGLNGAENLRNAQNTAKQNLNTLSHLTNNQKSAISSQIDRAGHVSEVTAAKNAATELNAQMGNLEQAIHDQNTVKQGVNFTDADKAKRDAYTNAVSRAETILNKTQGANTSKQDVEAAIQNVTSAKNALNGDQNVTNAKNAAKNALNNLTSINNAQKRDLTTKIDQATTVAGVEAVSNTGTQLNTAMANLQNGINDKANTLASENYHDADSDKKTAYTQAVTNAENILNKNSGSNLDKAAVENALSQVTNAKGALNGNHNLEQAKSNANTTINGLQHLTTAQKDKLKQQVQQAQNVAGVDTVKSSANTLNGAMGTLRNSIQDNTATKNGQNYLDATERNKTNYNNAVDSANGVINATSNPNMDANAINQIATQVTSTKNALDGTHNLTQAKQTATNAIDGATNLNKAQKDALKAQVTSAQRVANVTSIQQTANELNTAMGQLQHGIDDENATKQTQKYRDAEQSKKTAYDQAVAAAKAILNKQTGSNSDKAAVDRALQQVTSTKDALNGDAKLAEAKAAARQNLGTLNHITNAQRTALEGQINQATTVDGVNTVKTNANTLDGAMNSLQGAINDKDATLRNQNYLDADESKRNAYTQAVTAAEGILNKQTGGNTSKADVDNALNAVTRAKAALNGAENLRNAKTSATNTINGLPNLTQLQKDNLKHQVEQAQNVVGVNGVKDKGNTLNTAMGALRTSIQNDNTTKTSQNYLDASDSNKNNYNTAVNNANGVINATNNPNMDANAINDMANQVNTTKAALNGAQNLAQAKTNATNTINNAQDLNQKQKDALKTQVNNAQRVSDANNVQHTATELNGAMTALKAAIADKERTKASGNYVNADQEKRQAYDSKVTNAENIINGTPNATLTVNDVNSAASQVNAAKTALNGDNNLRVAKEHANNTIDGLAQLNNVQKAKLKEQVQSATTLDGVQTVKNSSQTLNTAMKGLRDSIANEATIKAGQNYTDASPNNRNEYDSAVTAAKAIINQTSNPTMEPNTITQATSQVTTKEHALNGAQNLAQAKTTAKNNLNNLTSINNAQKDALTRNIDGATTVAGVNQETAKATELNNAMHSLQNGINDETQTKQTQKYLDAEPSKKSAYDQAVNAAKAILTKASGQNVDKAAVEQALQNVNSTKTALNGDAKLNEAKAAAKQTLGTLTHINNAQRNALDNEITQATNVEGVNTVKAKAQQLDGAMGQLETSIRDKDTTLQSQNYQDADDAKRTAYSQAVNAAATILNKTAGGNTPKADVERAMQAVTQANTALNGIQNLERAKQAANTAITNASDLNTKQKEALKAQVTSAGRVSAANGVEHTATELNTAMTALKRAIADKADTKASGNYVNADANKRQAYDEKVTAAEHIVSGTPTPTLTPSDVTNAATQVTNAKTQLNGNHNLEVAKQNANTAIDGLTSLNGPQKAKLKEQVGQATTLPNVQTVRDNAQTLNTAMKGLRDSIANEATIKAGQNYTDASQNKQNDYNNAVTAAKAIIGQTTSPSMIAQEINQAKDQVTAKQQALNGQENLRTAQTNAKQHLNGLSDLTNAQKDAAKRQIEGATHVNEVTQAQNNADALNTAMTNLKNGIQDQNTIKQGVNFTDADEAKRNAYTNAVTQAEQILNKAQGPNTAKDGVETALQNVQRAKNELNGNQNVANAKTTAKNALNNLTSINNAQKAALKSQIEGATTVAGVNQVSTMASELNTAMSNLQRGINDEAATKAAQKYTEADRDKQTAYNDAVTAAKTLLDKTAGSNDNKVAVEQALQRVNTAKTALNGDARLNEAKNTAKQQLATMSHLTNAQKANLTEQIERGTTVAGVQGIQANAGTLNQAMNQLRQSIASKDATKSSEDYQDANADLQNAYNDAVTNAEGIISATNNPEMNPDTINQKASQVNSAKSALNGDEKLAAVKQTAKSDIGRLTDLNNAQRTAANAEVDQAPNLAAVTAAKNKATSLNTAMGNLKHALAEKDNTKRSVNYTDADQPKQQAYDTAVTQAEAITNANGSNANETQVQAALNQLNQAKNDLNGDNKVAQAKETAKRALASYSNLNNAQSTAATSQIDNATTVADVTAAQNTANELNTAMGQLQNGINDQNTVKQQVNFTDADQGKKDAYTNAVTNAQGILDKANGQNMTKAQVEAALNQVTTAKNALNGDANVRQAKSDAKANLGTLTHLNNAQKQDLTSQIEGATTVNGVNSVKTKAQDLDGAMQRLESAIANKDQTKASENYIDADPTKKTAFDNAITQAESYLNKDHGTNKDKQAVEQAIQSVTSTENALNGDANLQCAKTEATQAIDNLTQLNTPQKTALKQQVNAAQRVSGVTDLKNSATSLNNAMDQLKQAIGDHDTIVAGGNYTNASPDKQGAYTDAYNAAKNIVNGSPNVITNAADVTAATQRVNNAETSLNGDTNLATAKQQAKDALRQMTHLSDAQKQSITGQIDSATQVTGVQSVKDNATNLDNAMNQLRNSIANKDEVKASQPYVDADTDKQNAYNTAVTSAENIINATSQPTLDPSAVTQAANQVNTNKTALNGAQNLANKKQETTANINRLSHLNNAQKQDLNTQVTNAPNISTVNQVKTKAEQLDQAMERLINGIQDKDQVKQSVNFTDADPEKQTAYNNAVTAAENIINQANGTNANQSQVEAALSTVTTTKQALNGDRKVTDAKNNANQTLSTLDNLNNAQKGAVTGNINQAHTVAEVTQAIQTAQELNTAMGNLKNSLNDKDTTLGSQNFADADPEKKNAYNEAVRNAENILNKSTGTNVPKDQVEAAMNQVNTTKAALNGTQNLEKAKQHANTAIDGLSHLTNAQKEALKQLVQQSTTVAEAQGNEQKANNVDAAMDKLRQSIADNATTKQNQNYTDASPNKKDAYNNAVTTAQGIIDQTTNPSLDPTVINQAAGQVSTSKNALNGNENLEAAKQQATQSLGSLDNLNNAQKQAVTNQINGAHTVDEANQIKQNAQNLNTAMGNLKQAIADKDATKATVNFTDADQAKQQAYNTAVTNAENIISKANGGNATQTEVEQAIQQVNAAKQALNGNANVQHAKDEATALINNSNDLNQAQKDALKQQVQNATTVAGVNNVKQTAQELNNAMTQLKQGIADKEQTKADGNFVNADSDKQNAYNQAVAKAEALISGTPDVVVTPSEITAALNKVTQAKNDLNGNTNLATAKQNVQHAIDQLPNLNQAQRDEYSKQITQATLVPNVNAIQQAATTLNDAMTQLKQGIANKAQIKGSENYHDADTDKQTAYDNAVTKAEELLKQTTNPTMDPNTIQQALTKVNDTNQALNGNQKLADAKQDAKTTLGTLDHLNDAQKQALTTQVEQAPDIATVNNVKQNAQNLNNAMTNLNNALQDKTETLNSINFTDADQAKKDDYTNAVSHAEGILSKANGSNASQTEVEQAMQRVNEAKQALNGNDNVQRAKDAAKQVITNANDLNQAQKDALKQQVDAAQTVANVNTIKQTAQDLNQAMTQLKQGIADKDQTKANGNFVNADTDKQNAYNNAVAHAEQIISGTPNANVDPQQVAQALQQVNQAKGDLNGNHNLQVAKDNANTAIDQLPNLNQPQKTALKDQVSHAELVTGVNAIKQNADALNNAMGTLKQQIQANSQVPQSVDFTQADQDKQQAYNNAANQAQQIANGTPTPVLAPDTVTKAVTTMNQAKDALNGDEKLAQAKQDALANLDTLRDLNQPQRDALRNQINQAQALATVEQTKQNAQNVNTAMGNLKQGIANKDTVKASENYHDADVDKQTAYTNAVSQAEGIINQTTNPTLNPDDITRALTQVTDAKNSLNGEAKLATEKQNAKDAVSGMTHLNDAQKQALKGQIDQSPEIATVNQVKQTATSLDQAMDQLSQAINDKDQILADGNYLNADPDKQNAYKQAVAKAEALLNKQSGTNEVQAQVESITNEVNAAKQALNGNDNLANAKQQAKQQLANLTHLNDAQKQSFESQITQAPLVTDVTTINQKAQTLDHAMELLRNSVADNQTTLASEDYHDATAQRQNDYNKAVTAANNIINQTTSPTMNPDDVNGATTQVNNTKVALDGDENLAAAKQQANNRLDQLDHLNNAQKQQLQSQITQSSDIAAVNGHKQTAESLNTAMGNLINAIADHQAVEQRGNFINADTDKQTAYNTAVNEAAAMINKQTGQNANQTEVEQAITKVQTTLQALNGDHNLQVAKTNATQAIDVLTSLNDPQKTALKDQVTAATLVTAVHQIEQNANTLNQAMHGLRQSIQDNAATKANSKYINEDQPEQQNYDQAVQAANNIINEQTATLDNNAINQVAATVNTTKAALHGDVKLQNDKDHAKQTVSQLAHLNNAQKHMEDTLIDSETTRTAVKQDLTEVQALDQLMDALQQSIADKDATRASSAYVNAEPNKKQAYDEAVQNAESIIAGLNNPTINKGNVSSATQAVISSKNALDGVERLAQDKQTAGNSLNHLDQLTPAQQQALENQINNATTCDKVAEIIAQAQALNEAMKALKESIKDQPQTEASSKFINEDQAQKDAYTQAVQHAKDLINKTTDPTLAKSIIDQATQAVTDAKNNLHGDQKLAQDKQRATETLNNLSNLNTPQRQALENQINNAATRGEVAQKLTEAQALNQAMEALRNSIQDQQQTESGSKFINEDKPQKDAYQAAVQNAKDLINQTGNPTLDKAQVEQLTHAFKQAKDNLHGDQKLADDKQHAVTDLNQLNGLNNPQRQALESQINNAATRGEVAQKLAEAKALDQAMQALRNSIQDQQQTEAGSKFINEDKPQKDAYQAAVQNAKDLINQTGNPTLDKSQVEQLTQAVTTAKDNLHGDQKLARDQQQAVTTVNALPNLNHAQQQTLTDAINAAPTRTEVAQHVQTATELDHAMETLKNKVDQVNTDKAQPNYTEASTDKKEAVDQALQAAQSITDPTNGSNANKDAVEQALTKLQEKVNELNGNERVAEAKTQAKQTIDQLTHLNADQIATAKQNIDQATKLQPIAELVDQATQLNQSMDQLQQAVNEHANVEQTIDYTQADSDKQKAYKQAIADAENVLKQNANKQQVDQALQNILNAKQALNGDERVALAKTNGKHDIDQLNALNNAQQDGFKGRIDQSNDLNQIQQIVDEAKALNRAMDQLSQEITGNEGRTKGSTNYVNADTQVKQVYDEAVDKAKQALDKSSGQNLTAEQVIKLNDAVTAAKKALNGEERLNNRKAEALQRLDQLTHLNNAQRQLAIQQINNAETLNKASRAINRATKLDNAMGAVQQYIDEQHLGVISSTNYINADDNLKANYDNAIANAAHELDKVQGNAIAKAEAEQLKQNIIDAQNALNGDQNLANAKDKANAFVNSLNGLNQQQQDLAHKAINNADTVSDVTDIVNNQIDLNDAMETLKHLVDNEIPNAEQTVNYQNADDNAKTNFDDAKRLANTLLNSDNTNVNDINGAIQAVNDAIHNLNGDQRLQDAKDKAIQSINQALANKLKEIEASNATDQDKLIAKNKAEELANSIINNINKATSNQAVSQVQTAGNHAIEQVHANEIPKAKIDANKDVDKQVQALIDEIDRNPNLTDKEKQALKDRINQILQQGHNDINNALTKEEIEQAKAQLAQALQDIKDLVKAKEDAKQDVDKQVQALIDEIDQNPNLTDKEKQALKDRINQILQQGHNGINNAMTKEEIEQAKAQLAQALKEIKDLVKAKENAKQDVDKQVQALIDEIDQNPNLTDKEKQALKDRINQILQQGHNDINNAMTKEEIEQAKAQLAQALQDIKDLVKAKEDAKNAIKALANAKRDQINSNPDLTPEQKAKALKEIDEAEKRALQNVENAQTIDQLNRGLNLGLDDIRNTHVWEVDEQPAVNEIFEATPEQILVNGELIVHRDDIITEQDILAHINLIDQLSAEVIDTPSTATISDSLTAKVEVTLLDGSKVIVNVPVKVVEKELSVVKQQAIESIENAAQQKIDEINNSVTLTLEQKEAAIAEVNKLKQQAIDHVNNAPDVHSVEEIQQQEQAYIEQFNPEQFTIEQAKSNAIKSIEDAIQHMIDEIKARTDLTDKEKQEAIAKLNQLKEQAIQAIQRAQSISEITEQLEQFKAQMKAANPTAKELAKRKQEAISRIKDFSNEKINSIRNSEIGTADEKQAAMNQINEIVLETIRDINNAHTLQQVEAALNNGIARISAVQIVISDRAKQSSSTGNESNSHLTIGYGTANHPFNSSTIGHKKKLDEDDDIDPLHMRHFSNNFGNVIKNAIGVVGISGLLASFWFFIAKRRRKEDEEEELEIRDNNKDSIKETLDDTKHLPLLFAKRRRKEDEEDVTVEEKDSLNNGESLDKVKHTPFFLPKRRRKEDEEDVEVTNENTDEKVLKDNEHSPLLFAKRRKDKEEDVETTTSIESKDEDVPLLLAKKKNQKDNQSKDKKSASKNTSKKVAAKKKKKKSKKNKK

SEQ ID NO: 43812 - protein, 377 aa, Staphylococcus aureus
QKFSIRKYTVGTFSTVIATLVFLGFNTSQAHAAETNQPASVVKQKQQSNNEQTENRESQVQNSQNSQNGQSLSATHENEQPNISQANLVDQKVAQSSTTNDEQPASQNVNTKKDSATAATTQPDKEQSKHKQNESQSANKNGNDNRAAHVENHEANVVTASDSSDNGNVQHDRNELQAFFDANYHDYRFIDRENADSGTFNYVKGIFDKINTLLGSNDPINNKDLQLAYKELEQAVALIRTMPQRQQTSRRSNRIQTRSVESRAAEPRSVSDYQNANSSYYVENANDGSGYPVGTYINASSKGAPYNLPTTPWNTLKASDSKEIALMTAKQTGDGYQWVIKFNKGHAPHQNMIFWFALPADQVPVGRTDFVTVNSDG

SEQ ID NO: 43813 - protein, 123 aa, Staphylococcus aureus
MSDIMGWTAQGLDTLRINEENNELGIDQLVDIIKKHNVGTVVIGLPKNMNNSIGFRGEASLTYKEKLLEAYPSIEIVMWDERLSTMAAERSLLEADVSRQKRKQVIDKMAAVFILQGYLDSLH

SEQ ID NO: 43814 - protein, 102 aa, Staphylococcus aureus
MTEHNHDSQLEINNEEELLTLFDEEGNEVLYRKVLEFYHPEFKKEYVILAEEGAQSDEDDMIELVPMINEPDESGDGGKLVPIETDEEWDMIEEVVNTEMEE

SEQ ID NO: 43815 - protein, 562 aa, Staphylococcus aureus
MVKSKIYIDKIYWERVQLFVEGHSENLDLEDSNFVLRNLTETRTMKANDVKIDGNQFVCRFNVAILDNGYYLPEDKYLLVNEQELDYIAQLNPDVINDAYQNLKPEQEEEYNELETQNGKINFLLQTYLKEFRKGGISKKTVYTVTPEISSDVNEFVLDVVVTTPEVKSIYIVRKYKELRKYFRKQSFNTRQFIFKAIFNTTKFFHLKKGNTVLFTSDSRPTMSGNFEYIYNEMLRQNLDKKYDIHTVFKANITDRRGIIDKFRLPYLLGKADYIFVDDFHPLIYTVRFRRSQEVIQVWHAVGAFKTVGFSRTGKKGGPFIDSLNHRSYTKAYVSSETDIPFYAEAFGIKEKNVVPTGVPRTDVLFDEAYATQIKQEMEDELPIIKGKKVILFAPTFRGSGHGTAHYPFFKIDFERLARYCEKNNAVVLFKMHPFVKNRLNIADKHKQYFVDVSDFREVNDILFITDLLISDYSSLIYEYAVFKKPMIFYAFDLEDYITTRDFYEPYESFVPGKIVQSFDALMDALDNEDYEGEKVIPFLDKHFKYQDGRSSERLVRNLFGS

SEQ ID NO: 43816 - protein, 573 aa, Staphylococcus aureus
MMKFSVIVPTYNSEKYITELLNSLAKQDFPKTEFEVVVVDDCSTDQTLQIVEKYRNKLNLKVSQLETNSGGPGKPRNVALKQAEGEFVLFVDSDDYINKETLKDAAAFIDEHHSDVLLIKMKGVNGRGVPQSMFKETAPEVTLLNSRIIYTLSPTKIYRTALLKDNDIYFPEELKSAEDQLFTMKAYLNANRISVLSDKAYYYATKREGEHMSSAYVSPEDFYEVMRLIAVEILNADLEEAHKDQILAEFLNRHFSFSRTNGFSLKVKLEEQPQWINALGDFIQAVPERVDALVMSKLRPLLHYARAKDIDNYRTVEESYRQGQYYRFDIVDGKLNIQFNEGEPYFEGIDIAKPKVKMTAFKFDNHKIVTELTLNEFMIGEGHYDVRLKLHSRNKKHTMYVPLSVNANKQYRFNIMLEDIKAYLPKEKIWDVFLEVQIGTEVFEVRVGNQRNKYAYTAETSALIHLNNDFYRLTPYFTKDFNNISLYFTAITLTDSISMKLKGKNKIILTGLDRGYVFEEGMASVVLKDDMIMGMLSQTSENEVEILLSKDIKKRDFKNIVKLNTAHMTYSLK

SEQ ID NO: 43817 - protein, 165 aa, Staphylococcus aureus
MDYAPHTAENVVQNANKLIDVFRKNNGFIAFVRVNFYDGKDVLQPNAMISLPPKEGDDYSRFHHLLDKRDDDFVIDKRHFSAFVGTDLDLQLRRRGIDTIVLGGVATHIGVDTTARDAYQLNYNQFFVTDMMSAQNETLHQFPIDNVFPLMGQTITTNDFLNILN

SEQ ID NO: 43818 - protein, 342 aa, Staphylococcus aureus
MFDDKILLITGGTGSFGNAVMKRFLDSNIKEIRIFSRDEKKQDDIRKKYNNSKLKFYIGDVRDSQSVETAMRDVDYVFHAAALKQVPSCEFFPVEAVKTNIIGTENVLQSAIHQNVKKVICLSTDKAAYPINAMGISKAMMEKVFVAKSRNIRSEQTLICGTRYGNVMASRGSVIPLFIDKIKAGEPLTITDPDMTRFLMSLEDAVELVVHAFKHAETGDIMVQKAPSSTVGDLATALLELFEADNAIEIIGTRHGEKKAETLLTREEYAQCEDMGDYFRVPADSRDLNYSNYVETGNEKITQSYEYNSDNTHILTVEEIKEKLLTLEYVRNELNDYKASMR

SEQ ID NO: 43819 - protein, 466 aa, Staphylococcus aureus
MDRMYEQNQMPHNNEAEQSVLGSIIIDPELINTTQEVLLPESFYRGAHQHIFRAMMHLNEDNKEIDVVTLMDQLSTEGTLNEAGGPQYLAELSTNVPTTRNVQYYTDIVSKHALKRRLIQTADSIANDGYNDELELDAILSDAERRILELSSSRESDGFKDIRDVLGQVYETAEELDQNSGQTPGIPTGYRDLDQMTAGFNRNDLIILAARPSVGKTAFALNIAQKVATHEDMYTVGIFSLEMGADQLATRMICSSGNVDSNRLRTGTMTEEDWSRFTIAVGKLSRTKIFIDDTPGIRINDLRSKCRRLKQEHGLDMIVIDYLQLIQGSGSRASDNRQQEVSEISRTLKALARELECPVIALSQLSRGVEQRQDKRPMMSDIRESGSIEQDADIVAFLYRDDYYNRGGDEDDDDDGGFEPQTNDENGEIEIIIAKQRNGPTGTVKLHFMKQYNKFTDIDYAHADMM

SEQ ID NO: 43820 - protein, 804 aa, Staphylococcus aureus
MNYNHNQIEKKWQDYWDENKTFKTNDNLGQKKFYALDMFPYPSGAGLHVGHPEGYTATDIISRYKRMQGYNVLHPMGWDAFGLPAEQYALDTGNDPREFTKKNIQTFKRQIKELGFSYDWDREVNTTDPEYYKWTQWIFIQLYNKGLAYVDEVAVNWCPALGTVLSNEEVIDGVSERGGHPVYRKPMKQWVLKITEYADQLLADLDDLDWPESLKDMQRNWIGRSEGAKVSFDVDNTEGKVEVFTTRPDTIYGASFLVLSPEHALVNSITTDEYKEKVKAYQTEASKKSDLERTDLAKDKSGVFTGAYAINPLSGEKVQIWIADYVLSTYGTGAIMAVPAHDDRDYEFAKKFDLPIIEVIEGGNVEEAAYTGEGKHINSGELDGLENEAAITKAIQLLEQKGAGEKKVNYKLRDWLFSRQRYWGEPIPVIHWEDGTMTTVPEEELPLLLPETDEIKPSGTGESPLANIDSFVNVVDEKTGMKGRRETNTMPQWAGSCWYYLRYIDPKNENMLADPEKLKHWLPVDLYIGGVEHAVLHLLYARFWHKVLYDLGIVPTKEPFQKLFNQGMILGEGNEKMSKSKGNVINPDDIVQSHGADTLRLYEMFMGPLDAAIAWSEKGLDGSRRFLDRVWRLMVNEDGTLSSKIVTTNNKSLDKVYNQTVKKVTEDFETLGFNTAISQLMVFINECYKVDEVYKPYIEGFVKMLAPIAPHIGEELWSKLGHEESITYQPWPTYDEALLVDDEVEIVVQVNGKLRAKIKIAKDTSKEEMQEIALSNDNVKASIEGKDIMKVIAVPQKLVNIVAK

SEQ ID NO: 43821 - protein, 314 aa, Staphylococcus aureus
MIEIEKPRIETIEISEDAKFGKFVVEPLERGYGTTLGNSLRRILLSSLPGAAVKYIEIEGVLHEFSAVDNVVEDVSTIIMNIKQLALKIYSEEDKTLEIDVRDEGEVTASDITHDSDVEILNPELKIATVSKGGHLKIRLVANKGRGYALAEQNNTSDLPIGVIPVDSLYSPVERVNYTVENTRVGQSSDFDKLTLDVWTNGSITPQESVSLAAKIMTEHLNIFVGLTDEAQNAEIMIEKEEDQKEKVLEMSIEELDLSVRSYNCLKRAGINSVQELADKSEADMMKVRNLGRKSLEEVKYKLEDLGLGLRKED

SEQ ID NO: 43822 - protein, 122 aa, Staphylococcus aureus
MGYRKLGRTSDQRKAMLRDLATSLIISERIETTEARAKEVRSVVEKLITLGKKGDLASRRNAAKTLRNVEILNEDETTQTALQKLFGEIAERYTERQGGYTRILKQGPRRGDGAESVIIELV

SEQ ID NO: 43823 - protein, 45 aa, Staphylococcus aureus
MVKRTYQPNKRKHSKVHGFRKRMSTKNGRKVLARRRRKGRKVLSA

SEQ ID NO: 43824 - protein, 889 aa, Staphylococcus aureus
MAELPQSRINERNITSEMRESFLDYAMSVIVARALPDVRDGLKPVHRRILYGLNEQGMTPDKSYKKSARIVGDVMGKYHPHGDLSIYEAMVRMAQDFSYRYPLVDGQGNFGSMDGDGAAAMRYTEARMTKITLELLRDINKDTIDFIDNYDGNEREPSVLPARFPNLLANGASGIAVGMATNIPPHNLTELINGVLSLSKNPDISIAELMEDIEGPDFPTAGLILGKSGIRRAYETGRGSIQMRSRAVIEERGGGRQRIVVTEIPFQVNKARMIEKIAELVRDKKIDGITDLRDETSLRTGVRVVIDVRKDANASVILNNLYKQTPLQTSFGVNMIALVNGRPKLINLKEALVHYLEHQKTVVRRRTQYNLRKAKDRAHILEGLRIALDHIDEIISTIRESDTDKVAMKSLQQRFKLSEKQAQAILDMRLRRLTGLERDKIEAEYNELLNYISELETILADEEVLLQLVRDELTEIRDRFGDDRRTEIQLGGFEDLEDEDLIPEEQIVITLSHNNYIKRLPVSTYRAQNRGGRGVQGMNTLEEDFVSQLVTLSTHDHVLFFTNKGRVYKLKGYEVPELSRQSKGIPVVNAIELENDEVISTMIAVKDLESEDNFLVFATKRGVVKRSALSNFSRINRNGKIAISFREDDELIAVRLTSGQEDILIGTSHASLIRFPESTLRPLGRTATGVKGITLREGDEVVGLDVAHANSVDEVLVVTENGYGKRTPVNDYRLSNRGGKGIKTATITERNGNVVCITTVTGEEDLMIVTNAGVIIRLDVADISQNGRAAQGVRLIRLGDDQFVSTVAKVKEDAEDETNEDEQSTSTVSEDGTEQQREAVVNDETPGNAIHTEVIDSEENDEDGRIEVRQDFMDRVEEDIQQSSDEDEE

SEQ ID NO: 43825 - protein, 122 aa, Staphylococcus aureus
MIQQETRLKVADNSGAREVLTIKVLGGSGRKTANIGDVIVCTVKNATPGGVVKKGDVVKAVIVRTKSGVRRNDGSYIKFDENACVIIRDDKGPRGTRIFGPVARELREGNFMKIVSLAPEVL

SEQ ID NO: 43826 - protein, 607 aa, Staphylococcus aureus
MAHLSVKLRLLILALIDSLIVTFSVFVSYYILEPYFKTYSVKLLILAAISLFISHHISAFIFNMYHRAWEYASVSELILIVKAVTTSIVITMVVVTIVTGNRPFFRLYLITWMMHLILIGGSRLFWRIYRKYLGGKSFNKKPTLVVGAGQAGSMLIRQMLKSDEMKLEPVLAVDDDEHKRNITITEGVKVQGKIADIPELVRKYKIKKIIIAIPTIGQERLKEINNICHMDGVELLKMPNIEDVMSGELEVNQLKKVEVEDLLGRDPVELDMDMISNELTNKTILVTGAGGSIGSEICRQVCNFYPERIILLGHGENSIYLINRELRNRFGKNVDIVPIIADVQNRARMFEIMETYKPYAVYHAAAHKHVPLMEDNPEEAVHNNILGTKNTAEAAKNAEVKKFVMISTDKAVNPPNVMGASKRIAEMIIQSLNDETHRTNFVAVRFGNVLGSRGSVIPLFKSQIEEGGPVTVTHPEMTRYFMTIPEASRLVLQAGALAEGGEVFVLDMGEPVKIVDLARNLIKLSGKKEDDIRITYTGIRPGEKMFEELMNKDEVHPEQVFEKIYRGKVQHMKCNEVEAIIQDIVNDFSKEKIINYANGKKGDNYVR

SEQ ID NO: 43827 - protein, 1038 aa, Staphylococcus aureus
MKNNLRYGIRKHKLGAASVFLGTMIVVGMGQDKEAAASEQKTTTVEENGNSATDNKTSETQTTATNVNHIEETQSYNATVTEQPSNATQVTTEEAPKAVQAPQTAQPANVETVKEEEKPQVKETTQPQDNSGNQRQVDLTPKKVTQNQGTETQVEVAQPRTASESKPRVTRSADVAEAKEASDVSEVKGTDVTSKVTVESGSIEAPQGNKVEPHAGQRVVLKYKLKFADGLKRGDYFDFTLSNNVNTYGVSTARKVPEIKNGSVVMATGEILGNGNIRYTFTNEIEHKVEVTANLEINLFIDPKTVQSNGEQKITSKLNGEETEKTIPVVYNPGVSNSYTNVNGSIETFNKESNKFTHIAYIKPMNGNQSNTVSVTGTLTEGSNLAGGQPTVKVYEYLGKKDELPQSVYANTSDTNKFKDVTKEMNGKLSVQDNGSYSLNLDKLDKTYVIHYTGEYLQGSDQVNFRTELYGYPERAYKSYYVYGGYRLTWDNGLVLYSNKADGNGKNGQIIQDNDFEYKEDTAKGTMSGQYDAKQIIETEENQDNTPLDIDYHTAIDGEGGYVDGYIETIEETDSSAIDIDYHTAVDSEVGHVGGYTESSEESNPIDFEESTHENSKHHADVVEYEEDTNPGGGQVTTESNLVEFDEESTKGIVTGAVSDHTTIEDTKEYTTESNLIELVDELPEEHGQAQGPIEEITENNHHISHSGLGTENGHGNYGVIEEIEENSHVDIKSELGYEGGQNSGNQSFEEDTEEDKPKYEQGGNIVDIDFDSVPQIHGQNKGDQSFEEDTEKDKPKYEHGGNIIDIDFDSVPQIHGFNKHNEIIEEDTNKDKPNYQFGGHNSVDFEEDTLPKVSGQNEGQQTIEEDTTPPTPPTPEVPSEPETPMPPTPEVPSEPETPTPPTPEVPSEPETPTPPTPEVPSEPETPTPPTPEVPSEPETPTPPTPEVPAEPGKPVPPAKEEPKKPSKPVEQGKVVTPVIEINEKVKAVAPTKKAQSKKSELPETGGEESTNKGMLFGGLFSILGLALLRRNKKNNKA

SEQ ID NO: 43828 - protein, 327 aa, Staphylococcus aureus
MRGLKTFSILGLIVALLLVAACGNTDNSSKKESSTKDTISVKDENGTVKVPKDAKRIVVLEYSFADALAALDVKPVGIADDGKKKRIIKPVREKIGDYTSVGTRKQPNLEEISKLKPDLIIADSSRHKGINKELNKIAPTLSLKSFDGDYKQNINSFKTIAKALNKEKEGEKRLAEHDKLINKYKDEIKFDRNQKVLPAVVAKAGLLAHPNYSYVGQFLNELGFKNALSDDVTKGLSKYLKGPYLQLDTEHLADLNPERMIIMTDHAKKDSAEFKKLQEDATWKKLNAVKNNRVDIVDRDVWARSRGLISSEEMAKELVELSKKEQK

SEQ ID NO: 43829 - protein, 343 aa, Staphylococcus aureus
MAIKEISSQSAIDHKRKRRTTLTYIVSLCFLFICIYLNMAIGSSKINFSDIIHYVTGHTDTKATFLLHNVRMPRMIAGLFIGGALAVSGLLMQAMTRNPLASPKIFGVSSGASFFIVFVTIIIPSLEYYALYLGVIGAFIGGLTVYTLSGATKGMTPIKLALAGMAIHLFFSSMTEGIIILNENSNEQVMFWLVGSLSSMKWDEILTILPWIIGALIVTIFIGRQLTIMELGDDIAKGLGQNINKVRIIIGLLVIILTGMSVSVAGPIGFVGLIVPHIVKRYVSKNYLVMIPLTFIIGADLLLLSDVLSRLITYPYESPVGIVTSFVGALYFLFITIKGVKRI

SEQ ID NO: 43830 - protein, 645 aa, Staphylococcus aureus
MEQINIQFPDGNKKAFDKGTTTEDIAQSISPGLRKKAVAGKFNGQLVDLTKPLETDGSIGIVTPGSEEALEVLRHSTAHLMAHAIKRLYGNVKFGVGPVIEGGFYYDFDIDQNISSDDFEQIEKTMKQIVNENMKIERKVVSRDEAKELFSNDEYKLELIDAIPEDENVTLYSQGDFTDLCRGVHVPSTAKIKEFKLLSTAGAYWRGDSNNKMLQRIYGTAFFDKKELKAHLQMLEERKERDHRKIGKELELFTNSQLVGAGLPLWLPNGATIRREIERYIVDKEVSMGYDHVYTPVLANVDLYKTSGHWDHYQEDMFPPMQLDETESMVLRPMNCPHHMMIYANKPHSYRELPIRIAELGTMHRYEASGAVSGLQRVRGMTLNDSHIFVRPDQIKEEFKRVVNMIIDVYKDFGFEDYSFRLSYRDPEDKEKYFDDDDMWNKAENMLKEAADELGLSYEEAIGEAAFYGPKLDVQVKTAMGKEETLSTAQLDFLLPERFDLTYIGQDGEHHRPVVIHRGVVSTMERFVAFLTEETKGAFPTWLAPKQVQIIPVNVDLHYDYARQLQDELKSQGVRVSIDDRNEKMGYKIREAQMQKIPYQIVVGDKEVENNQVNVRQYGSQDQETVEKDEFIWNLVDEIRLKKHR

SEQ ID NO: 43831 - protein, 152 aa, Staphylococcus aureus
MMDNKDYKKFYLIREDVLPESVVKTLKIKDALKSDPTLSIYDAVKQFDLSRSAFYKYRETIFPVDDKMLDHREFTLILYVTDIVGMLARVLDVISKLELSVLTIHQSIPMEEKATITLSLNAKSKETSVEDVIGALRNLDYVSKVELISMSM

SEQ ID NO: 43832 - protein, 1009 aa, Staphylococcus aureus
MKPLHLKLNNFGPFLKEEIDFSKIDNNELFLISGKTGSGKTMIFDAMTYALFGKASTEQREENDLRSHFADGKQPMSVTFEFQLNHRIYKVHRQGPYIKEGNTTKTNAKFDVFEMVDGKYEIRESKVISGTQFIIELLGVNADQFRQLFILPQGEFKRFLISNSREKQGILRTLFDSEKFEAIREILKEELKKEKAQIENRYQQIDLLWQEIESFDDDKIKGLLELATQQIDKLIENIPLLQARSKEILAFVNESKETAIKEYEIIEKKTLENNILKDNINQLNKNKIDFVQLKEQQPEIDEIEAKLKLLQDITNLLNYIENREKIETKIANSKKDISKTNNKILNLDCDKRNIDKEKKMLEENGDLIESKTSFIDKTRVLFNDINKYQQSYLNIECLITEGEQLGDELNNLIKGLEKVEDSIGNNESDYEKIIELNNAITNINNEINIIKENEKAKAELDKLLGSKQELENQINEETTIMKNLEIKLDHYDKSKLDLNDKESFISEIKSAVKIGDQCPICGNEIQDLGHHIDFDSIAKRQNEIKEIEANIHAIKSNIAVHNSEIKFVNEKISNINIKTQSDFSLEVLNKRLLENENALNNQRDLNKFIEQMKEEKDNLTLQIHNKQLRLNKNESELKLCRDLITEFETLSKYNNITNFEVDYKKYVQDVNQHQELSKEIEDKLMQLSQRKLIEQNNLNHYENQLETYNNDLELNEQSIEMEMSRLNLTDDNDINEIIAWRGEQEELEQKRDTYKKRYHEFEMEIARLESLTKDKELLDSDKLKDEYEQKKEKMNTLIDEYSAVHYQCQNNINKTQSIVSHINYLNQELKDQQEIFQLAEIVSGKNNKNLTLENFVLIYYLDQIIAQANLRLATMSDNRYQLIRREAVSHGLSGLEIDVFDLHSNKSRHISSLSGGETFQSSLALALGLSEIVQQQSGGISLESIFIDEGFGTLDQETLETALDTLLNLKSTGRMVGIISHVSELKNRIPLVLEVKSDQYQSSTRFKRN

SEQ ID NO: 43833 - protein, 400 aa, Staphylococcus aureus
MKPLHLKLNNFGPFLKEEIDFSKIDNNELFLISGKTGSGKTMIFDAMTYALFGKASTEQREENDLRSHFADGKQPMSVTFEFQLNHRIYKVHRQGPYIKEGNTTKTNAKFDVFEMVDGKYEIRESKVISGTQFIIELLGVNADQFRQLFILPQGEFKRFLISNSREKQGILRTLFDSEKFEAIREILKEEVKKEKAQIENRYQQIDLLWQEIESFDDDNIKGLLEVATQQIDKLIENIPLLQARSKEILASVNESKETAIKEFEIIEKKTLENNILKDNINQLNKNKIDFVQLKEQQPEIEGIEAKLKLLQDITNLLNYIENREKIETKIANSKKDISKTNNKILNLDCDKRNIDKEKKMLEENGDLIESKISFIDKTRVLFNDINKYQQSYLNIERLRT

SEQ ID NO: 43834 - protein, 495 aa, Staphylococcus aureus
MSEEMNDQMLVRRQKLQELYDLGIDPFGSKFDRSGLSSDLKEEWDQYSKEELVEKEADSHVAIAGRLMTKRGKGKAGFAHVQDLAGQIQIYVRKDQVGDDEFDLWKNADLGDIVGVEGVMFKTNTGELSVKAKKFTLLTKSLRPLPDKFHGLQDIEQRYRQRYLDLITNEDSTRTFINRSKIIQEMRNYLNNKGFLEVETPMMHQIAGGAAARPFVTHHNALDATLYMRIAIELHLKRLIVGGLEKVYEIGRVFRNEGVSTRHNPEFTMIELYEAYADYHDIMDLTESMVRHIANEVLGSAKVQYNGETIDLESAWTRLHIVDAVKEATGVDFYEVKSDEEAKALAKEHGIEIKDTMKYGHILNEFFEQKVEETLIQPTFIYGHPTEISPLAKKNPEDPRFTDRFELFIVGREHANAFTELNDPIDQKGRFEAQLVEKAQGNDEAHEMDEDYIEALEYGMPPTGGLGIGIDRLVMLLTDSPSIRDVLLFPYMRQK

SEQ ID NO: 43835 - protein, 185 aa, Staphylococcus aureus
MSEEMNDQMLVRRQKLQELYDLGIDPFGSKFDRSGLSSDLKEEWDQYSKEELVEKEADSHVAIAGRLMTKRGKGKAGFAHVQDLAGQIQIYVRKDQVGDDEFDLWKNADLGDIVGVEGVMFKTNTGELSVKAKKFTLLTKSLRPLPDKFHGIQDIEQRYRQRYIDLITNEDSTHAFIKRSESFKG

SEQ ID NO: 43836 - protein, 198 aa, Staphylococcus aureus
MNLFYNPKYVGDVAFLQIEPVEGELNYNKKGNVVEITNEGNVVGYNIFEISKDITIEEKGHIKLTDELVNVFQKRISEAGFDYKLNADLSPKFVVGYVETKDKHPDADKLSVLNVNVGNDTLQIVCGAPNVEAGQKVVVAKVGAVMPSGMVIKDAELRGVASSGMICSMKELNLPNAPEEKGIMVLNDSYEIGQAFFE

SEQ ID NO: 43837 - protein, 1274 aa, Staphylococcus aureus
MSWFDKLFGEDNDSNDDLIHRKKKRRQESQNIDNDHDSLLPQNNDIYSRPRGKFRFPMSVAYENENVEQSADTISDEKEQYHRDYRKQSHDSRSQKRHRRRRNQTTEEQNYSEQRGNSKISQQSIKYKDHSHYHTNKPGTYVSAINGIEKETHKSKTHNMYSNNTNHRAKDSTPDYHKESFKTSEVPSAIFGTMKPKKLENGRIPVSKPSEKVESDKQKYDKYVAKTQTSQNKQLEQEKQNDSVVKQGTASKSSDENVSSTTKSMPNYSKVDNTIKIENIYASQIVEEIRRERERKVLQKRRFKKALQQKREEHKNEEQDAIQRAIDEMYAKQAERYVGDSSLNDDSDLTDNSTDASQLHTNGIENETVSNDENKQASIQNEDTNDTHVDESPYNYEEVSLNQVSTTKQLSDDEVTVSNVTSQHQSALQHNVEVNDKDELKNQSRLIADSEEDGATNKEEYSGSQIDDAEFYELNDTEVDEDTTSNIEDNTNRNASEMHVDAPKTQEHAVTESQVNNIDKTVDNEIELAPRHKKDDQTNLNVNSLKTNDVNDGHVVEDSSMNEIEKHNAEITENVQNEAAESEQNVEEKTIENVNPKKQTEKVSTLSKRPFNVVMTPSDKKRMMDRKKHSKVNVPELKPVQSKQAVSESKPASQAAPSSRSDSQESNTNAYKTNNMTSNNVENNQLIGHAETENDYQNAQQYSEQKPSADSTQTEIFEESQDDNQLENEQVDQSTSSSVSEVSDITEESEETTHPNNTSGQQDNDDQQKDLQPSFSNQNEDTANENRPRTNQQDVATNQAVQTSKPMIRKGPNIKLPSVSLLEEPQVIESDEDWITDKKKELNDALFYFNVPAEVQDVTEGPSVTRFELSVEKGVKVSRITALQDDIKMALAAKDIRIEAPIPGTSRVGIEVPNQNPTTVNLRSIIESPSFKNAESKLTVAMGYRINNEPLLMDIAKTPHALIAGATGSGKSVCINSILMSLLYKNHPEELRLLLIDPKMVELAPYNGLPHLVAPVITDVKAATQSLKWAVEEMERRYKLFAHYHVRNITAFNKKAPYDERMPKIVIVIDELADLMMMAPQEVEQSIARIAQKARACGIHMLVATQRPSVNVITGLIKANIPTRIAFMVSSSVDSRTILDSGGAERLLGYGDMLYLGSGMNKPIRVQGTFVSDDEIDDVVDFIKQQREPDYLFEEKELLKKTQTQSQDELFDDVCAFMVNEGHISTSLIQRHFQIGYNRAARIIDQLEQLGYVSSANGSKPRDVYVTEADLNKE

SEQ ID NO: 43838 - protein, 876 aa, Staphylococcus aureus
MKKLKASEIRQKYLDFFVEKGHMVEPSAPLVPIDDDTLLWINSGVATLKKYFDGRETPKKPRIVNSQKAIRTNDIENVGFTARHHTFFEMLGNFSIGDYFKQEAIEFAWEFLTSDKWMGMEPDKLYVTIHPEDMEAYNIWHKDIGLEESRIIRIEGNFWDIGEGPSGPNTEIFYDRGEAYGQDDPAEEMYPGGENERYLEVWNLVFSEFNHNKDHSYTPLPNKNIDTGMGLERMASVSQNVRTNYETDLFMPIMNEIEKVSGKQYLVNNEQDVAFKVIADHIRTIAFAISDGALPANEGRGYVLRRLLRRAVRFSQTLGINEPFMYKLVDIVADIMEPYYPNVKEKADFIKRVIKSEEERFHETLEDGLAILNELIKKAKATTNEINGKDAFKLYDTYGFPIELTEEIAVQAGLKVDMTTFESEMQQQRDRARQARQNSQSMQVQSEVLKNITSASTFVGYDTATAQTTLTHLIYNGEEVSQVEAGETVYFMLTETPFYAVSGGQVADTGIVYNDNFEIAVSEVTKAPNGQNLHKGVVQFGQVNVGATVSAEVNQNDRRDIQKNHSATHLLHAALKSVLGDHVNQAGSLVEADRLRFDFSHFGPMTNDEIDQVERLVNEEIWKGIDVNIQEMDIASAKEMGAMALFGEKYGDVVRVVNMAPFSIELCGGIHVRNTSEIGLFKIVSESGTGAGVRRIEALTGKAAFLYLEDIQEKFNTMKSQMKVKSDDQVVEKLTQLQDEEKALLKQLEQRDKEITSLKMGNIEDQVEEINGYKVLVTEVDVPNAKAIRSTMDDFKSKLQDTIIILASNVDDKVSMVATVPKSLTNNVKAGDLIKQMAPIVGGKGGGRPDMAQGGGTQPENISKSLSFIKDYIKNL

SEQ ID NO: 43839 - protein, 565 aa, Staphylococcus aureus
MAYDGLFTKKMVESLQFLTTGRVHKINQPDNDTILMVVRQNRQNHQLLLSIHPNFSRLQLTTKKYDNPFNPPMFARVFRKHLEGGIIESIKQIGNDRRIEIDIKSKDEIGDTIYRTVILEIMGKHSNLILVDENRKIIEGFKHLTPNTNHYRTVMPGFNYEAPPTQHKINPYDITGAEVLKYIDFNAGNIAKQLLNQFEGFSPLITNEIVSRRQFMTSSTLPEAFDEVMAETKLPPTPIFHKNHETGKEDFYFIKLNQFNDDTVTYDSLNDLLDRFYDARGERERVKQRANDLVRFVQQQLHKYQNKLAKLIEEYEQSKNKDTEQLYGELITANIYRIKQGDKEVTALNYYTNEEVVIPLNPTKSPSANAQYYYKQYNRMKTRERELQHQIQLTKDNIDYFSTIEQQLHHISVHDIDEIRDELAEQGFMKQRKNQTKKKKAQIQLQHYVSTDGDDIYVGKNNKQNDYLTNKKAKKTHTWLHTKDIPGSHVVIFNDAPSDTTIKEAAMLAGYFSKAGNSGQIPVDYTLIKNVHKPSGAKPGFVTYDNQKTLYATPDYELIQKMKQL

SEQ ID NO: 43840 - protein, 449 aa, Staphylococcus aureus
MLNYTGLENKNVLVVGLAKSGYEAAKLLSKLGANVTVNDGKDLSQDAHAKDLESMGISVVSGSHPLTLLDNNPIIVKNPGIPYTVSIIDEAVKRGLKILTEVELSYLISEAPIIAVTGTNGKTTVTSLIGDMFKKSRLTGRLSGNIGYVASKVAQEVKPTDYLVTELSSFQLLGIEKYKPHIAIITNIYSAHLDYHENLENYQNAKKQIYKNQTEEDYLICNYHQRQVIESEELKAKTLYFSTQQEVDGIYIKDGFIVYKGVRIINTEDLVLPGEHNLENILAAVLACILAGVPIKAIIDSLTTFSGIEHRLQYVGTNRTNKYYNDSKATNTLATQFALNSFNQPIIWLCGGLDRGNEFDELIPYMENVRAMVVFGQTKAKFAKLGNSQGKSVIEANNVEDAVDKVQDIIEPNDVVLLSPACASWDQYSTFEERGEKFIERFRAHLPSY

SEQ ID NO: 43841 - protein, 439 aa, Staphylococcus aureus
MDDKTKNDQQESNEDKDELELFTRNTSKKRRQRKRSKATHFSNQNKDDTSQQADFDEEIYLINKDFKKEESNDENNGSASSHANDNNIDDSTDSNIENEDYRYNQEIDDQNESNGIAVGNEQPQSAPKEQNSDSNDEETVTKKERKSKVTQLKPLTLEEKRKLRRKRQKRIQYSVITILVLLIAVILIYMFSPLSKIAHVNINGNNHVSTSKINKVLGVKNDSRMYTFSKKNAINDLEEDPLIKSVEIHKQLPNTLNVDITENEIIALVKYKGKYLPLLENGKLLKGSNDVKINDAPVMDGFKGTKEDDMIKALSEMTPEVRRYIAEVTYAPSKNKQSRIELFTTDGLQVIGDISTISKKMKYYPQMSQSLSRDSSGKLKTRGYIDLSVGASFIPYRGNTSSQSESDKNVTKSSQEENQAKEELQSVLNKINKQSSKNN

SEQ ID NO: 43842 - protein, 662 aa, Staphylococcus aureus
MFNEKDQLAVDTLRALSIDTIEKANSGHPGLPMGAAPMAYTLWTRHLNFNPQSKDYFNRDRFVLSAGHGSALLYSLLHVSGSLELEELKQFRQWGSKTPGHPEYRHTDGVEVTTGPLGQGFAMSVGLALAEDHLAGKFNKEGYNVVDHYTYVLASDGDLMEGISHEAASFAGHNKLSKLVVLYDSNDISLDGELNKAFSENTKARFEAYGWNYLLVKDGNDLEEIDKAITTAKSQEGPTIIEVKTTIGFGSPNKAGTNGVHGAPLGEVERKLTFENYGLDPEKRFNVSEEVYEIFQNTMLKRANEDESQWNSLLEKYAETYPELAEEFKLAISGKLPKNYKDELPRFELGHNGASRADSGTVIQAISKTVPSFFGGSADLAGSNKSNVNDATDYSSETPEGKNVWFGVREFAMGAAVNGMAAHGGLHPYGATFFVFSDYLKPALRLSSIMGLNATFIFTHDSIAVGEDGPTHEPIEQLAGLRAIPNMNVIRPADGNETRVAWEVALESESTPTSLVLTRQNLPVLDVPEDVVEEGVRKGAYTVYGSEETPEFLLLASGSEVSLAVEAAKDLEKQGKSVRVVSMPNWNAFEQQSEEYKESVIPSSVTKRVAIEMASPLGWHKYVGTAGKVIAIDGFGASAPGDLVVEKYGFTKENILNQVMSL

SEQ ID NO: 43843 - protein, 329 aa, Staphylococcus aureus
METLFSGIQPSGIPTIGNYIGALKQFVDVQNDYDCYFCIVDQHAITMPQDRLKLRKQTRQLAAIYLASGIDPDKATLFIQSEVPAHVQAGWMLTTIASVGELERMTQYKDKAQKAVEGIPAGLLTYPPLMAADIVLYNTNIVPVGDDQKQHIELTRNLVDRFNSRYNDVLVKPEIRMPKVGGRVMSLQDPTRKMSKSDDNAKNFISLLDEPNVAAKKIKSAVTDSDGIIKFDRDNKPGITNLISIYAGLTDMPIKDIEAKYEGEGYGKFKGDLAEIVKAFLVEFQEKYESFYNSDKLDDILDQGRDKAHKVSFKTVKKMEKAMGLGRKR

SEQ ID NO: 43844 - protein, 144 aa, Staphylococcus aureus
MLLPKRVKYRRQHRPKTTGRSKGGNYVTFGEFGLQATTTSWITSRQIESARIAMTRYMKRGGKVWIKIFPHTPYTKKPLEVRMGAGKGAVEGWIAVVKPGRILFEVAGVSEEVAREALRLASHKLPVKTKFVKREELGGETNES

SEQ ID NO: 43845 - protein, 315 aa, Staphylococcus aureus
MKRSSKSKMSLPKKIFLWVFGILVILAIVAVVYVAAKIFITGNKIHNPLDRNHSELRDKKVSLNDGDPFTIALFGVDSDADRKKKGGGERSDSIMILSINPKTKKTEIVSIPRDTRAEIVGRGTTEKIAHAYAYGGPNMAVKSLEKLMNVPIDHYATIDMDGLHNMIDSIGGVDVVSNDTFTVDGVRFTKGQQTHVNGDQALKFIRSRKEEGAGGDFGRQQRQQIVLEAMANKIASPSSITHFNSLMNEIQNNVKTDLTLGDLNTIRSNYKDANDTINKHQLSGQGGIQSDGLYYFIPSEQSKAESTKLLKDNLE

SEQ ID NO: 43846 - protein, 365 aa, Staphylococcus aureus
MALTAGIVGLPNVGKSTLFNAITKAGALAANYPFATIDPNVGIVEVPDARLLKLEEMVQPKKTLPTTFEFTDIAGIVKGASKGEGLGNKFLSHIREVDAICQVVRAFDDDNVTHVAGRVDPIDDIEVINMELVLADLESVEKRLPRIEKLARQKDKTAEMEVRILTTIKEALENGKPARSIDFNEEDQKWVNQAQLLTSKKMLYIANVGEDEIGDDDNDKVKAIREYAAQEDSEVIVISAKIEEEIATLDDEDKEMFLEDLGIEEPGLDRLIRTTYELLGLSTYFTAGVQEVRAWTFKQGMTAPQCAGIIHTDFERGFIRAEVTSYDDYVQYGGESGAKEAGRQRLEGKEYIMQDGDIVHFRFNV

SEQ ID NO: 43847 - protein, 67 aa, Staphylococcus aureus
MASKYGINDIVEMKKQHACGTNRFKIIRMGADIRIKCENCQRSIMIPRQTFDKKLKKIIVSQDDTQR

SEQ ID NO: 43848 - protein, 293 aa, Staphylococcus aureus
MDQVMSIISSLFEPLTKIETYENIATKIAMIVIYIIVALIVIKILNKMIEQGFKIQNKSKKSNKKRSKTLISLVQNVVKYIVWFIVITTILSKFGISVEGVIASAGVVGLAVGFGAQTIVKDVITGFFIIFESQFDVGDYVKINNGGTTVAEGTVKSIGLRSTRINTISGELTILPNSSMGEITNYSITNGTAIVKIPVSVDENIDNVEKKLNKLFTSLRSKYYLFVSDPVVIGIDAFEDTRVILRVSAETIPGEGFSGARIIRKEVQKMFLQEGIKTPQPIMTPFNHSENGV

SEQ ID NO: 43849 - protein, 438 aa, Staphylococcus aureus
MPERERTSPQYESFHELYKNYTTKELTQKAKTLKLTNYSKLNKKELVLAIMEAQMEKDGNYYMEGILDDIQPDGYGFLRTVNYSKGEKDIYISASQIRRFEIKRGDKVTGKVRKPKDNEKYYGLLQVDFVNDHNAEEVKKRPHFQALTPLYPDERIKLETETQNYSTRIMDLVTPIGLGQRGLIVAPPKAGKTSLLKEIANAISTNKPDAKLFILLVGERPEEVTDLERSVEAAEVVHSTFDEPPEHHVKVAELLLERAKRLVEIGEDVIILMDSITRLARAYNLVIPPSGRTLSGGLDPASLHKPKAFFGAARNIEAGGSLTILATALVDTGSRMDDMIYEEFKGTGNMELHLDRKLSERRIFPAIDIGRSSTRKEELLISKSELDTLWQLRNLFTDSTDFTERFIRKLKRSKNNEDFFKQLQKSAEESTKTGRPII

SEQ ID NO: 43850 - protein, 385 aa, Staphylococcus aureus
MYYHQPLLLTPGPTPVPDAIMREIQAPMVGHRSKDFEDIAQQAFQGLKPIFGSQNDVLILTSSGTSVLEASMLNIVNPEDHFVVIVSGAFGNRFKQIAQTYYKNVHIYDVTWGEAVDVKDFINYLSTLDVEVKAVFSQYCETSTTVLHPIHELGNAINQFNSNIYFVVDGVSCIGAVDVDINKDKIDVLVSGSQKAIMLPPGLAFVAYSHRAKERFKEVTTPKFYLDLNKYISSQADNSTPFTPNVSLFRGVNAYVETVKAEGFNHVIARHYAIRNALRSALKALDLTLLVNDKDASPTVTAFKPNTNEVKIIKDELKNRFKITIAGGQGHLKGQILRIGHMGKISPFDILSVVSALEIILTEHRKVNYIGKGISKYMEVIHEAI

SEQ ID NO: 43851 - protein, 148 aa, Staphylococcus aureus
MHQHDFKVQTSWQGGRNNVGNVQGDILSENISIPASLGGVGIGTNPDEMLVSAASSCYIISLAATLERAKFTDISIEQQSIGTACLNNGKFSMSKIVHHPHIEIPSDQIAQLEKRLPKLITIADNNCMISNAVRNNVDIKIYPIIQAK

SEQ ID NO: 43852 - protein, 374 aa, Staphylococcus aureus
MEKLKLMTIVGTRPEIIRLSSTIKACDQYFNQILVHTGQNYDYTLNQIFFDDLELRQPDHYLEAVGSNLGETMGNIIAKTYDVLLREQPDALLILGDTNSCLAAVSAKRLKIPVFHMEAGNRCFDQNVPEEINRKIVDHVSDVNLPYTEHSRRYLLDEGFNKANIFVTGSPMTEVIEAHRDKINHSDVLNKLGLEPQQYILVSAHREENIDNEKNFKSLMNAINDIAKKYKMPVIYSTHPRSWKKIEESKFEFDPLVKQLKPFGFFDYNALQKDAFVVLSDSGTLSEESSILKFPGVLIRTSTERPEVLDKGTVIVGGITYNNLIQSVELAREMQNNNEPMIDAIDYKDTNVSTKVVKIIQSYKDIINRNTWRK

SEQ ID NO: 43853 - protein, 286 aa, Staphylococcus aureus
MPLVSMKEMLIDAKENGYAVGQYNINNLEFTQAILEASQEENAPVILGVSEGAARYMSGFYTIVKMVEGLMHDLNITIPVAIHLDHGSSFEKCKEAIDAGFTSVMIDASHSPFEENVATTKKVVEYAHEKGVSVEAELGTVGGQEDDVVADGIIYADPKECQELVEKTGIDALAPALGSVHGPYKGEPKLGFKEMEEIGLSTGLPLVLHGGTGIPTKDIQKAIPFGTAKINVNTENQIASAKAVRDVLNNDKEVYDPRKYLGPAREAIKETVKGKIKEFGTSNRAK

SEQ ID NO: 43854 - protein, 255 aa, Staphylococcus aureus
MAVISMKQLLEAGVHFGHQTRRWNPKMKKYIFTERNGIYIIDLQKTVKKVDEAYNFLKQVSEDGGQVLFVGTKKQAQESVKSEAERAGQFYINQRWLGGLLTNYKTISKRIKRISEIEKMEEDGLFEVLPKKEVVELKKEYDRLIKFLGGIRDMKSMPQALFVVDPRKERNAIAEARKLNIPIVGIVDTNCDPDEIDYVIPANDDAIRAVKLLTAKMADAILEGQQGVSNEEVAAEQNIDLDEKEKSEETEATEE

SEQ ID NO: 43855 - protein, 557 aa, Staphylococcus aureus
MSLIKKKNKDIRIIPLGGVGEIAKNMYIVEVDDEMFMLDAGLMFPEDEMLGIDIVIPDISYVLENKDKLKGIFLTHGHEHAIGAVSYVLEQLDAPVYGSKLTIALIKENMKARNIDKKVRYYTVNNDSIMRFKNVNISFFNTTHSIPDSLGVCIHTSYGAIVYTGEFKFDQSLHGHYAPDIKRMAEIGEEGVFVLISDSTEAEKPGYNTPENVIEHHMYDAFAKVRGRLIVSCYASNFIRIQQVLNIASKLNRKVSFLGRSLESSFNIARKMGYFDIPKDLLIPITEVDNYPKNEVIIIATGMQGEPVEALSQMAQHKHKIMNIEEGDSVFLAITASANMEVIIANTLNELVRAGAHIIPNNKKIHASSHGCMEELKMMINIMKPEYFIPVQGEFKMQIAHAKLAAEAGVAPEKIFLVEKGDVINYNGKDMILNEKVNSGNILIDGIGIGDVGNIVLRDRHLLAEDGIFIAVVTLDPKNRRIAAGPEIQSRGFVYVRESEDLLREAEEKVREIVEAGLQEKRIEWSEIKQNMRDQISKLLFESTKRRPMIIPVISEI

SEQ ID NO: 43856 - protein, 144 aa, Staphylococcus aureus
MSELFSNDNIFLNVNVNSQNEAIEKAGKALVDSGAVTDAYIQAMKDREQVVSTFMGNGLAIPHGTDEAKTNVIHSGLTLLQIPEGVDWDGEVVKVVVGIAGKDGEHLDLLSKIAITFSEEENVDRIVQAKSAEEIKQVFEEADA

SEQ ID NO: 43857 - protein, 565 aa, Staphylococcus aureus
MKQLHPNEVGVYALGGLGEIGKNTYAVEYKDEIVIIDAGIKFPDDNLLGIDYVIPDYTYLVQNQDKIVGLFITHGHEDHIGGVPFLLKQLNIPIYGGPLALGLIRNKLEEHHLLRTAKLNEINEDSVIKSKHFTISFYLTTHSIPETYGVIVDTPEGKVVHTGDFKFDFTPVGKPANIAKMAQLGEEGVLCLLSDSTNSLVPDFTLSEREVGQNVDKIFRNCKGRIIFATFASNIYRVQQAVEAAIKNNRKIVTFGRSMENNIKIGMELGYIKAPPETFIEPNKINTVPKHELLILCTGSQGEPMAALSRIANGTHKQIKIIPEDTVVFSSSPIPGNTKSINRTINSLYKAGADVIHSKISNIHTSGHGSQGDQQLMLRLIKPKYFLPIHGEYRMLKAHGETGVECGVEEDNVFIFDIGDVLALTHDSARKAGRIPSGNVLVDGSGIGDIGNVVIRDRKLLSEEGLVIVVVSIDFNTNKLLSGPDIISRGFVYMRESGQLIYDAQRKIKTDVISKLNQNKDIQWHQIKSSIIETLQPYLFEKTARKPMILPVIMKVNEQKESNNK

SEQ ID NO: 43858 - protein, 147 aa, Staphylococcus aureus
MSLDILSTTRIIVKEQVNDWTEAITIASQPLLQEQIIEQGYVQAMIDSVNELGPYIVIAPEIAIAHARPNNDVHQVGLSLLKLNQHVAFCDEDHYASLIFVLSAIDNHSHLSVLQNLATVLGDNQTVQQLLTAKNAQDIKNILKEHD

SEQ ID NO: 43859 - protein, 651 aa, Staphylococcus aureus
MLSYRQIEILYLLIHEQTFIPINTIANQLGVSPRTIQYDIAYIEQYAETYHYQVSRNKAAGIKVTTAHATLLNELEHNLTNQIHFSKDERLTHIALKLFETTDPVSTKQLAQDVNVSRRTIADDIKMIQAQLDQYHLKLNYVHNKGFNVIGEEDHYRKAYAHFIHQYMKQAAPFIEADIFNSESIALVRRAIIKTLNSENYHLVQSAIDGLIYHILIAIQRLNENFSFDIPINEIDKWRHTNQYAIASKMIENLERSCNVTFPESEIIFITLHLLGSKMTEHTASSITFEYHDLSQNIHELITCVSQELGIDMSKDNKLHTSLITHIKPAIHRIKYDMLQPNPLRQEVMRRYPQIIEAVSKHISPIEQDAAIRFNEDELTYITIHFASSIERVATHKQSMIKVVLLCGSGIGTSQLLKSKLNHLYPEFHIWDAYSIYQLEESRLLQDNIDYVISTVPCEISAVPVIHVDPFINQQSRQKLNQIINDSREQRVMKMATDGKSLADLLPEHRIIINEQPLSIESAIAVAVQHLINDGIVYSNYTAAILKQFEQFGSYMVISPHIALIHAGTDYVQNGVGFALTYFTEGIIFGSKANDPVHLVITLATDHPNAHLKALGQLSECLSNDLYRQDFLDGNIFKIKQHIALTMTKEV

SEQ ID NO: 43860 - protein, 450 aa, Staphylococcus aureus
MNNKRHSTNEQLSLDEINNTIKFDHRSSNKQKFLSFLGPGLLVAVGYMDPGNWITSMQGGAQYGYTLLFVILISSLSAMLLQSMTVRLGIATGMDLAQMTRHYLSRPIAIIFWIIAELAIIATDIAEVIGSAIALNLLFNIPLIVGALITVLDVFLLLFIMKYGFRKIEAIVGTFIFTVLFIFIFEVYISSPQLNAVLNGFIPHSEIITNNGILYIALGIIGATIMPHNLYLHSSIVQSRTYSRHNNEEKAQAIKFATIDSNIQLSIAFVVNCLLLVLGASLFFNSNADDLGGFYDLYHALKTEPVLGATMGAIMSTLFAVALLASGQNSTITGTLAGQIVMEGFLRLHIPNWLRRLITRSLAVIPVIVCLIIFKGNAAKIEQLLVFSQVFLSIALPFCLIPLQLATSNKDLMGPFYNKTWVNIISWTLIIILSILNVYLIVQTFQELQS

SEQ ID NO: 43861 - protein, 891 aa, Staphylococcus aureus
MNKHHPKLRSFYSIRKSTLGVASVIVSTLFLITSQHQAQAAENTNTSDKISENQNNNATTTQQPKDTNQTQPATQPVITAKNYPAADESLKDAIKDPALENKEHDIGPREQVNFQLLDKNNETQYYHFFSIKDPADVYYTKKKAEVELDINTASTWKKFEVYENNQKLPVRLVSYSPVPEDHAYIRFPVSDGTQELKIVSSTQIDDGEETNYDYTKLVFAKPIYNDPSLVKSDTNDAVVTNDQSSSDASNQTNTNTSNQNTSTTNNANNQPQATTNMSQPAQPKSSANADQASSQPAHETNSNGNTNDKTNESSNQSDVNQQYPPADESLQDAIKNPAIIDKEHTADNWRPIDFQMKNDKGERQFYHYASTVEPATVIFTKTGPVIELGLKTASTWKKFEVYEGDKKLPVELVSYDSDKDYAYIRFPVSNGTRDVKIVSSIEYGENIHEDYDYTLMVFAQPITNNPDDYVDEETYNLQKLLAPYHKAKTLERQVYELEKLQEKLPEKYKAEYKKKLDQTRVELADQVKSAVTEFENVTPTNDQLTDLQEAHFVVFESEENSESVMDGFVEHPFYTATLNGQKYVVMKTKDDSYWKDLIVEGKRVTTVSKDPKNNSRTLIFPYIPDKAVYNAIVKVVVANIGYEGQYHVRIINQDINTKDDDTSQNNTSEPLNVQTGQEGKVADTDVAENSSTATNPKDASDKADVIEPESDVVKDADNNIDKDVQHDVDHLSDMSDNNHFDKYDLKEMDTQIAKDTDRNVDNSVGMSSNVDTDKDSNKNKDKVIQLAHIADKNNHTGKAAKLDVVKQNYNNTDKVTDKKTTEHLPSDIHKTVDKTVKTKEKAGTPSKENKLSQSKMLPKTGETTSSQSWWGLYALLGMLALFIPKFRKESK

SEQ ID NO: 43862 - protein, 179 aa, Staphylococcus aureus
MNRLKEKFNTEVTENLMKKFNYSSVMEVPKIDKIVVNMGVGDAVQNSKVLDNAVEELELITGQKPLVTKAKKSIATFRLREGMPIGAKVTLRGERMYEFLDKLISVSLPRVRDFQGVSKKAFDGRGNYTLGVKEQLIFPEIDYDKVSKVRGMDIVIVTTANTDEEARELLANFGMPFRK

SEQ ID NO: 43863 - protein, 91 aa, Staphylococcus aureus
MEARDILKRPVITEKSSEAMAEDKYTFDVDTRVNKTQVKMAVEEIFNVKVASVNIMNYKPKKKRMGRYQGYTNKRRKAIVTLKEGSIDLFN

SEQ ID NO: 43864 - protein, 199 aa, Staphylococcus aureus
MYETYHSGWIECITGSMFSGKSEELIRRLRRGIYAKQKVVVFKPAIDDRYHKEKVVSHNGNAIEAINISKASEIMTHNLTNVDVIGIDEVQFFDDEIVSIVEKLSADGHRVIVAGLDMDFRGEPFEPMPKLMAVSEQVTKLQAVCAVCGSSSSRTQRLINGKPAKIDDPIILVGANESYEPRCRAHHIVAPSDNNKEEL

SEQ ID NO: 43865 - protein, 358 aa, Staphylococcus aureus
MFDQLDIVEERYEQLNELLSDPDVVNDSDKLRKYSKEQADLQKTVDVYRNYKAKKEELADIEEMLSETDDKEEVEMLKEESNGIKAELPNLEEELKILLIPKDPNDDKDVIVEIRAAAGGDEAAIFAGDLMRMYSKYAESQGFKTEIVEASESDHGGYKEISFSVSGNGAYSKLKFENGAHRVQRVPETESGGRIHTSTATVAVLPEVEDVEIEIRNEDLKIDTYRSSGAGGQHVNTTDSAVRITHLPTGVIATSSEKSQIQNREKAMKVLKARLYDMKVQEEQQKYASQRKSAVGTGDRSERIRTYNYPQSRVTDHRIGLTLQKLGQIMEGHLEEIIDALTLSEQTDKLKELNNGEL

SEQ ID NO: 43866 - protein, 68 aa, Staphylococcus aureus
MSQEILNVEGMSCGHCKSAVESALNNIDGVTSADVNLENGQVSVQYDDSKVAVSQMKDAIEDQGYDVV

SEQ ID NO: 43867 - protein, 327 aa, Staphylococcus aureus
MIKSGKARAHTNIALIKYWGKKDEALIIPMNNSISVTLEKFYTETKVTFNDQLTQDQFWLNGEKVSGKELEKISKYMDIVRNRAGIDWYAEIESDNFVPTAAGLASSASAYAALAAACNQALDLQLSDKDLSRLARIGSGSASRSIYGGFAEWEKGYNDETSYAVPLESNHFEDDLAMIFVVINQHSKKVPSRYGMSLTRNTSRFYQYWLDHIDEDLAEAKAAIQDKDFKRLGEVIEENGLRMHATNLGSTPPFTYLVQESYDVMALVHECREAGYPCYFTMDAGPNVKILVEKKNKQQIIDKLLTQFDNNQIIDSDIIATGIEIIE

SEQ ID NO: 43868 - protein, 358 aa, Staphylococcus aureus
MIQVKAPGKLYIAGEYAVTEPGYKSVLIALDRFVTATIEEADQYKGTIHSKALHHNPVTFSRDEDSIVISDPHAAKQLNYVVTAIEIFEQYAKSCDIAMKHFHLTIDSNLDDSNGHKYGLGSSAAVLVSVIKVLNEFYDMKLSNLYIYKLAVIANMKLQSLSSCGDIAVSVYSGWLAYSTFDHEWVKHQIEDTTVEEVLIKNWPGLHIEPLQAPENMEVLIGWTGSPASSPHFVSEVKRLKSDPSFYGDFLEDSHRCVEKLIHAFKTNNIKGVQKMVRQNRTIIQRMDKEATVDIETEKLKYLCDIAEKYHGASKTSGAGGGDCGITIINKDVDKEKIYDEWTKHGIKPLKFNIYHGQ

SEQ ID NO: 43869 - protein, 343 aa, Staphylococcus aureus
MEPILEMIKTLTGINSPSGDTEEAIQFVEKYAKDLGYQTTLTNKGALLITVPGKNDEVQRCITAHVDTLGAMVKEIKEDGRLAIELIGGFTYNAIEGEYCQIKTDAGQIYTGTICLHETSVHVYRNNHEIPRDQKHMEIRIDEVTTSEEDTKSLGISVGDFVSFDPRTVITSSGFIKSRHLDDKASVAMILQLLKKLKEEQIILPHTTQFYISNNEEIGYGANASIDSKIKEYIALDMGALGDGQASDEYTVSICAKDASGPYHKQLKSHLVNLCKINNIPYKVDIYPYYGSDASAALHAGADIRHGLFGAGIESSHAMERTHIDSIKATEKLLYAYCLSPIE

SEQ ID NO: 43870 - protein, 352 aa, Staphylococcus aureus
MSEQQTMSELKQQALVDINEANDERALQEVKVKYLGKKGSVSGLMKLMKDLPNEEKPAFGQKVNELRQTIQNELDERQQMLVKEKLNKQLAEETIDVSLPGRHIEIGSKHPLTRTIEEIEDLFLGLGYEIVNGYEVEQDHYNFEMLNLPKSHPARDMQDSFYITDEILLRTHTSPVQARTMESRHGQGPVKIICPGKVYRRDSDDATHSHQFTQIEGLVVDKNVKMSDLKGTLELLAKKLFGADREIRLRPSYFPFTEPSVEVDVSCFKCKGKGCNVCKHTGWIEILGAGMVHPNVLEMAGFDSSEYSGFAFGMGPDRIAMLKYGIEDIRHFYTNDVRFLDQFKAVEDRGDM

SEQ ID NO: 43871 - protein, 565 aa, Staphylococcus aureus
MNYQALYRMYRPQSFEDVVGQEHVTKTLRNAISKEKQSHAYIFSGPRGTGKTSIAKVFAKAINCLNSTDGEPCNECHICKGITQGTNSDVIEIDAASNNGVDEIRNIRDKVKYAPSESKYKVYIIDEVHMLTTGAFNALLKTLEEPPAHAIFILATTEPHKIPPTIISRAQRFDFKAISLDQIVERLKFVADAQQIECEDEALAFIAKASEGGMRDALSIMDQAIAFGDGTLTLQDALNVTGSVHDEALDHLFDDIVQGDVQASFKKYHQFITEGKEVNRLINDMIYFVRDTIMNKTSEKDTEYRALMNLELDMLYQMIDLINDTLVSIRFSVNQNVHFEVLLVKLAEQIKGQPQVIANVAEPAQIASSPNTDVLLQRMEQLEQELKTLKAQGVSVAPAQKSSKKPARGIQKSKNAFSMQQIAKVLDKANKADIKLLKDHWQEVIDHAKNNDKKSLVSLLQNSEPVAASEDHVLVKFEEEIHCEIVNKDDEKRSSIESVVCNIVNKNVKVVGVPSDQWQRVRTEYLQNRKNEGDDMPKQQAQQTDIAQKAKDLFGEETVHVIDEE

SEQ ID NO: 43872 - protein, 175 aa, Staphylococcus aureus
MNKTSKVCVAATLALGTLIGVTVVENSAPTSKQAQAAITPYYTYNGYIGNNANFILDKNFINAIKYDNVKFNGIKLAKTNTIKKVEKYDQTFKGVSAKGNEASQLQFVVKNNISLKDIQKAYGKDLKKENGKTKEADSGIFYYQNAKKTLGIWFVVDHNRVVEVTVGHTPYKTSK

SEQ ID NO: 43873 - protein, 205 aa, Staphylococcus aureus [sequence omitted]

SEQ ID NO: 43874 - protein, 1055 aa, Staphylococcus aureus
MIKKLLQFSLGNKFAIFLMVVLVVLGGVYASAKLKLELLPNVQNPVISVTTTMPGATPQSTQDEISSKIDNQVRSLAYVKNVKTQSIQNASIVTVEYENNTDMDKAEEQLKKEIDKIKFKDEVGQPELRRNSMDAFPVLAYSFSNKENDLKKVTKVLNEQLIPKLQTVDGVQNAQLNGQTNREITLKFKQNELEKYGLTADDVENYLKTATRTTPLGLFQFGDKDKSIVVDGQYQSVDAFKNINIPLTLAGGQGQSQSQSDNKQNSAMSDVNQASPQQNSKASAPNNISGMPTAKLGDLADITVGDVRTSISKTNGKDAVNLQITKAQDANTVQVAKDVQRKIDTFVDENKDFNVTKTMDTAKPVEKSLYTMVEKASLGTIVAIIVILLFLRNIRTTAISIISIPLSLLMALIALKLSDVSLNILTLGALTVAIGRVIDDSIVVVENIYRRLTDSEEQLKGENLIISATTEVFKPIMSSTLVTIIVFLPLVFVSGSVGEMFRPFALAIAFSLLASLLVSITLVPALAATLFKKGVKRRNKQHQEGLGVVSTTYKKVLHWSLNHKWIVIILSTLILVATIVFGGPRLGTSFISAGDDKFLAITYTPKPGETEQAVLNHAKDVEKYLKQKKHVKTIQYSVGGSSPVDPTGSTNSMAIMVEYDNDTPNFDVEADKVIKHVDGFKHPGEWKNQDLGTGAGNKSVEVTVKGPSMDAIKSTVKDIEQKMKQVKGLANVKSDLSQTYDQYEIKVDQNKAAENGISASQLAMHLNENLPEKTVTTVKENGKTVDVKVKQNKQTDWSEDKLNNITLKKPTGGTIKLGDIATLVKTTTPSKLTQEQGDYATTVSAKVTNKDVGGTTRQVMSKINNLDKPNNVKVNIGGASDDINNAMTQLAFAMLAAIIIVYLILVITFKGGLAPFTILFSLPFTVIGVIIALLITGETISVPSLIGMLMLIGIVVTNAIVLIDRVINNEQQGMEMKEALIEAGGTRIRPILMTAIATIGALVPLLFGQDSSILISKGLAATVIGGLISSTLLTLVVVPVIYEILFTLKKRFTKR

SEQ ID NO: 43875 - protein, 993 aa, Staphylococcus aureus
MKNAFKLFKMDLKKVAKTPAVWIILAGLAILPSFYAWFNLWAMWDPYGNTGHIKVAVVNEDKGDTIRGKKVNVGNTMVNTLKKNKSFDWQFVSREKADHEIKMGKYFAGIYIPSKFTHEITGTLRKQPQKADVEFKVNQKINAVASKLTDTGSSVVVEKANEQFNKTVTRALLEEANKAGLTIEENVPTINKIKNAVYSADKALPKINDFANKIVYLNNHQADLDKYANDFRKLGNYKGDILDAQKKLNEVNGAIPQLNEKAKLILALNNYMPKIEKALNFAADDVPAQFPKINQGLNIASQGIDQANGQLNDAKGFVTQVRSRVGDYQDAIRRAQDLNRRNQQQIPQNSAANNETSNSSPAAGNGVASTPPSAPSGDTAPNNNVTQNTAPNSNNAPVSTTPQSTSGKKDGQSFADITTTQVSTANENTQNITDKDVKSMEAALTGSLLSLSNNLDTQAKAAQKDSQALRNISYGILASDKPSDFRESLDNVKSGLEYTTQYNQQFIDTLKEIEKNENVDLSKEIDKVKAANNRINESLRLVNQLSNALKNGSSGTAEATKLLDQLSKLDSSLSSFRDYVKKDLNSSLVSISQRIMDELNKGQTALSNVQSKLNTIDQVINSGQAILKNGKTRIDRLQTVLPSIEQQYISAVKNAQANFPKVKSDVAKAANFVRNDLPQLEQRLTNATASVNKNLPTLLNGYDQAVGLLNKNQPQAKKALSDLADFSQNKLPDVEKDLKKANKIFKKLDKDDAVDKLIDTLKNDLKKQAGIIANPINKKTVDVFPVKDYGSGMTPFYTALSVWVGALLMVSLLTVDNKHKSLESVLTTRQVFLGKAGFFIMLGMLQALIVSVGDLLILKAGVESPVLFVLITIFCSIIFNSIVYTCVSLLGNPGKAIAIVLLVLQIAGGGGTFPIQTTPQFFQNISPYLPFTYAIDSLRETVGGIVPEILITKLIILTLFGIGFFVVGLILKPVTDPLMKRVSEKVDQSNVTE

SEQ ID NO: 43876 - protein, 750 aa, Staphylococcus aureus
MKALLLKTSVWLVLLFSVMGLWQVSNAAEQYTPIKAHVVTTIDKATTDKQQVTPTKEAAHQFGEEAATNVSASAQGTADEINNKVTSNAFSNKPSTAVSTKVNETHDVDTQQASTQKPTQSATFTLSNAKTASLSPRMFAANVPQTTTHKILHTNDIHGRLAEEKGRVIGMAKLKTIKEQEKPDLMLDAGDAFQGLPLSNQSKGEEMAKAMNAVGYDAMAVGNHEFDFGYDQLKKLEGMLDFPMLSTNVYKDGKRAFKPSTIVTKNSIRYGIIGVTTPETKTKTRPEGIKGVEFRDPLQSVTAEMMRIYKDVDTFVVISHLGIDPSTQETWRGDYLVKQLSQNPQLKKRITVIDGHSHTVLQNGQIYNNDALAQTGTALANIGKVTFNYRNGEVSNIKPSLINVKDVENVTPNKALAEQINQADQTFRAQTAEVIIPNNTIDFKGERDDVRTRETNLGNAIADAMEAYGVKNFSKKTDFAVTNGGGIRASIAKGKVTRYDLISVLPFGNTIAQIDVKGSDVWTAFEHSLGAPTTQKDGKTVLTANGGLLHISDSIRVYYDMNKPSGKRINAIQILNKETGKFENIDLKRVYHVTMNDFTASGGDGYSMFGGPREEGISLDQVLASYLKTANIAKYDTTEPQRMLLGKPAVSEQPAKGQQGSKGSESGKDVQPIGDDKAMNPAKQPATGKVVLLPTHRGTVSSGTEGSGRTLEGATVSSKSGNQLVRMSVPKGSAHEKQLPKTGTNQSSRQ

SEQ ID NO: 43877 - protein, 843 aa, Staphylococcus aureus
MGFLSKILDGNNKEIKQLGKLADKVIALEEKTAILTDEEIRNKTKQFQTELADIDNVKKQNDYLDKILPEAYALVREGSKRVFNMTPYKVQIMGGIAIHKGDIAEMRTGEGKTLTATMPTYLNALAGRGVHVITVNEYLSSVQSEEMAELYNFLGLTVGLNLNSKTTEEKREAYAQDITYSTNNELGFDYLRDNMVNYSEDRVMRPLHFAIIDEVDSILIDEARTPLIISGEAEKSTSLYTQANVFAKMLKQDEDYKYDEKTKAVHLTEQGADKAERMFKVENLYDVQNVDVISHINTALRAHVTLQRDVDYMVVDGEVLIVDQFTGRTMPGRRFSEGLHQAIEAKEGVQIQNESKTMASITFQNYFRMYNKLAGMTGTAKTEEEEFRNIYNMTVTQIPTNKPVQRNDKSDLIYISQKGKFDAVVEDVVEKHKAGQPVLLGTVAVETSEYISNLLKKRGIRHDVLNAKNHEREAEIVAGAGQKGAVTIATNMAGRGTDIKLGEGVEELGGLAVIGTERHESRRIDDQLRGRSGRQGDKGDSRFYLSLQDELMIRFGSERLQKMMSRLGLDDSTPIESKMVSRAVESAQKRVEGNNFDARKRILEYDEVLRKQREIIYNERNSIIDEEDSSQVVDAMLRSTLQRSINYYINTADDEPEYQPFIDYINDIFLQEGDITEDDIKGKDAEDIFEVVWAKIEAAYQSQKDILEEQMNEFERMILLRSIDSHWTDHIDTMDQLRQGIHLRSYAQQNPLRDYQNEGHELFDIMMQNIEEDTCKFILKSVVQVEDNIEREKTTEFGEAKHVSAEDGKEKVKPKPIVKGDQVGRNDDCPCGSGKKFKNCHGK

SEQ ID NO: 43878 - protein, 171 aa, Staphylococcus aureus
MAGIIKEISEQNASELVELATRTFYDTFGSYYDDKDFDQFFKDNYTVEKFTQEINHVDSFHYFYQEDGANVGYIKMNINSAQTEEMGETYLEVQRIYFLKDFQGGGRGSQLIELAEKIAQEHNKHKIWLGVWEHNPRAQAFYKRHGFKVVGEHHFQTGDVTDTDLIMEKEL

SEQ ID NO: 43879 - protein, 274 aa, Staphylococcus aureus
MKEKHIKWDKIFYGDDWVNNVVETIRTKDILQSVYLKRYLLRAMMAGFIIGIITVFVLSVKATHEPDLPPGIVNMASAITFSFALVLILFTNSELLTSNFMYFTVGLYYKVIKPTRVLKIFLLCFAGNILGAAILFSFMRFSNVMTPDMLNQLSAVIEHKTLSTGFVSILMKAIFANFFINISLVIAMQIDDVLAKMFVMMFGVTIFAFMGYEHVVYNSCLFMGGLIYQVDTLHFIPAISNIAAAFIGNYIGGGLIIGLFYAYLNDHHQFYKNN

SEQ ID NO: 43880 - protein, 129 aa, Staphylococcus aureus
MARKQVSRKRRVKKNIENGVAHIRSTFNNTIVTITDEFGNALSWSSAGALGFKGSKKSTPFAAQMASETASKSAMEHGLKTVEVTVKGPGPGRESAIRALQSAGLEVTAIRDVTPVPHNGCRPPKRRRV

SEQ ID NO: 43881 - protein, 929 aa, Staphylococcus aureus
MAYQSEYALENEMMNQLEQLGYERVTIRDNKQLLDNFRTILNERHADKLEGNPLTDKEFQRLLTMIDGKSIFESARILRDKLPLRRDDESEIYLSFLDKKSWCKNKFQVTNQVSVEDTYKARYDVTILINGLPLVQVELKRRGIDINEAFNQVKRYRKQNYTGLFRYIQMFIISNGVETRYFSNNDSELLKSHMFYWSDKQNNRINTLQSFAESFMRPCQLAKMISRYMIINETDRILMAMRPYQVYAVEALIQQATETGNNGYVWHTTGSGKTLTSFKASQILSQQDDIKKVIFLVDRKDLDSQTEEEFNKFAKGAVDKTFNTSQLVRQLNDKSLPLIVTTIQKMAKAIQGNAHLLEQYKTNKVVFIIDECHRSQFGDMHRLVKQHFKNAQYFGFTGTPRFPENSSQDGRTTADIFGRCLHTYLIRDAIHDGNVLGFSVDYINTFKNKALKAEDNSMVEAIDTEEVWLADKRVELVTRHIINNHDKYTRNRQYSSIFTVQSIHALIKYYETFKRLNKKLEQPLTIAGIFTFKPNEDDRDGEVPYHSREKLEIMISDYNKKFETNFSTDTTNEYFNHISKNVKKGVKDSKIDILIVVNMFLTGFDSKVLNTLYVDKNLMYHDLIQAYSRTNRVEKESKPFGKIVNYRDLKKETDDALRVFSQTNDTDTILMRSYEEYKKEFMDAYRELKMIVPTPHMVDDIQDEEELKRFVEAYRLLAKIILRLKAFDEFEFTIDEIGMDEQENEDYKSKYLAVYDQVKRATAEKNKVSILNDIDFEIEMMRNDTINVNYIMNILRQIDLEDKAEQRRNQEQIRRILDHADDPTLRLKRDLIREFIDNVVPSLNKDDDIDQEYVNFESIKKEAEFKGFAGERSIDEQALKTISNDYQYSGVVNPHHLKKMIGDLPLKEKRKARKAIESFVAETTEKYGV

SEQ ID NO: 43882 - protein, 917 aa, Staphylococcus aureus
MDYKETLLMPKTDFPMRGGLPNKEPQIQEKWDAEDQYHKALEKNKGNETFILHDGPPYANGNLHMGHALNKILKDFIVRYKTMQGFYAPYVPGWDTHGLPIEQALTKKGVDRKKMSTAEFREKCKEFALEQIELQKKDFRRLGVRGDFNDPYITLKPEYEAAQIRIFGEMADKGLIYKGKKPVYWSPSSESSLAEAEIEYHDKRSASIYVAFDVKDDKGVVDADAKFIIWTTTPWTIPSNVAITVHPELKYGQYNVNGEKYIIAEALSDAVAEALDWDKASIKLEKEYTGKELEYVVAQHPFLDRESLVINGDHVTTDAGTGCVHTAPGHGEDDYIVGQKYELPVISPIDDKGVFTEEGGQFEGMFYDKANKAVTDLLTEKGALLKLDFITHSYPHDWRTKKPVIFRATPQWFASISKVRQDILDAIENTNFKVNWGKTRIYNMVRDRGEWVISRQRVWGVPLPVFYAENGEIIMTKETVNHVADLFAEHGSNIWFEREAKDLLPEGFTHPGSPNGTFTKETDIMDVWFDSGSSHRGVLETRPELSFPADMYLEGSDQYRGWFNSSITTSVATRGVSPYKFLLSHGFVMDGEGKKMSKSLGNVIVPDQVVKQKGADIARLWVSSTDYLADVRISDEILKQTSDVYRKIRNTLRFMLGNINDFNPDTDSIPESELLEVDRYLLNRLREFTASTINNYENFDYLNIYQEVQNFINVELSNFYLDYGKDILYIEQRDSHIRRSMQTVLYQILVDMTKLLAPILVHTAEEVWSHTPHVKEESVHLADMPKVVEVDQALLDKWRTFMNLRDDVNRALETARNEKVIGKSLEAKVTIASNDKFNASEFLTSFDALHQLFIVSQVKVVDKLDDQATAYEHGDIVIEHADGEKCERCWNYSEDLGAVDELTHLCPRCQQVVKSLV

SEQ ID NO: 43883 - protein, 307 aa, Staphylococcus aureus
MNAAVRAVVRTAIYNEIEVYGVYHGYQGLLNDDIHKLELGSVGDTIQRGGTFLYSARCPEFKEQEVRKVAIENLRKRGIEGLVVIGGDGSYRGAQRISEECKEIQTIGIPGTIDNDINGTDFTIGFDTALNTIIGLVDKIRDTASSHARTFIIEAMGRDCGDLALWAGLSVGAETIVVPEVKTDIKEIADKIEQGIKRGKKHSIVLVAEGCMTAQDCQKELSQYINVDNRVSVLGHVQRGGSPTGADRVLASRLGGYAVDLLMQGETAKGVGIKNNKIVATSFDEIFDGKDHKFDYSLYELANKLSI

SEQ ID NO: 43884 - protein, 1229 aa, Staphylococcus aureus
MGKFGLNFFKPTEKFNGNWSILESKSREWEKMYRERWSHDKEVRTTHGVNCTGSCSWKVFVKNGVITWENQQTDYPSCGPDMPEYEPRGCPRGASFSWYEYSPLRIKYPYIRGKLWDLWTEALEENYGNRVAAWASIVENEDKAKQYKQARGMGGHVRSNWKDVTEIIAAQLLYTIKKYGPDRIAGFTPIPAMSMISYAAGARFINLLGGEMLSFYDWYADLPPASPQIWGEQTDVPESSDWYNASYIIMWGSNVPLTRTPDAHFMTEVRYKGTKVISVAPDYAENVKFADNWLAPNPGSDAAIAQAMTHVILQEHYVNQPNERFINYAKQYTDMPFLIMLDEDENGYKAGRFLRASDLGQTTEQGEWKPVIHDAISDSLVVPNGTMGQRWEEGKKWNLKLETEDGSKINPTLSMAEGGYELETIQFPYFDSDGDGIFNRPIPTRQVTLANGDKVRIATIFDLMASQYGVRRFDHKLESKGYDDAESKYTPAWQEAISGVKQSVVIQVAKEFAQNAIDTEGRSMIIMGAGINHWFNSDTIYRSILNLVMLCGCQGVNGGGWAHYVGQEKCRPIEGWSTVAFAKDWQGPPRLQNGTSWFYFATDQWKYEESNVDRLKSPLAKTEDLKHQHPADYNVLAARLGWLPSYPQFNKNSLLFAEEAKDEGIESNEAILKRAINEVKSKQTQFAIEDPDLKKNHPKSLFIWRSNLISSSAKGQEYFMKHLLGTKSGLLATPNEDEKPEEITWREETTGKLDLVVSLDFRMTATPLYSDIVLPAATWYEKHDLSSTDMHPYVHPFNPAIDPLWESRSDWDIYKTLAKAFSEMAKDYLPGTFKDVVTTPLSHDTKQEISTPYGVVKDWSKGEIEAVPGRTMPNFAIVERDYTKIYDKYVTLGPVLEKGKVGAHGVSFGVSEQYEELKSMLGTWSDTNDDSVRANRPRIDTARNVADAILSISSATNGKLSQKSYEDLEEQTGMPLKDISSERAAEKISFLNITSQPREVIPTAVFPGSNKQGRRYSPFTTNIERLVPFRTLTGRQSYYVDHEVFQQFGESLPVYKPTLPPMVFGNRDKKIKGGTDALVLRYLTPHGKWNIHSMYQDNKHMLTLFRGGPTVWISNEDAEKHDIQDNDWLEVYNRNGVVTARAVISHRMPKGTMFMYHAQDKHIQTPGSEITDTRGGSHNAPTRIHLKPTQLVGGYAQISYHFNYYGPIGNQRDLYVAVRKMKEVNWLED

SEQ ID NO: 43885 - protein, 327 aa, Staphylococcus aureus
MAKLSYLEAIRQAQDLALQQNKDVFILGEDVGKKGGVFGTTQGLQQQYGEDRVIDTPLAESNIVGTAIGAAMVGKRPIAEIQFADFILPATNQIISEAAKMRYRSNNDWQCPLTIRAPFGGGVHGGLYHSQSIESIFASSPGLTIVIPSTPYDAKGLLLSSIESNDPVLYFEHKKAYRFLKEEVPEEYYTVPLGKADVKREGEDLTVFCYGLMVNYCLQAADILAADGINVEVVDLRTVYPLDKETIIDRAKNTGKVLLVTEDNLEGSIMSEVSAIIAEHCLFDLDAPIMRLAAPDVPSMPFSPVLENEIMMNPEKILNKMRELAEF

SEQ ID NO: 43886 - protein, 424 aa, Staphylococcus aureus
MEITMPKLGESVHEGTIEQWLVSVGDHIDEYEPLCEVITDKVTAEVPSTISGTITEILVEAGQTVAIDTIICKIETADEKTNETTEEIQAKVDEHTQKSTKKASATVEQTFTAKQNQPRNNGRFSPVVFKLASEHDIDLSQVVGSGFEGRVTKKDIMSVIENGGTTAQSDKQVQTKSTSVDTSSNQSSEDNSENSTIPVNGVRKAIAQNMVNSVTEIPHAWMMIEVDATNLVNTRNHYKNSFKNKEGYNLTFFAFFVKAVADALKAYPLLNSSWQGNEIVLHKDINISIAVADENKLYVPVIKHADEKSIKGIAREINTLATKARNKQLTTEDMQGGTFTVNNTGTFGSVSSMGIINHPQAAILQVESIVKKPVVINDMIAIRSMVNLCISIDHRILDGLQTGKFMNHIKQRIEQYTLENTNIY

SEQ ID NO: 43887 - protein, 470 aa, Staphylococcus aureus
MTKTLPEDFIFGGATAAYQAEGATNTDGKGRVAWDTYLEENYWYTAEPASDFYNRYPVDLELSEKFGVNGIRISIAWSRIFPNGYGEVNPKGVEYYHKLFAECHKRHVEPFVTLHHFDTPEVLHKDGDFLNRKTIDYFVDYAEYCFKEFPEVKYWTTFNEIGPIGDGQYLVGKFPPGIKYDFEKVFQSHHNMMVAHARAVKLFKDGGYQGEIGVVHALPTKYPFDPSNPEDVRAAELEDIIHNKFILDATYLGKYSRETMEGVQHILSVNGGKLNITDEDYAILDAAKDLNDFLGINYYMSDWMRGYDGESEITHNATGDKGGSKYQLKGVGQREFDVDVPRTDWDWMIYPQGLYDQIMRVVKDYPNYHKIYITENGLGYKDEFIESEKTVHDDARIDYVRQHLNVIADAIKDGANVKGYFIWSLMDVFSWSNGYEKRYGLFYVDFETQERYPKKSAYWYKELAETKEIK

SEQ ID NO: 43888 - protein, 226 aa, Staphylococcus aureus
MMYGYPEKWLEGMTTGEGIAAELRLGIVNGHIAEGTLLTENQMAKQFNVSRSPIRDAFKLLQQNQLIQLERMGAHVLPFGEQEKKEMYDLRLMLESFAFSRVKNQERLPIVKEMKKQLEMMKVAVKFEDAESFTKHDFEFHETLIKASNHQYLNSFWSHLKPVMMALVLTSMRQRMQQNPQDFERIHHNHQVFIDAVEQYDSQILKEAFHLNFDDVGKDIEGFWLN

SEQ ID NO: 43889 - protein, 519 aa, Staphylococcus aureus
MNLLSLLLILLGIILGVVGGYVVARNLLLQKQSQARQTAEDIVNQAHKEADNIKKEKLLEAKEENQILREQTEAELRERRSELQRQETRLLQKEENLERKSDLLDKKDEILEQKESKIEEKQQQVDAKESSVQTLIMKHEQELERISGLTQEEAINEQLQRVEEELSQDIAVLVKEKEKEAKEKVDKTAKELLATAVQRLAADHTSESTVSVVNLPNDEMKGRIIGREGRNIRTLETLTGIDLIIDDTPEAVILSGFDPIRREIARTALVNLVSDGRIHPGRIEDMVEKARKEVDDIIREAGEQATFEVNAHNMHPDLVKIVGRLNYRTSYGQNVLKHSIEVAHLASMLAAELGEDETLAKRAGLLHDVGKAIDHEVEGSHVEIGVELAKKYGENETVINAIHSHHGDVEPTSIISILVAAADALSAARPGARKETLENYIRRLERLETLSESYDGVEKAFAIQAGREIRVIVSPEEIDDLKSYRLARDIKNQIEDELQYPGHIKVTVVRETRAVEYAK

SEQ ID NO: 43890 - protein, 584 aa, Staphylococcus aureus
MQNHTAVNTAQAIILRDLVDALLFEDIAGIVSNSEITKENGQTLLIYERETQQIKIPVYFSALNMFRYESSQPITIEGRVSKQPLTAAEFWQTIANMNCDLSHEWEVARVEEGLTTAATQLAKQLSELDLASHPFVMSEQFASLKDRPFHPLAKEKRGLREADYQVYQAELNQSFPLMVAAVKKTHMIHGDTANIDELENLTVPIKEQATDMLNDQGLSIDDYVLFPVHPWQYQHILPNVFATEISEKLVVLLPLKFGDYLSSSSMRSLIDIGAPYNHVKVPFAMQSLGALRLTPTRYMKNGEQAEQLLRQLIEKDEALAKYVMVCDETAWWSYMGQDNDIFKDQLGHLTVQLRKYPEVLAKNDTQQLVSMAALAANDRTLYQMICGKDNISKNDVMTLFEDIAQVFLKVTLSFMQYGALPELHGQNILLSFEDGRVQKCVLRDHDTVRIYKPWLTAHQLSLPKYVVREDTPNTLINEDLETFFAYFQTLAVSVNLYAIIDAIQDLFGVSEHELMSLLKQILKNEVATISWVTTDQLAVRHILFDKQTWPFKQILLPLLYQRDSGGGSMPSGLTTVPNPMVTYD

SEQ ID NO: 43891 - protein, 327 aa, Staphylococcus aureus
MDKETNDNEYRRQSEHRTSAPKRKKKKKIRKLPIILLIVVILLIALVVYIVHSYNSGVEYAKKHAKDVKVHQFNGPVKNDGKISILVLGADKAQGGQSRTDSIMVVQYDFINKKMKMMSVMRDIYADIPGYGKHKINSAYALGGPKLLRKTLDKNLGINPEYYAVVDFTGFEKMIDELMPEGVPINVEKDMSKNIGVSLKKGNHRLNGKELLGYARFRHDPEGDFGRVRRQQQVMQTLKKEMVNFRTVVKLPKVAGILRGYVNTNIPDSGIFQTGLSFGIRGEKDVKSLTVPIKNSYEDVNTNTDGSALQINKNTNKQAIKDFLDED

SEQ ID NO: 43892 - protein, 147 aa, Staphylococcus aureus
MSNQQDVVKELNQQVANWTVAYTKLHNFHWYVKGPNFFSLHVKFEELYNEASQYVDELAERILAVGGNPVGTLTECLEQSIVKEAAKGYSAEQMVEELSQDFTNISKQLENAIEIAGNAGDDVSEDMFIGMQTSVDKHNWMFKSYLS

SEQ ID NO: 43893 - protein, 322 aa, Staphylococcus aureus
MFFKRSDKNMKEKIVIALGGNAIQTKEATAEAQQTAIRRAMQNLKPLFDSPARIVISHGNGPQIGSLLIQQAKSNSDTTPAMPLDTCGAMSQGMIGYWLETEINRILTEMNSDRTVGTIVTRVEVDKDDPRFNNPTKPIGPFYTKEEVEELQKEQPDSVFKEDAGRGYRKVVASPLPQSILEHQLIRTLADGKNIVIACGGGGIPVIKKENTYEGVEAVIDKDFASEKLATLIEADTLMILTNVENVFINFNEPNQQQIDDIDVATLKKYAAQGKFAEGSMLPKIEAAIRFVESGENKKVIITNLEQAYEALIGNKGTHIHM

SEQ ID NO: 43894 - protein, 242 aa, Staphylococcus aureus
MAKQKKFMKIYEALKEDILNGQIQYGEQIPSEHDLVQLYQSSRETVRKALDLLALDGMIQKIHGKGSLVIYQEVTEFPFSELVSFKEMQEEMGVAYLTEVVVNEVVEAHEVPEVQHALNINSSESLIHIVRTRRLNQHVKIVDEDYFLKSIVSDIGNDVASDSIYDYLEKVLNLNISYSSKSITFEPFDEQAYQLFGDVSVAYSATVRSIVYLENTMPFQYNISKHLANEFKFNDFSRRRIK

SEQ ID NO: 43895 - protein, 116 aa, Staphylococcus aureus
MDTHTKEQQFSNLVRSYRKEYVGKGPNSIRVSFKDNWAIAHMTGVLSKVESFYLNDKRNESMLHYTRTEKIKQMYKEIDVNEMESLVGAKFVKLFTDIDLNDDEVISIFVFDKSIE

SEQ ID NO: 43896 - protein, 374 aa, Staphylococcus aureus
MSNGAVFFVIFLKQATCNTYFKEVKIYHLGEMDMKIVALFPEAVEGQENQLLNTKKAIGLKTFLEERGHEFIILADNGEDLDKHLPDMDVIISAPFYPAYMTRERIEKAPNLKLAITAGVGSDHVDLAAASEHNIGVVEVTGSNTVSVAEHAVMDLLILLRNYEEGHRQSVEGEWNLSQVGNHAHELQHKTIGIFGFGRIGQLVAERLAPFNVTLQHYDPINQQDHKLSKFVSFDELVSSSDAITIHAPLTPETDNLFDKDVLSRMKKHSYLVNTARGKIVNRDALVEALASEHLQGYAGDVWYPQPAPADHPWRTMPRNAMTVHYSGMTLEAQKRIEDGVKDILERFFNHEPFQDKDIIVASGRIASKSYTAK

SEQ ID NO: 43897 - protein, 501 aa, Staphylococcus aureus
MLITGVLFTLRMRFFQVRHFKEMIRLMFQGEKSPNGISSFQAIAMSLAGRVGTGNIVGVSTAIFIGGPGAVFWMWITAFLGASSAFIESTLGQIFKRVENNEYRGGPAYYIEYGIGGKFGKIYGIIFAIVTIISVGLLLPGVQSNAIASSMHNAIHVPQWLMGAIVVVILGLIIFGGVRSIANVATAVVPFMAIIYILMAVIIICINIQEVPALFALIFKSAFGLQSAFGGIVGAMIEIGVKRGLYSNEAGQGTGPHAAAAAEVSHPSKQGLVQAFSVYIDTLFVCTATALIILISGTYNVTDGTVNANGTPHLIKDGGIYVENATGKDYSGTAMYAQAGIDKAFHGSGYQFDPTFSGVGSYFIAFALFFFAFTTILSYYYITETNVAYLTRNQNNQVSSIFINIARVIILFATFYGAVKTADVAWAFGDLGVGLMAWLNIIAIWILHKPAVNALKDYEIQKKRLGNGYNAVYQPDPNKLPNAVFWLKTYPERLKQARAKK

SEQ ID NO: 43898 - protein, 607 aa, Staphylococcus aureus
MIIPAIIGYLCGNFQFGLLVATGTLAHIYVFKGPSRSKLRTVIICNLAFAICMMLGTLTAKTPLVFGMTLLIVTVIPFYIFTALKIAGPSSTFFIVTFSLPINLPIAPEEALYRGFAILVGGILATMMVLITIVFSKNKAEEQAIQNDFKLISRLLHTYNDKAAFLQVAKTAVDSFKASDKLLITSTSSNDKLSRRFQKLLLLHTSAQGIYSELLELNAKQIRPLPDELIEMMDHIIAQLDNSDENVRYWRKEVTVTEEFQNLFNHILKIDEMVHANEARIAYEADMRKPLYSKRIYQNLTLDSIVFRNTLRYTAIMMIAIFIALMFDFEKAYWIPLSAHTILLGTSTIHAIERGMARGLGTILGVLVLSVILLFSIPTPVAVILMGIAALFTEALVGANYAIAVVFITIQVILMNGLASQNLTINIAFPRVIDVAIGIVIAIIGLFVLGQRTASVLLPNVMAEVVRKEATLFHYLFSENQYKDNVYQKNTAMNLSVKLNNMTQVYNAANGELFSDKTLIQNYYPSLFALEEISFMLNRAMANEDRLTINEQLMGEYLATFENIAKHLELNTELEIKILPDLPQYNYIQSAMMNIQHNGFRERDKNV

SEQ ID NO: 43899 - protein, 658 aa, Staphylococcus aureus
MKKQIISLGALAVASSLFTWDNKADAIVTKDYSKESRVNEKSKKGATVSDYYYWKIIDSLEAQFTGAIDLLEDYKYGDPIYKEAKDRLMTRVLGEDQYLLKKKIDEYELYKKWYKSSNKNTNMLTFHKYNLYNLTMNEYNDIFNSLKDAVYQFNKEVKEIEHKNVDLKQFDKDGEDKATKEVYDLVSEIDTLVVTYYADKDYGEHAKELRAKLDLILGDTDNPHKITNERIKKEMIDDLNSIIDDFFMETKQNRPNSITKYDPTKHNFKEKSENKPNFDKLVEETKKAVKEADESWKNKTVKKYEETVTKSPVVKEEKKVEEPQLPKVGNQQEVKTTAGKAEETTQPVAQPLVKIPQETIYGETVKGPEYPTMENKTLQGEIVQGPDFLTMEQNRPSLSDNYTQPTTPNPILEGLEGSSSKLEIKPQGTESTLKGIQGESSDIEVKPQATETTEASQYGPRPQFNKTPKYVKYRDAGTGIREYNDGTFGYEARPRFNKPSETNAYNVTTNQDGTVSYGARPTQNKPSETNAYNVTTHANGQVSYGARPTQKKPSKTNAYNVTTHANGQVSYGARPTQKKPSKTNAYNVTTHANGQVSYGARPTYKKPSETNAYNVTTHANGQVSYGARPTQKKPSETNAYNVTTHADGTATYGPRVTK

SEQ ID NO: 43900 - protein, 224 aa, Staphylococcus aureus
MINKNDIVADIVIDYPKAADIFRSVGIDFCCGGQVSIEAASLEKKNVDLNELLQRLNDVEQTNTPGSLNPKFLNVSSLIQYIQAAYHEPLREEFKNLTPYVTKLSKVHGPNHPYLVELKETYDTFKSGMLEHMQKEDDVDFPKLIKYEQGEVVNDINTVIDDLVSDHIATGQLLVKMSDLTSSYEPPIEACGTWRLVYQRLKALEVLTHEHVHLENHVLFKKVS

SEQ ID NO: 43901 - protein, 293 aa, Staphylococcus aureus
MATISAKLVKELRKKTGAGMMDCKKALTETDGDIDKAIDYLREKGIAKAAKKADRIAAEGLVHVETKGNDAVIVEINSETDFVARNEGFQELVKEIANQVLDTKAETVEALMETTLPNGKSVDERIKEAISTIGEKLSVRRFAIRTKTDNDAFGAYLHMGGRIGVLTVVEGSTDEEAARDVAMHIAAINPKYVSSEQVSEEEINHEREVLKQQALNEGKPENIVEKMVEGRLRKYLQEICAVDQDFVKNPDVTVEAFLKTKGGKLVDFVRYEVGEGMEKREENFADEVKGQMK

SEQ ID NO: 43902 - protein, 613 aa, Staphylococcus aureus
MSQFLTQLKDNVLVADGAIGTILYSEGLDTCPEAYNLSHPDKVERIHRSYIEAGADVIQTNTYGANFEKLKRFGLEDKVKAIHQAAVRIAKKAANKDTYILGTVGGFRGIKQEDISLQTILYHTEIQIDTLIEEGVDALLFETYYDLEELTNVISRTRKKYDIPIIAQLTASNTNYLVNGQAINEGLKQLVQCGANIVGLNCHHGPHHMQESFTHIELPEHAFLSCYPNASLLDIENSEFKYSDNAQYFGQVAQNLIREGVRLIGGCCGTTPEHIKFIKESIQTLKPVNDKKVIPIPTKALFNPSQNKVRQSLTSKVQERPTVIIELDTPKHLDTDRFFENIAKLDKANVDAVTLADNSLATVRISNIAAASLIKQYYNIEPLVHITCRDRNLIGLQSHLLGLSLIGVNEILAITGDPSKVGHLPGATNVYDVNSKGLTELALRFNQGINTDGDALKKRTHFNIAGAFNPNVRKLDGAVKRLEKKIESGMSYFITQPVYSKEKIIEIYHATKHLNKPFFIGIMPIASYKNALFLHNEVPGIKMSDEILQQFEAVKDDKAKTRELSLKLSKDLIDTVHEYFNGLYIITPFQNVEDSLELAAYSKSITAHKEAIL

SEQ ID NO: 43903 - protein, 435 aa, Staphylococcus aureus
MKKQVIISGLMLFSLFFGAGNLIFPPILGHTAGQNMWIGMLGFALTGILLPFITVIVVAFYDEGVESVGNRIHPWFGFIFAVVIYMSIGAFYGIPRAANVAYEIGTRHILPVHNQWTLIIFAAIFFAIVYWISLNPSKIVDNLGKLLTPLLLLMVALLSIAVIFNPESALSAPKDKYITHPFISGSLEGYFTMDLVAALAFSVVIVNGYKFKGLTDRMKILKYVCFSGLIAAILLGMIYFALAYVGASTAPGNFKDGTDILTYNSLRVFGSFGNIVFGMTVILACLTTCIGLVNACATFTKKHVPKFSYKIFALIFSIIGFLFTTLGLEMILKIAVPLLTLIYPVSIALVLISFANMFSTFRFSWAYRLATVITLIISILQILNSFNLLHGVILKWFMMLPLADIDLAWLVPFMLFAIIGFIIDVVIRRPKQATT

SEQ ID NO: 43904 - protein, 325 aa, Staphylococcus aureus
MAQMTMVQAINDALKTELKNDQDVLIFGEDVGVNGGVFRVTEGLQKEFGEDRVFDTPLAESGIGGLAMGLAVEGFRPVMEVQFLGFVFEVFDAIAGQIARTRFRSGGTKTAPVTIRSPFGGGVHTPELHADNLEGILAQSPGLKVVIPSGPYDAKGLLISSIRSNDPVVYLEHMKLYRSFREEVPEEEYTIDIGKANVKKEGNDISIITYGAMVQESMKAAEELEKDGYSVEVIDLRTVQPIDVDTIVASVEKTGRAVVVQEAQRQAGVGAAVVAELSERAILSLEAPIGRVAAADTIYPFTQAENVWLPNKNDIIEKAKETLEF

SEQ ID NO: 43905 - protein, 430 aa, Staphylococcus aureus
MAFEFRLPDIGEGIHEGEIVKWFVKAGDTIEEDDVLAEVQNDKSVVEIPSPVSGTVEEVMVEEGTVAVVGDVIVKIDAPDAEDMQFKGHDDDSSSKEEPAKEEAPAEQAPVATQTEEVDENRTVKAMPSVRKYAREKGVNIKAVSGSGKNGRITKEDVDAYLNGGAPTASNESAASATSEEVAETPAAPAAVSLEGDFPETTEKIPAMRRAIAKAMVNSKHTAPHVTLMDEIDVQALWDHRKKFKEIAAEQGTKLTFLPYVVKALVSALKKYPALNTSFNEEAGEIVHKHYWNIGIAADTDRGLLVPVVKHADRKSIFQISDEINELAVKARDGKLTADEMKGATCTISNIGSAGGQWFTPVINHPEVAILGIGRIAQKPIVKDGEIVAAPVLALSLSFDHRQIDGATGQNAMNHIKRLLNNPELLLMEG

SEQ ID NO: 43906 - protein, 341 aa, Staphylococcus aureus
MINQVYQLVAPRQFDVTYNNVDIYGNHVIVRPLYLSICAADQRYYTGRRDENVLRKKLPMSLVHEAVGEVVFDSKGVFEKGTKVVMVPNTPTEQHHIIAENYLASSYFRSSGYDGFMQDYVVMAHDRIVPLPNDIDLSTISYTELVSVSYHAIQRFERKSIPLKNSFGIWGDGNLGYITAILLRKLYPEAKIYVFGKTDYKLSHFSFVDDIFTVNQIPDDLKIDHAFECVGGKGSQVALQQIVEHISPEGSIALLGVSELPVEVNTRLVLEKGLTLIGSSRSGSKDFEQVVDLYRKYPDIVEKLALLKGHEINVCTMQDIVQAFEMDLSTSWGKTVLKWTI

SEQ ID NO: 43907 - protein, 468 aa, Staphylococcus aureus
MTQQIGVIGLAVMGKNLAWNIESHGYSVSVFNRSSEKTDLMVEESKGKNIHPTYSLEEFVNSLEKPRKILLMVQAGKATDATIDSLLPLLDDGDILIDGGNTNYQDTIRRNKALAQSAINFIGMGVSGGEIGALTGPSLMPGGQEEAYNKVADILDAIAAKAKDGASCVTYIGPNGAGHYVKMVHNGIEYADMQLIAESYAMMKELLGMSHEDIAQTFKDWNAGELESYLIEITGDIFMKLDENKEALVEKILDTAGQKGTGKWTSINALELGIPLTIITESVFARFISSIKEERVNASKELNGPKASFDGDKKDFLEKIRKALYMSKICSYAQGFAQMRKASEDNEWNLKLGDLAMIWREGCIIRAQFLQKIKDAYDNNPGLQNLLLDPYFKNIVTEYQDALRDVVATGVQNGVPTPGFSSSINYYDSYRAADLPANLIQAQRDYFGAHTYERKDKEGVFHTQWIEE

SEQ ID NO: 43908 - protein, 625 aa, Staphylococcus aureus
MVQEYDVIVIGAGHAGVEAGLASARRGAKTLMLTINLDNIAFMPCNPSVGGPAKGIVVREIDALGGQMAKTIDKTHIQMRMLNTGKGPAVRALRAQADKVLYQQEMKRVIEDEENLHIMQGMVDELIIEDNEVKGVRTNIGTEYLSKAVIITTGTFLRGEIILGNMKYSSGPNHQLPSITLSDNLRELGFDIVRFKTGTPPRVNSKTIDYSKTEIQPGDDVGRAFSFETTEYILDQLPCWLTYTNAETHKVIDDNLHLSAMYSGMIKGTGPRYCPSIEDKFVRFNDKPRHQLFLEPEGRNTNEVYVQGLSTSLPEHVQRQMLETIPGLEKADMMRAGYAIEYDAIVPTQLWPTLETKMIKNLYTAGQINGTSGYEEAAGQGLMAGINAAGKVLNTGEKILSRSDAYIGVLIDDLVTKGTNEPYRLLTSRAEYRLLLRHDNADLRLTDMGYELGMISEERYARFNEKRQQIDAEIKRLSDIRIKPNEHTQAIIEQHGGSRLKDGILAIDLLRRPEMTYDIILEILEEEHQLNADVEEQVEIQTKYEGYINKSLQQVEKVKRMEEKKIPEDLDYSKIDSLATEAREKLSEVKPLNIAQASRISGVNPADISILLIYLEQGKLQRVSD

SEQ ID NO: 43909 - protein, 383 aa, Staphylococcus aureus
MGKCKVIGVLSGGFTMDKIVIKGGNKLTGEVKVEGAKNAVLPILTASLLASDKPSKLVNVPALSDVETINNVLTTLNADVTYKKDENAVVVDATKTLNEEAPYEYVSKMRASILVMGPLLARLGHAIVALPGGCAIGSRPIEQHIKGFEALGAEIHLENGNIYANAKDGLKGTSIHLDFPSVGATQNIIMAASLAKGKTLIENAAKEPEIVDLANYINEMGGRITGAGTDTITINGVESLHGVEHAIIPDRIEAGTLLIAGAITRGDIFVRGAIKEHMASLVYKLEEMGVELDYQEDGIRVRAEGELQPVDIKTLPHPGFPTDMQSQMMALLLTANGHKVVTETVFENRFMHVAEFKRMNANINVEGRSAKLEGKSHIARCTS

SEQ ID NO: 43910 - protein, 146 aa, Staphylococcus aureus
METIFDYNQIKQIIPHRQPFLLIDKVVEYEEGQRCVAIKQVSGNEPFFQGHFPEYAVMPGVLITEALAQTGAVAILNSEENKGKIALFAGIDKCRFKRQVVPGDTLTLEVEITKIKGPIGKGNAKATVDGQLACSCELTFAIQDVK

SEQ ID NO: 43911 - protein, 68 aa, Staphylococcus aureus
MLNLKVKVILQGAQVKATDLRAAAALILAGLVADGKTSVTELTHLDRGYVDLHGKLKQLGADIERIND

SEQ ID NO: 43912 - protein, 579 aa, Staphylococcus aureus
MAKIKANEALVKALQAWDIDHLYGIPGDSIDAVVDSLRTVRDQFKFYHVRHEEVASLAAAGYTKLTGKIGVALSIGGPGLIHLLNGMYDAKMDNVPQLILSGQTNSTALGTKAFQETNLQKLCEDVAVYNHQIEKGDNVFEIVNEAIRTAYEQKGVAVVICPNDLLTEKIKDTTNKPVDTSRPTVVSPKYKDIKKAVKLINKSKKPVMLIGVGAKHAKDELREFIEMAKIPVIHSLPAKTILPDDHPYSIGNLGKIGTKTSYQTMQEADLLIMVGTNYPYVDYLPKKNIKAIQIDTNPKNIGHRFNINVGIVGDSKIALHQLTENIKHVAERPFLNKTLERKAVWDKWMEQDKNNNSKPLRPERLMASINKFIKDDAVISADVGTATVWSTRYLNLGVNNKFIISSWLGTMGCGLPGAMASKIAYPNRQAIAIAGDGAFQMVMQDFATAVQYDLPLTVFVLNNKQLAFIKYEQQAAGELEYAVDFSDMDHAKFAEAAGGKGYTIKSASEVDAIVEEALAQDVPTIVDVYVDPNAAPLPGKIVNEEALGYGKWAFRSITEDKYLDLDQIPPISVAAKRFL

SEQ ID NO: 43913 - protein, 155 aa, Staphylococcus aureus
IKDDAVISADVGTATVWSTRYLNLGVNNKFIISSWLGTMGCGLPGAIASKIAYPNRQAIAIAGDGAFQMVMQDFATAVQYDLPVFVLNNKQLAFIKYEQQAAGELEYAVDFSDMDHAKFAEAAGGKGYTIKSASEVDAIVEEALAQDVPTIVDVY

SEQ ID NO: 43914 - protein, 203 aa, Staphylococcus aureus
MAKEIAKSLLDIEAVTLSPNDLYTWSSGIKSPIYCDNRVTLGYPLVRGAIRDGLINLIKEHFPEVEVISGTATAGIPHAAFIAEKLKLPMNYVRSSNKSHGKQNQIEGAKSEGKKVVVIEDLISTGGSSVTAVEALKQAGAEVLGVVAIFTYGLKKADDTFSNIQLPFYTLSDYNELIEVAENEGKISSEDIQTLVEWRDNLA

SEQ ID NO: 43915 - protein, 549 aa, Staphylococcus aureus
MNKQWWKEAVAYQVYPRSFNDSNHDGIGDLPGMIDKLDYLKDLGIDVIWLSPMFKSPNDDNGYDISDYQEIMDEFGTMEDFDCLLKGIHDRGMKLILDLVVNHTSDEHPWFIESKSSKDNPKRDWYIWQDPKQDGSEPNNWESIFNGSTWEYDANTEQYYFHLFSKKQPDLNWGNPEVRDAVFEMMNWWFDKGIDGFRVDAITHIKKTFEAGDLPVPEGKTYAPAFDVDMNQPGIQTWLQEMKDRSLSKYDIMTVGEANGVSPDDADDWVGEENGKFNMIFQFEHLGLWNSGDSHFDVNSYKSVLNRWQKQLENKGWNALFIENHDQPRRVSTWGDDDKYWYESATSHAAVYFLQQGTPFIYQGQEIGMTNYPFESIETFNDVAVKNDYQIVKAQGGDVDALLAKYKDENRDNSRTPMQWDDTLNGGFTNGEPWFPVNLNYKTINVAQQLEDEHSVLQFYKDLIQLRKSNDVYVYGQFDLVDAENSQVFAYTRTLNEKQVLIVGNLTNHEAELTVPFDLSHGEVKLFNYDAKVNLKQLRPYEACVIELN

SEQ ID NO: 43916 - protein, 339 aa, Staphylococcus aureus
MVTIKDVALKAGVSPSTVSRVIKGNKRISEATISKVKKVMEELNYFPNTAARTLITNQTYKIGLVLKGSEEPIRLNPFYINVLLGISETCNQHGYGTQTTVSNNMNDLMDEVYKMIKQRMVDAFILLYSKENDPIKQMLIDESMPFIVIGKPTSDIDHQFTHIDNDNILASENLTRHVIEQGVDELIFITEKGNFEVSKDRIQGFETVASQFNLDYQIIETSNEREVILNYMQNLHTRLKDPNIKQAIISLDAMLHLAILSVLYELNIEIPKDVMTATFNDSYLTEIASPPQTCIDIKPRMLGQQAGSAILNILKNKAQDVIELVIIDTELKIRKSTQR

SEQ ID NO: 43917 - protein, 169 aa, Staphylococcus aureus
MNKQWWKEAVAYQVYPRSFNDSNHDGIGDLPGMIDKLDYLKDFGIDVIWLSPMFKSPNDDNGYDISDYQEIMDEFGTMEDFDRLLKGVHDRGMKLILDLVVNHTSDEHPWFIESKSSKDNPKRDWYIWQDPKPDGSEPNNWESIFNGSTWEYDANTEQYYFHLFSKKQG

SEQ ID NO: 43918 - protein, 256 aa, Staphylococcus aureus
MLNLENKTYVIMGIANKRSIAFGVAKVLDQLGAKLVFTYRKERSRKELEKLLEQLNQPEAHLYQIDVQSDEEVINGFEQIGKDVGNIDGVYHSIAFANMEDLRGRFSETSREGFLLAQDISSYSLTIVAHEAKKLMPEGGSIVATTYLGGEFAVQNYNVMGVAKASLEANVKYLALDLGPDNIRVNAISAGPIRTLSAKGVGGFNTILKEIEERAPLKRNVDQVEVGKTAAYLLSDLSSGVTGENIHVDSGFHAIK

SEQ ID NO: 43919 - protein, 172 aa, Staphylococcus aureus
MAKDQTQINDKIRAKELRLIGQDGEQIGVKSKREALEMAERVDLDLVVVAPNAKPPVARIMDYGKFKFEQQKKEKEMKKKQKIINVKEIRLSPTIEEHDFQTKLKNGRKFLTKGDKCKVSIRFRGRAITHKEIGQRVLEKYADECKDIATVEQKPKMDGRQMFIMLAPTAEK

SEQ ID NO: 43920 - protein, 217 aa, Staphylococcus aureus
MGQKINPIGLRVGIIRDWEAKWYAEKDFASLLHEDLKIRKFIDNELKEASVSHVEIERAANRINIAIHTGKPGMVIGKGGSEIEKLRNKLNALTDKKVHINVIEIKKVDLDARLVAENIARQLENRASFRRVQKQAITRAMKLGAKGIKTQVSGRLGGADIARAEQYSEGTVPLHTLRADIDYAHAEADTTYGKLGVKVWIYRGEVLPTKNTSGGGK

SEQ ID NO: 43921 - protein, 147 aa, Staphylococcus aureus
MNIYDEYRSYLIEELDDCLTIQKNNDTAYYDVLEAINDLSNDSLCVLNHLYINEGQEETFEQKFLQRNKHLKNVDGFKALRFLRPRTAGRHYIIITLWENRQAFYHWQNSAEYKHTHKHRGTSKGADVKIINRELSYNIRIELADMV

SEQ ID NO: 43922 - protein, 681 aa, Staphylococcus aureus
MRKKLFGQLQRIGKALMLPVAILPAAGLLLAIGTAIQGEALQHYLPFIQNGGVQNVAKLMTAAGSIIFENLPMIFALGVAIGLAGGDGVAAIAAFVGYIIMNKTMGDFLQVTPKNVTDPASGYASILGIPTLQTGVFGGIIIGALAAWCYNKFYNINLPSYLGFFAGKRFVPIMMATTSFILAFPMALIWPTIQSGLNAFSTGLLDSNTGVAVFLFGFIKRLLIPFGLHHIFHAPFWFEFGSWKNAAGEIIHGDQRIFIEQIREGAHLTAGKFMQGEFPVMMFGLPAAALAIYHTAKPENKKVVAGLMGSAALTSFLTGITEPLEFSFLFVAPLLFFIHAVLDGLSFLTLYLLDVHLGYTFSGGFIDYVLLGVLPNKTQWWLVIPVGLVYAVIYYFVFRFLIVKLKYKTPGREDKQSQAVTASATELPYAVLEAMGGKANIKHLDACITRLRVEVNDKSKVDVPGLKDLGASGVLEVGNNMQAIFGPKSDQIKHEMQQIMNGQVVENPTTMEDDKDETVVVAEDKSATSELSHIVHAPLTGEVTPLSEVPDQVFSEKMMGDGIAIKPSQGEVRAPFNGKIQMIFPTKHAIGLVSDSGLELLIHIGLDTVKLNGEGFTLHVEEGQEVKQGDLLINFDLDYIRNHAKSDITPIIVTQGNITNLDFKQGEHGNISFGDQLFEAK

SEQ ID NO: 43923 - protein, 219 aa, Staphylococcus aureus
MFGSDLDSAQLLQALYETLYMVSIALFLGAVIGIPLGVLLVITRKQGIWPNIVIHQVLNPLINILRSLPFIILLIAIVPFTKLVVGTSIGTTAAIVPLTVYVAPYIARLVENSLLEVDEGIIEAAKAMGASPLQIIRYFLIPEALGSLVLAITTAIIGLIGSTAMAGAVGGGGIGDLALVYGYQRFDTTVIIITVIVLVIIVQVIQTLGNVLARFIRRH

SEQ ID NO: 43924 - protein, 2271 aa, Staphylococcus aureus
MSKRQKAFHDSLANEKTRVRLYKSGKNWVKSGIKEIEMFKIMGLPFISHSLVSQDNQSISKKMTGYGLKTTAVIGGAFTVNMLHDQQAFAASDAPLTSELNTQSETVGNQNSTTIEASTSTADSTSVTKNSSSVQTSNSDTVSSEKSEKVTSTTNSTSNQQEKLTSTSESTSSKNTTSSSDTKSVASTSSTEQPINTSTNQSTASNNTSQSTTPSSVNLNKTSTTSTSTAPVKLRTFSRLAMSTFASAATTTAVTANTITVNKDNLKQYMTTSGNATYDQSTGIVTLTQDAYSQKGAITLGTRIDSNKSFHFSGKVNLGNKYEGHGNGGDGIGFAFSPGVLGETGLNGAAVGIGGLSNAFGFKLDTYHNTSKPNSAAKANADPSNVAGGGAFGAFVTTDSYGVATTYTSSSTADNAAKLNVQPTNNTFQDFDINYNGDTKVMTVKYAGQTWTRNISDWIAKSGTTNFSLSMTASTGGATNLQQVQFGTFEYTESAVTQVRYVDVTTGKDIIPPKTYSGNVDQVVTIDNQQSALTAKGYNYTSVDSSYASTYNDTNKTVKMTNAGQSVTYYFTDVKAPTVTVGNQTIEVGKTMNPVVLTTTDNGTGTVTNTVTGLPSGLSYDSATNSIIGTPTKIGQSTVTVVSTDQANNKSTTTFTINVVDTTAPTVTPIGDQSSEVYSPISPIKIATQDNSGNAVTNTVTGLPSGLTFDSTNNTISGTPTNIGTSTISIVSTDASGNKTTTTFKYEVTRNSMSDSVSTSGSTQQSQSVSTSKADSQSASTSTSGSIVVSTSASTSKSTSVSLSDSVSASKSLSTSESNSVSSSTSTSLVNSQSVSSSMSGSVSKSTSLSDSISNSNSTEKSESLSTSTSDSLRTSTSLSDSLSMSTSGSLSKSQSLSTSISGSSSTSASLSDSTSNAISTSTSLSESASTSDSISISNSIANSQSASTSKSDSQSTSISLSTSDSKSMSTSESLSDSTSTSGSVSGSLSIAASQSVSTSTSDSMSTSEIVSDSISTSGSLSASDSKSMSVSSSMSTSQSGSTSESLSDSQSTSDSDSKSLSLSTSQSGSTSTSTSTSASVRTSESQSTSGSMSASQSDSMSISTSFSDSTSDSKSASTASSESISQSASTSTSGSVSTSTSLSTSNSERTSTSVSDSTSLSTSESDSISESTSTSDSISEAISASESTSISLSESNSTSDSESQSASAFLSESLSESTSESTSESVSSSTSESTSLSDSTSESGSTSTSLSNSTSGSASISTSTSISESTSTFKSESVSTSLSMSTSTSLSNSTSLSTSLSDSTSDSKSDSLSTSMSTSDSISTSKSDSISTSTSLSGSTSESESDSTSSSESKSDSTSMSISMSQSTSGSTSTSTSTSLSDSTSTSLSLSASMNQSGVDSNSASQSASNSTSTSTSESDSQSTSTYTSQSTSQSESTSTSTSLSDSTSISKSTSQSGSTSTSASLSGSESESDSQSISTSASESTSESASTSLSDSTSTSNSGSASTSTSLSNSASASESDSSSTSLSDSTSASMQSSESDSQSTSASLSDSLSTSTSNRMSTIASLSTSVSTSESGSTSESTSESDSTSTSLSDSQSTSRSTSASGSASTSTSTSDSRSTSASTSTSMRTSTSDSQSMSLSTSTSTSMSDSTSLSDSVSDSTSDSTSASTSGSMSVSISLSDSTSTSTSASEVMSASISDSQSMSESVNDSESVSESNSESDSKSMSGSTSVSDSGSLSVSTSLRKSESVSESSSLSGSQSMSDSVSTSDSSSLSVSTSLRSSESVSESDSLSDSKSTSGSTSTSTSGSLSTSTSLSGSESVSESTSLSDSISMSDSTSTSDSDSLSGSISLSGSTSLSTSDSLSDSKSLSSSQSMSGSESTSTSVSDSQSSSTSNSQFDSMSISASESDSMSTSDSSNISGSNSTSTSLSTSDSMSGSVSVSTSTSLSDSISGSTSVSDSSSTSTSTSLSDSMSQSQSTSTSASGSLSTSISTSMSMSASTSSSQSTSVSTSLSTSDSISDSTSISISGSQSTVESESTSDSTSISDSESLSTSDSDSTSTSTSDSTSGSTSTSISESLSTSGSGSTSVSDSTSMSESDSTSVSMSQDKSDSTSISDSESVSTSTSTSLSTSDSTSTSESLSTSMSGSQSISDSTSTSMSGSTSTSESNSMHPSDSMSMHHTHSTSTSRLSSEATTSTSESQSTLSATSEVTKHNGTPAQSEKRLPDTGDSIKQNGLLGGVMTLLVGLGLMKRKKKKDENDQDDSQA

SEQ ID NO: 43925 - protein, 296 aa, Staphylococcus aureus
MNKEQLEKMKNGKGFIAALDQSGGSTPKALKEYGVNEDQYSNEDEMFQLVHDMRTRVVTSPSFSPDKILGAILFEQTMDREVEGKYTADYLADKGVVPFLKVDKGLAEEQNGVQLMKPIDNLDSLLDRANERHIFGTKMRSNILELNEQGIKDVVEQQFEVAKQIIAKGLVPIIEPEVNINAKDKAEIEKVLKAELKKGLDSLNADQLVMLKLTIPTEPNLYKELAEHPNVVRVVVLSGGYSREKANELLKDNDELIASFSRALASDLRADQSKEEFDKALGDAVESIYDASVNKN

SEQ ID NO: 43926 - protein, 430 aa, Staphylococcus aureus
MIQTLVNFFRTKEVRNKIFFTLAMLVIFKIGTYIPAPGVNPAAFDNPQGSQGATELLNTFGGGALKRFSIFAMGIVPYITASIVMQLLQMDIVPKFSEWAKQGEVGRRKLNNVTRYLAISLAFIQSIGMAFQFNNYLKGALIINQSIMSYLLIALVLTAGTAFLIWLGDQITQFGVGNGISIIIFAGILSTLPASLIQFGQTAFVGQEDTSLAWLKVLGLLVSLILLTVGAIYVLEAVRKIPIQYAKKQTAQRLGSQATYLPLKVNSAGVIPVIFAMAFFLLPRTLTLFYPDKEWAQNIANAANPSSNVGMVVYIVLIILFTYFYAFVQVNPEKMADNLKKQGSYVPGIRPGEQTKKYITKVLYRLTFVGSIFLAVISILPILATKFMGLPQSIQIGGTSLLIVIGVAIETMKSLEAQVSQKEYKGFGGR

SEQ ID NO: 43927 - protein, 491 aa, Staphylococcus aureus
MNFKLNNTLSNEINTLIIGIPEHLNQLERISFNHIDITESLERLKHQHIIGSKVGKIYTTAFDVQDQTYRLITVGLGNLKARSYQDMLKIWGHLFQYIKSEHIEDTYLLMDSFISKYDQLSDVLMACGIQSERATYEFDHYKSSKKAPFKTNLNLISESLIELDFIHEGISIGQSINLARDFSNMPPNVLTPQTFAEDIVNHFKNTKVKVDVKDYDTLVSEGFGLLQAVGKGSKHKPRLVTITYNGKDKDVAPIALVGKGITYDSGGYSIKTKNGMATMKFDMCGAANVVGIIEAASRLQLPVNIVGVLACAENMINEASMKPDDVFTALSGETVEVMNTDAEGRLVLADAVYYANQYQPSVIMDFATLTGAAIVALGDDKAAAFESNSKVILNDILQISSKVDEMVFELPITATERASINHSDIADLVNHTNGQGKALFAASFVTHFSGQTPHIHFDIAGPATTNKASYNGPKGPTGFMIPTIVQWLKQQ

SEQ ID NO: 43928 - protein, 453 aa, Staphylococcus aureus
MSEKEIWEKVLEIAQEKLSAVSYSTFLKDTELYTIKDGEAIVLSSIPFNANWLNQQYAEIIQAILFDVVGYEVKPHFITTEELANYSNNETATPKETTKPSTETTEDNHVLGREQFNAHNTFDTFVIGPGNRFPHAASLAVAEAPAKAYNPLFIYGGVGLGKTHLMHAIGHHVLDNNPDAKVIYTSSEKFTNEFIKSIRDNEGEAFRERYRNIDVLLIDDIQFIQNKVQTQEEFFYTFNELHQNNKQIVISSDRPPKEIAQLEDRLRSRFEWGLIVDITPPDYETRMAILQKKIEEEKLDIPPEALNYIANQIQSNIRELEGALTRLLAYSQLLGKPITTELTAEALKDIIQAPKSKKITIQDIQKIVGQYYNVRIEDFSAKKRTKSIAYPRQIAMYLSRELTDFSLPKIGEEFGGRDHTTVIHAHEKISKDLKEDPIFKQEVENLEKEIRNV

SEQ ID NO: 43929 - protein, 292 aa, Staphylococcus aureus
MKITTIAKTSLALGLLTTGVITTTTQEANATTPSSTKVEAPQSTPPSTKVEAPQSKPNATTPPSTKVETPQQTPNATTPSSTKVETPQSPTTKQVPTEINPKFKDLRAYYTKPSLEFKNEIGIILKKWTTIRFMNIVPDYFIYKIALVGKDDKKYDEGVHRNVDVFVVLEEKNKYGVERYSVGGITKSNSKKVDHKAGVRITKEDNKGTISHDVSEFKITKEQISLKELDFKLRKQLIENHNLYGNVGSGKIVINMKNGGKYTFELHKKLQENRMADVIDGTNIDNIEVNIK

SEQ ID NO: 43930 - protein, 207 aa, Staphylococcus aureus
MANYDVLKLDGTKSGSIELSDAVFGIEPNNSVLFEAINLQRASLRQGTHAVKNRSAVSGGGRKPWKQKGTGRARQGTIRAPQWRGGGIVFGPTPRSYAYKMPKKMRRLALRSALSFKAQENGLTVVDAFNFEAPKTKEFKNVLSTLEQPKKVLVVTENEDVNVELSARNIPGVQVTTAQGLNVLDITNADSLVITEAAAKKVEEVLG

SEQ ID NO: 43931 - protein, 162 aa, Staphylococcus aureus
MFNMFHFIIMVVYNMNYNILEVKEMPFTMKGYPEKWKEFEVIKRQKAIEIANAMLKEGYLEKDVVPIAAKKAKDWYRALSKEEIKALEEENFVQFHTATMEKAEVDSEYATTDNEEHIQEQSNQDKSYFDSESIGNQSGGVRQREPLMDGAHPKVVESFKDV

SEQ ID NO: 43932 - protein, 202 aa, Staphylococcus aureus
MSKFDEQIIVVPREIIFNNEKNTFNGFLNKNKPEGQNIFDALSQYEVKRRGDMEEDPSYKQLISYCLLENEHGEILVYERLSGGGEARLHGQSSIGVGGHMNDVPGAESINEVLRVNAQRELEEEVGLSEQDSQNMEYIGFINDDNNEVGKVHIGVVFKITVSTNDVEAKETDTLRIKWVEKGNIESYDDFETWSALILQDL

SEQ ID NO: 43933 - protein, 657 aa, Staphylococcus aureus
MAKETFYITTPIYYPSGNLHIGHAYSTVAGDVIARYKRMQGYDVRYLTGTDEHGQKIQEKAQKAGKTEIEYLDEMIAGIKQLWAKLEISNDDFIRTTEERHKHVVEQVFERLLKQGDIYLGEYEGWYSVPDETYYTESQLVDPQYENGKIIGGKSPDSGHEVELVKEESYFFNISKYTDRLLEFYDQNPDFIQPPSRKNEMINNFIKPGLADLAVSRTSFNWGVHVPSNPKHVVYVWIDALVNYISALGYLSDDESLFNKYWPADIHLMAKEIVRFHSIIWPILLMALDLPLPKKVFAHGWILMKDGKMSKSKGNVVDPNILIDRYGLDATRYYLMRELPFGSDGVFTPEAFVERTNFDLANDLGNLVNRTISMVNKYFDGELPAYQGPLHELDEEMEAMALETVKSYTESMESLQFSVALSTVWKFISRTNKYIDETTPWVLAKDDSQKDMLGNVMAHLVENIRYAAVLLRPFLTHAPKEIFEQLNINNPQFMEFSSLEQYGVLTESIMVTGQPKPIFPRLDSEAEIAYIKESMQPPATEEEKEEIPSKPQIDIKDFDKVEIKAATIIDAEHVKKSDKLLKIQVDLDSEQRQIVSGIAKFYTPDDIIGKKVAVVTNLKPAKLMGQKSEGMILSAEKDGVLTLVSLPSAIPNGAVIK

SEQ ID NO: 43934 - protein, 311 aa, Staphylococcus aureus
MFHHISVMLNETIDYLNVKENGVYIDCTLGGAGHALYLLNQLNDDGRLIAIDQDQTAIDNAKEVLKDHLHKVTFVHSNFRELTQILKDLNIEKVDGIYYDLGVSSPQLDIPERGFSYHHDATLDMRMDQTQELTAYEIVNNWSYEALVKIFYRYGEEKFSKQIARRIEAHREQQPITTTLELVDIIKEGIPAKARRKGGHPAKRVFQALRIAVNDELSAFEDSIEQAIELVKVDGRISVITFHSLEDRLCKQVFQEYEKGPEVPRGLPVIPEAYTPKLKRVNRKPITATEEDLDDNNRARSAKLRVAEILK

SEQ ID NO: 43935 - protein, 168 aa, Staphylococcus aureus
MGEHQNVKLNRTVKAAVLTVSDTRDFVTDKGGQCVRQLLQADDVEVSDAHYTIVKDEKVAITTQVKKWLEEDIDVIITTGGTGIAQRDVTIEAVKPLLTKEIEGFGELFRYLSYVEDVGTRALLSRAVAGTVNNKLIFSIPGSTGAVKLALEKLIKPELNHLIHELTK

SEQ ID NO: 43936 - protein, 334 aa, Staphylococcus aureus
MSQERYSRQILFKQIGEIGQSKINQKCALIIGMGALGTHVAEGLVRAGIAKLIIVDRDYIEFSNLQRQTLFTEEDALKMMPKVVAAKKHLLALRSDVDIDGCIAHVDYYFLETHGQDVDVIIDATDNFETRQLINDFAYKHRIPWIYGGVVQSTYTEAAFIPGKTPCFNCLVPQLPALNLTCDTVGVIQPAVTMATSLQLRDAMKVLTEQPIDTKITYGDIWEGSHYSFGFSKMQRSDCTTCGDVPSYPYLNKNEQRYATLCGRDTVQYENASITHDILVQFLKQHQLNYRSNSYMVMFEFKGHRIVAFKGGRFLIHGMTRTSDATHLMNLLFG

SEQ ID NO: 43937 - protein, 115 aa, Staphylococcus aureus
MEKAYRIKKNADFQRIYKKGHSVANRQFVVYTCNNKEIDHFRLGISVSKKLGNAVLRNKIKRAIRENFKVHKSHILAKDIIVIARQPAKDMTTLQIQNSLEHVLKIAKVFNKKIK

SEQ ID NO: 43938 - protein, 610 aa, Staphylococcus aureus
MSKIIGIDLGTTNSCVTVLEGDEPKVIQNPEGSRTTPSVVAFKNGETQVGEVAKRQAITNPNTVQSIKRHMGTDYKVDIEGKSYTPQEISAMILQNLKNTAESYLGEKVDKAVITVPAYFNDAERQATKDAGKIAGLEVERIINEPTAAALAYGLDKTDKDEKVLVFDLGGGTFDVSILELGDGVFEVLSTAGDNKLGGDDFDQVIIDYLVAEFKKENGVDLSQDKMALQRLKDAAEKAKKDLSGVSQTQISLPFISAGENGPLHLEVNLTRSKFEELSDSLIRRTMEPTRQAMKDAGLTNSDIDEVILVGGSTRIPAVQEAVKKEIGKEPNKGVNPDEVVAMGAAIQGGVITGDVKDVVLLDVTPLSLGIEILGGRMNTLIERNTTIPTSKSQIYSTAVDNQPSVDVHVLQGERPMAADNKTLGRFQLTDIPPAERGKPQIEVTFDIDKNGIVNVTAKDLGTNKEQRITIQSSSSLSDEEIDRMVKDAEVNAEADKKRREEVDLRNEADSLVFQVEKTLTDLGENIGEEDKKSAEEKKDALKTALEGQDIEDIKSKKEELEKVIQELSAKVYEQAAQQQQQAQGANAGQNNDSTVEDAEFKEVKDDDKK

SEQ ID NO: 43939 - protein, 113 aa, Staphylococcus aureus [sequence omitted]

SEQ ID NO: 43940 - protein, 298 aa, Staphylococcus aureus
MFKRIKLILIATIILSGCSTTNNESNNETKSVPEEMEASKYVGQGFQLPAEKDAIEFAKKHRKEFEKVGEQFFKDNFGLKVKATNVVGKDDGVEVYVHCEDHGIVFNASLPLYKDAIHQKGSMRSNDNGDDMSMMVGTVLSGFEYRAQKEKYDNLYKFLKENEKKYQYTGFTKEAINKTQNVGYQNEYFYITYLSRNLKEYRKYYEPLIHKKDKEFKEGMQRARKELNYTANTDVVSTLFSTKKNFTKDNTVDDVIELSNKLKDKPNMPQKSQVTIQLGKPSINTKKPFYDDINPIEG

SEQ ID NO: 43941 - protein, 288 aa, Staphylococcus aureus
MENESSKDTNTETKSVPEEMEASKYVGQGFQPPAEKDAIEFAKKHRKEFEKVGEQFFKDNFGLKVKATNVVGKDDGVEVYVHCEDHGIVFNASLPLYKDAIHQKGSMRSNDNGDDMSMMVGTVLSGFEYRAQKEKYDNLYKFFKENEKKYQYTGFTKEAINKTQNVGYQNEYFYITYLSRNLKEYRKYYEPLIHKNDKEFKEGMQRARKELDYTANSNTVATLFSTNDKKNRKEKINNVIDLSEKIERTKDMPIKNTITTQLGNKLIGTKKARFDDKKVVSFGAFEDE

SEQ ID NO: 43942 - protein, 145 aa, Staphylococcus aureus
MDMNFDLYMNGVVEQARNEIESAGYEQLTTAEDVDKVLKQDGTTLVMINSVCGCAGGIARPAASHALHYDVLPDRLVTVFAGQDKEATQRAREYFEGYAPSSPSFALVKDGKITEMIERHQIEGHDVMNVINQLQTLFNKYCEER

SEQ ID NO: 43943 - protein, 326 aa, Staphylococcus aureus
MLKLNPYKIGFRTIKTAVGMTLGVIISKLLGLDNYASSAILVVLCIKHTKVHSLQAIISRLVSCFLVLFLGSAIFSLLGQSPIVLGIIVLLFIPLTVVLKVQEGVITSCVILLHVFNAKSIDAHLIVNETLLLLIGLSIAFTMNLMMPSLDKQLDEYKCKIEQQIADIFSKYSYICEKYEDTIAIEFEVLLLNIKKAKSIAFRDVKNHFVRNENSYYHYFDMREEQVELLMRMKPLIESICHKDPLLNDVSSLLKEIGLNVNSNDYTAMRLHNLYETRLKLDELPLPTTHKALNSRASIIQILNELEEYLQIKSQFGSLKMHSEVA

SEQ ID NO: 43944 - protein, 310 aa, Staphylococcus aureus
MLESKWGLRFIAFLLALFFFLSVNNVFGNIFNTGNLGQKSSKTIQDVPVEILYNTKDLHLTKAPETVNVTISGPQSKIIKIENPEDLRVVIDLSNAKAGKYQEKYQVKGLADDIHYSVKPKLANITLENKVTKKMTVQPDVSQSDIDPLYKITKQEVSPQTVKVTGGEEQLNDIAYLKATFKTNKKINGDTKDVAEVTAFDKKLNKLNVSIQPNEVNLQVKVEPFSKKVKVNVKQKGSLADDKELSSIDLEDKEIEIFGSRDDLQNISEVDAEVDLDGISESTEKTVKINLPEHVTKAQPSETKAYINVK

SEQ ID NO: 43945 - protein, 298 aa, Staphylococcus aureus
MNHIQEAFLNTLKVERNFSEHTLKSYQDDLIQFNQFLEQEHLQLKTFEYRDARNYLSYLYSNHLKRTSVSRKISTLRTFYEYWMTLDENIINPFVQLVHPKKEKYLPQFFYEEEMEALFKTVEEDTSKNLRDRVILELLYATGIRVSELVNIKKQDIDFYANGVTVLGKGSKERFVPFGAYCRQSIENYLEHFKPIQSCNHDFLILNMKGEAITERGVRYVLNDIVKRTAGVSEIHPHKLRHTFATHLLNQGADLRTVQSLLGHVNLSTTGKYTHVSNQQLRKVYLNAHPRAKKENET

SEQ ID NO: 43946 - protein, 410 aa, Staphylococcus aureus
MIMLSIKHLTKIYSGNKKAVDDISLDIQSGEFIAFIGTSGSGKTTALRMINRMIEATEGQIEIDGKDVRSMNPVELRRNIGYVIQQIGLMPHMTIKENIVLVPKLLKWTKEEKDKRAKELIKLVDLPESFLERYPAELSGGQQQRIGVVRALAAEQDIILMDEPFGALDPITRDTLQDLVKTLQRKLGKTFIFVTHDMDEAIKLADKICIMSEGKVVQFDTPDNILRHPANDFVRDFIGQNRLIQDRPNDKTVEGVMIKPITIQADATLNDAVHIMRQKRVDTIFVVDSNNHLLGFLDIEDINQGIRGHKSLRDTMQQHIYTVQIDSKLQDSVRTILKRNVRNVPVVDDKQRLVGLITRANVVDIVYDTIWGDSEDAVQTEHVGEDTVSSKMHEQHTTNVKVRDIGDDKS

SEQ ID NO: 43947 - protein, 408 aa, Staphylococcus aureus
MKNQLIDRLTRYTTIDTQSDPKSTTTPSTEKQWDLLHLLEKELQQLGLPTDLDENGYLFATLESNIDADVPTVGFLAHVDTSPDFNASNVKPQIIENYDGKPYKLGNTKRVLDPKVFPELNSLVGHTLMVTDGTSLLGADDKAGIVEIMEAICYLQEHPEIKHGTIRIGFTPDEEIGRGPHKFDVDRFNADFAYTMDGSQYGELQYESFNAAEAVITCHGVNVHPGSAKNAMVNAIRLGEQFDSLLPDSEVPERTEGYEGFYHLMNFEGTVEKATLQYIIRDHDKKQFELRKKRILEIRDDINAHFENYPVKVDISDQYFNMAEKILPLPHIIDIPKRVFAKLDIPANTEPIRGGTDGSQLSFMGLPTPNIFTGCGNFHGPYEYASIDVMEKAVQVIIGIVEDIAENH

SEQ ID NO: 43948 - protein, 308 aa, Staphylococcus aureus
MSKTAIIFPGQGAQKVGMAQDLFNNNDQATEILTSAAKTLDFDILETMFTDEEGKLGETENTQPALLTHSSALLAALKNLNPDFTMGHSLGEYSSLVAADVLSFEDAVKIVRKRGQLMAQAFPTGVGSMAAVLGLDFDKVDEICKSLSSDDKIIEPANINCPGQIVVSGHKALIDELVEKGKSLGAKRVMPLAVSGPFHSSLMKVIEEDFSSYINQFEWRDAKFPVVQNVNAQGETDKEVIKSNMVKQLYSPVQFINSTEWLIDQGVDHFIEIGPGKVLSGLIKKINRDVKLTSIQTLEDVKGWNEND

SEQ ID NO: 43949 - protein, 246 aa, Staphylococcus aureus
MKMTKSALVTGASRGIGRSIALQLAEEGYNVAVNYAGSKEKAEAVVEEIKAKGVDSFAIQANVADADEVKAMIKEVVSQFGSLDVLVNNAGITRDNLLMRMKEQEWDDVIDTNLKGVFNCIQKATPQMLRQRSGAIINLSSVVGAVGNPGQANYVATKAGVIGLTKSAARELASRGITVNAVAPGFIVSDMTDALSDELKEQMLTQIPLARFGQDTDIANTVAFLASDKAKYITGQTIHVNGGMYM

SEQ ID NO: 43950 - protein, 239 aa, Staphylococcus aureus
MTVEWLAEQLKEHNIELTETQKQQFQTYYRLLVEWNEKMNLTSITDEHDVYLKHFYDSIAPSFYFDFNQPISICDVGAGAGFPSIPLKIMFPQLKVTIVDSLNKRIQFLNHLASELQLQDVSFIHDRAETFGKGVYRESYDVVTARAVARLSVLSELCLPLIKKGGQFVALKSSKGEEELEEAKFAISVLGGNVTETHTFKLPEDAGERQMFIIDKKRQTPKKYPRKPGTPNKTPLLEK

SEQ ID NO: 43951 - protein, 498 aa, Staphylococcus aureus
MEKYILSIDQGTTSSRAILFNQKGEIAGVAQREFKQYFPQSGWVEHDANEIWTSVLAVMTEVINENDVRADQIAGIGITNQRETTVVWDKHTGRPIYHAIVWQSRQTQSICSELKQQGYEQTFRDKTGLLLDPYFAGTKVKWILDNVEGAREKAENGDLLFGTIDTWLVWKLSGKAAHITDYSNASRTLMFNIHDLEWDDELLELLTVPKNMLPEVKPSSEIYGKTIDYHFYGQEVPIAGVAGDQQAALFGQACFECGDVKNTYGTGGFMLMNTGDKAVKSESGLLTTIAYGIDGKVNYALEGSIFVSGSAIQWLRDGLRMINSAPQSESYATRVDSTEGVYVVPAFVGLGTPYWDSEARGAIFGLTRGTEKEHFIRATLESLCYQTRDVMEAMSKDSGIDVQSLRVDGGAVKNNFIMQFQADIVNTSVERPEIQETTALGAAFLAGLAVGFWESKDDIAKNWKLEEKFDPKMDEGEREKLYRGWKKAVEATQVFKTE

SEQ ID NO: 43952 - protein, 241 aa, Staphylococcus aureus
MADNKANKEQVHRVFQNISKKYDRLNNIISFEQHKVWRKRVMKDMGVRKGTKALDVCCGTGDWTIALSKAVGPTGEVTGIDFSENMLEVGKEKTASMENVKLVHGDAMELPFEDNSFDYVTIGFGLRNVPDYLVALKEMNRVLKPGGMVVCLETSQPTLPVFKQMYALYFKFVMPIFGKLFAKSKEEYEWLQQSTFNFPGKEELKRMFEEAGFINVRVRSFTGGVAAMHLGYKEKDNTKGD

SEQ ID NO: 43953 - protein, 319 aa, Staphylococcus aureus
MAKLNMNNEIKKVEQRLEKAIKSKDSVLEQASLHLLSSGGKRVRPAFVILSSQFGKDEQTSEQTYQVAVALELIHMATLVHDDVIDKSDKRRGKLTISKKWDQTTAILTGNFLLALGLEHLMAVKDNRVHQLISESIVDVCRGELFQFQDQFNSQQTIINYLRRINRKTALLIQISTEVGAITSQSDKETVRKLKMIGHYIGMSFQIIDDVLDFTSTEKKLGKPVGSDLLNGHITLPILLEMRKNPDFKLKIEQLRRDSERKEFEECIQIIRKSDSIDEAKAVSSKYLSKALNLISELPDGHPKSLLLSLTKKMGSRNT

SEQ ID NO: 43954 - protein, 165 aa, Staphylococcus aureus
MKTMKKYIKTAFFCSMYWLIVQLNIANLGTRIPDKYFRQKYIIFKSFNFEKHGKFWNKWFYVRKWKHKILDGHQLNQNIYDQRHLMTINTDEIEKMIIETKRAELIHWISILPVIIFNKGSRLVKYINIFYAMIANVPIIIVQRYNRPRLTQLLRILKRRGERHD

SEQ ID NO: 43955 - protein, 497 aa, Staphylococcus aureus
MTKHIIVIGGGLGGISAAIRMAQSGYSVSLYEQNTHIGGKVNRHESDGFGFDLGPSILTMPYIFEKLFEYSKKQMSDYVTIKRLPHQWRSFFPDGTTIDLYEGIKETGQHNAILSKQDIEELQNYLNYTRRIDRITEKGYFNYGLDTLSQIIKFHGPLNALINYDYVHTMQQAIDKRISNPYLRQMLGYFIKYVGSSSYDAPAVLSMLFHMQQEQGLWYVEGGIHHLANALEKLAREEGVTIHTGARVDNIKTYQRRVTGVRLDTGEFVKADYIISNMEVIPTYKYLIHLDTQRLNKLEREFEPASSGYVMHLGVACQYPQLAHHNFFFTENAYLNYQQVFHEKVLPDDPTIYLVNTNKTDHTQAPVGYENIKVLPHIPYIQDQPFTTEDYAKFRDKILDKLEKMGLTDLRKHIIYEDVWTPEDIEKNYRSNRGAIYGVVADKKKNKGFKFPKESQYFENLYFVGGSVNPGGGMPMVTLSGQQVADKINAREAKNRK

SEQ ID NO: 43956 - protein, 448 aa, Staphylococcus aureus
MQAILNFIVDILSQPAILVALIAFIGLIVQKKPAATITSGTIKTILGFLILSAGADVVVRSLEPFGKIFQHAFGVQGIVPNNEAIVSLALKDFGTTAALIMVCGMIVNILIARFTNLKYIFLTGHHTFYMAAFLAIILTVSHIKGWLTIVIGALVLGLIMAVLPALLQPTMRKITGNDQVALGHFGSISYFAAGAVGQLFKGKSKSTEEIKFPKGLSFLRESTISISITMALLYFIACLFAGVSYVHESISDGQNFIVFSLIQGVTFAAGVFIILTGVRLILAEIVPAFKGISEKLVPNSKPALDCPIVFPYAQNAVLIGFFVSFITGVIGMFILFLFGGVVILPGVVAHFFLGATAAVFGNARGGIKGAVAGAALNGILITFLPLLFLPFLGELGGAATTFSDTDFLTVGIVFGNAVKYMGLFGAILFIIIVGATAILLKGRQKPQQ

SEQ ID NO: 43957 - protein, 226 aa, Staphylococcus aureus
MKFKAIAKASLALGMLATGVITSNVQSVQAKTEVKQQSESELKHYYNKPVLERKNVTGYKYTEKGKDYIDVIVDNQYSQISLVGSDKDKFKDGDNSNIDVFILREGDSRQATNYSIGGVTKTNSQPFIDYIHTPILEIKKGKEEPQSSLYQIYKEDISLKELDYRLRERAIKQHGLYSNGLKQGQITITMKDGKSHTIDLSQKLEKERMGDSIDGRQIQKILVEMK

SEQ ID NO: 43958 - protein, 316 aa, Staphylococcus aureus
MKKLTAAAIATMGFATFTMAHQADAAETTNTQQAHTLMSTQSQDVSYGTYYTIDSNGDYHHTPDGNWNQAMFDNKEYSYTFVDAQGHTHYFYNCYPKNANANGSGQTYVNPATAGDNNDYTASQSQQHINQYGYQSNVGPDASYYSHSNNNQAYNSHDGNGKVNYPNGTSNQNGGSASKATASGHAKDASWLTSRKQLQPYGQYHGGGAHYGVDYAMPENSPVYSLTDGTVVQAGWSNYGGGNQVTIKEANSNNYQWYMHNNRLTVSAGDKVKAGDQIAYSGSTGNSTAPHVHFQRMSGGIGNQYAVDPTSYLQSR

SEQ ID NO: 43959 - protein, 294 aa, Staphylococcus aureus
MKIIQLEYFLAIVKYNSFTKAAQFLHISQPSLTATIKKMEADLGYDLFTRSTKDIKITEKGIQFYRYASELVQQYRSTMEKMYDLSVTSEPRIKIGTLESTNQWIANLIRKHHSDYPEQQYRLYEIHDKHQSIEQSLNFNIHLAITNEKITHEDIRSIPLYEESYILLAPKETFKNQNWVDVENLPLILPNKNSQVRKHLDDYFNRRNIRPNVVVETDRFESAVGFVHLGLGYAIIPRFYYQSFHTSNLEYKKIRPNLGRKIYINYHKKRKHSEQVHTFVQQCQDYLYGLLEAL

SEQ ID NO: 43960 - protein, 139 aa, Staphylococcus aureus
MLKSINHICFSVRNLNDSIHFYRDILLGKLLLTGKKTAYFELAGLWIALNEEKDIPRNEIHFSYTHIAFTIDDSEFKYWHQRLKDNNVNILEGRVRDIRDRQSIYFTDPDGHKLELHTGTLENRLNYYKEAKPHMTFYK

SEQ ID NO: 43961 - protein, 997 aa, Staphylococcus aureus
MNTIYEPSSICMIRTPLLSVEFFNLFLNTEQIKYSDLQLNAQMKESILTTTFNLYCTLQEINFDGDNKKVRDAKESLLKYLIRMSTRPTPFGLLSGINLGHFVNEPTRLKVGNSIQKYVKVDGEWLYKLVSYIESIDEYYQNLKVIWNSKAHIINDRIYLNEQSAIYLNNNKDTSFSIKNSELLVFIKTTVTNNNITFSNLAEKINQEFEINDITKVKVYIHNLVSKEIIYSTIRPPLSYSDNLNYILNKLSLHNDDFVKKIREIQKLILAYEKTEIGFGEELYKDIIHHMKALFKCKNYLQIDTKIDMINNYLHQDIATNISEAAYLLWLLSRNNIGFTDLKVLHNRFIEKYGFEQLVNIKDLISDITGFGTTIFQEEETDGNNIVMLKQKFLHALRNNDEIVINEKDVESLINDNEINHYHAPMSADVYAELYLGRFYNQYNELIVISPLTASFNAGATFGRFHHLIDTETLAKLEHEKGHYYQKMICDDNVEMISINNIPKYPRNHNVLTNHDSYEYSLNLGSSNSYSKYELTLDDIYVGATFNKLYLYSSQLNKRVLFESNNMYNFLKECNLYRLLREISMESVKCIEPMNDVSIDSFSYSPRIRYKNVILKPAYWKINEMVLPLPKNEEWDQQFLKYQEQFNIPNIVNLVYGDNKLLLNLSLANHRYLLMKEYKKHKRVRLVESFLPQSKNDHVYEIVTPIYKKSSYRGPEIEIPKYKNTDIEYDKDWFALHIHIDKPSQDTFIIDNLYPFVKHLKDKGDIDQYFLMRYIKQGDILKLRLFRNDENYAEIYSILKNWLPHVRQTTEVSDYEFVSYEPEFFRYGGKNTINEIEAFFEYDTNLAVNIIENDFKFDRPYIVAISIMYLFEMFSISNEERMEIVNNYVPTSFKSKDIRPFKNELVTICNPANNFEYMAKHYSGIYRILKDGNQILSKLNEGLKKTLTTKRSRIIGSLIHMRCNRIFGIDKDQETFVLSIVKEIVKTQKHWCGDKND

SEQ ID NO: 43962 - protein, 571 aa, Staphylococcus aureus
MVKHYLTKFVAMLITAAMVCSFGLLKSQAAEQQSISDVYSVITDAKSALSNNSISNDNKQKAIEQVVSAVKKLSLEDNSEGNAVKSDVRKLEDAKANDNQKDTLSQLTKSLIAYEEKLASKDAGSKIKLLQQQVDAKDAAMTKAIKDKNKAELESLNNSLNQIWTSNETVIRNYDANQYGQIEVALLQLRIAIHKSPLDTAKVSHAWTTFKSNIDHVDKKSDTSANDQYHVSQLNDALEKAIKAIDDNQLSDADAALTHFIEIWPYVEGQIQTKDGALYTKIEDKIPYYQSVLDEHNKSHVKDGLVDINNQIKEVVGHSYSFVDVMIIFLREGLEVLLIVMTLTTMTRKVKDNKGTASVIGGAIAGLVLSIILAITFVETLGNSGILRESMEAGLGIVAVILMFIVGVWMHKRSNAKRWNDMIKNMYANAISNGNLVLLATIGLISVLREGVEVIIFYMGMIGELATKDFIIGIALAIVILIVFAVLFRFIVRLIPIFYIFRVLSIFIFIMGFKMLGVSIQKLQLLGAMPRHVIEGFPTINWLGFYPSYEPLIAQAAYIMVVAILIFKFKK

SEQ ID NO: 43963 - protein, 356 aa, Staphylococcus aureus
MNMKTIAKTSLALGLLTTGAITVTTQSVKAEKIQSTKVDKVPTLKAERLAMINITAGANSATTQAANTRQERTPKLEKAPNTNEEKTSASKIEKISQPKQEEQKSLNISATPAPKQEQSQTTTESTTPKTKVTTPPSTNTPQPMQSTKSDTPQSPTIKQAQTDMTPKYEDLRAYYTKPSFEFEKQFGFLLKPWTTVRFMNVIPNRFIYKIALVGKDEKKYKDGPYDNIDVFIVLEDNKYQLKKYSVGGITKTNSKKVDHKAELSVTKKDNQGMISRDVSEYMITKEEISLKELDFKLRKQLIEKHNLYGNMGSGTIVIKMKNGGKYTFELHKKLQEHRMADVIEGTNIDKIEVNIK

SEQ ID NO: 43964 - protein, 473 aa, Staphylococcus aureus
MSEKQYDLVVLGGGTAGYVAAIRASQLGKKVAIVERQLLGGTCLHKGCIPTKSLLKSAEVFQTVKQAAMFGVDVKDANVNFENMLARKEDIINQMYQGVKHLMQHNHIDIYNGTGRILGTSIFSPQSGTISVEYEDGESDLLPNQFVLIATGSSPAELPFLSFDHDKILSSDDILSLKTLPSSIGIIGGGVIGMEFASLMIDLGVDVTVIEAGERILPTESKQASQLLKKSLSARGVKFYEGIKLSENDINVNEDGVTFEISSDIIKVDKVLLSIGRKPNTSDIGLNNTKIKLSTSGHILTNEFQQTEDKHIYAAGDCIGKLQLAHVGSKEGVVAVDHMFEGNPIPVNYNMMPKCIYSQPEIASIGLNIEQAKAEGMKVKSFKVPFKAIGKAVIDSHDANEGYSEMVIDQSTEEIVGINMIGPHVTELINEASLLQFMNGSALELGLTTHAHPSISEVLMELGLKAESRAIHV

SEQ ID NO: 43965 - protein, 330 aa, Staphylococcus aureus
MIDYKSLGLSEEDLKVIYKWMDLGRKIDERLWLLNRAGKIPFVVSGQGQEATQIGMAYALEEGDITAPYYRDLAFVTYMGISAYDTFLSAFGKKDDVNSGGKQMPSHFSSRAKNILSQSSPVATQIPHAVGAALALKMDGKKKIATATVGEGSSNQGDFHEGLNFAGVHKLPFVCVIINNKYAISVPDSLQYAAEKLSDRALGYGIHGEQVDGNDPLAMYKAMKEARDRAISGQGSTLIEAVTSRMTAHSSDDDDQYRTKEEREALKKADCNEKFKKELLSAGIIDDAWLAEIEAEHKDIINKATKAAEDAPYPSVEEAYAFVYEEGSLN

SEQ ID NO: 43966 - protein, 145 aa, Staphylococcus aureus
MRQTFMANESNIERKWYVIDAEGQTLGRLSSEVASILRGKNKVTYTPHVDTGDYVIVINASKIEFTGNKETDKVYYRHSNHPGGIKSITAGELRRTNPERLIENSIKGMLPSTRLGEKQGKKLFVYGGAEHPHAAQQPENYELRG

SEQ ID NO: 43967 - protein, 130 aa, Staphylococcus aureus
MAQVEYRGTGRRKNSVARVRLVPGEGNITVNNRDVREYLPFESLILDLNQPFDVTETKGNYDVLVNVHGGGFTGQAQAIRHGIARALLEADPEYRGSLKRAGLLTRDPRMKERKKPGLKAARRSPQFSKR

SEQ ID NO: 43968 - protein, 309 aa, Staphylococcus aureus
MIKNKILTATLAVGLIAPLANPFIEISKAENKIEDIGQGAEIIKRTQDITSKRLAITQNIQFDFVKDKKYNKDALVVKMQGFISSRTTYSDLKKYPYIKRMIWPFQYNISLKTKDSNVDLINYLPKNKIDSADVSQKLGYNIGGNFQSAPSIGGSGSFNYSKTISYNQKNYVTEVESQNSKGVKWGVKANSFVTPNGQVSAYDQYLFAQDPTGPAARDYFVPDNQLPPLIQSGFNPSFITTLSHERGKGDKSEFEITYGRNMDATYAYVTRHRLAVDRKHDAFKNRNVTVKYEVNWKTHEVKIKSITPK

SEQ ID NO: 43969 - protein, 494 aa, Staphylococcus aureus
MLSFQLLFSLFVIALIIALISGLLFLAPVMPMRYIKLHLYILVMPVLFAVIGFFGIHGQHVLGPFKIDRLSWLLAGFVMALGFIIQKFSMRYLLGDHHYRHYFPLFTAITSFASLAWMSEDLRLMALCWGMTLLCLTLLMNVNRFWKVPRESAKLSSMTFLCGWLAFVGAIVTIYIATGEWRVPQHIVHPTWSLLTNVLLVLAVMIPAAQFPFHRWLIESVTAPTPVSAIMHAGIVNAGGVILTRFAPIFDNGFALSLLLILSSISVLLGSGISLVQVDYKRQLVGSTMSQMGFMLVQCALGVYSAAIIHLILHGIFKATLFLQSGSIVKRFNIPKQASAKDAYGWIVMGRVLAIIVAFLFWMSSDRSAYEVLSALILAWSLLVSWNQMVAFSKGRMARLVGMILIAIVTFIYVITHNYFYDVLQNITTHATTPPTVSVIISVVILIFGSLLSIWVARHRYSKGFAVLYVWLVNLGEARSKAIESHPNYLKKYL

SEQ ID NO: 43970 - protein, 89 aa, Staphylococcus aureus
NINSVIENAKRVITPLSPISIFAARNPWEGLEADTFEDVAKWLRDVRDVDIFPNKALIESAVARGELDESVFNQLVTDMLLEHHYNIPQ

SEQ ID NO: 43971 - protein, 16 aa, Staphylococcus aureus
MSPVTTSRYQGGAHRG

SEQ ID NO: 43972 - protein, 323 aa, Staphylococcus aureus
MKRLSIIVIIGIFIITGCDWQRTSKEPSKNAQNQQVIKIGYLPITHSANLMMTKKLLSQYNHPKYKLELVKFNNWPDLMDALNSGRIDGASTLIELAMKSKQKGSNIKAVALGHHEGNVIMGQKGMHLNEFNNGDDYHFGIPHRYSTHYLLLEELRKQLKIKPGHFSYHEMSPAEMPAALSEHRITGYSVAEPFGALGEKLGKGKTLKHGDDVIPDAYCCVLVLRGELLDQHKDVAQAFVQDYKKSGFKMNDRKQSVDIMTHHFKQSRDVLTQSAAWTSYGDLTIKPSGYQEITTLVKQHHLFNPPAYDDFVEPSLYKEASRS

SEQ ID NO: 43973 - protein, 698 aa, Staphylococcus aureus
MNGDNQQILREIVLNPTIHGKELESIFGLSRRQLGYRIQKINLWLEQEGYPKLERTSQGNFIVSSEIMTLFKRDVSEQQMLNGNNVIFSIETRRYYLMLMLFSKENAMSLNHFSIDLQVSKNTVIHDINHVKEQLEDHGLSLKYSRKHGYEIVGDEFEVRRFFIKLIDQRLNHDITKSEVLKALNLTFEDIAYQKDKIKQVEQFLKSRFIDKSLSSLPYVLCVIRRRIQSGHVMNPLNINYQYLRDTKEYQATEIMTQHEPDLPEAEKLYLTLHLLSTSVQWTDLQESDNISNLTMAIAQMIHHFEQITFINIEDKEKLSQQLLLHLTPAFYRIKYNLTDRDELINPLQGNYQSLFHMVKQSCQSLTEYFGKSLPDNEIAYLTMLFGGSLRRQDENFDGKIKAIIVCTQGTSVSQMMLYELRNLFPEIIFLDAISLRTFENYTLDYDIVFSPMFVLTHKKLFITKVALSENEQRKLRKEVMKYINKESADIDKEINKLMALIERTTTVNDITELRDGLEDFIANYNSISTINGSIVTQNKTLDLADLIPARHVKRMHHVENIDEAIAKASDVLVANHFIDIKYIHEMQQVFDDSYMVIMQNIAIPHAYSEKHVHKTAMSMLILQEPIYMSDGTAIHIIVPIAAVDKVTHLRALLQLRDVAQDNDAIKRIIQSRKNSDVNEILKNYSNKEARENGWDSN

SEQ ID NO: 43974 - protein, 158 aa, Staphylococcus aureus
MVTGSKNICNTLLSFYINTYTIFDSAFIFIAILYACILTLIIGGNFMKERGHIEQLWREEKYHVLLHSQQSYQMIRNALKTDLSLHQVQQMIDDALLIEPSIGSVCNAFDHMWGYFKKCANEEERKQSKLLKADFINGKIDTQTLLDFLGSPPNVVGI

SEQ ID NO: 43975 - protein, 328 aa, Staphylococcus aureus
MADLLNVLKDKLSGKNVKIVLPEGEDERVLTAATQLQATDYVTPIVLGDETKVQSLAQKLDLDISNIELINPATSELKAELVQSFVERRKGKATEEQAQELLNNVNYFGTMLVYAGKADGLVSGAAHSTGDTVRPALQIIKTKPGVSRTSGIFFMIKGDEQYIFGDCAINPELDSQGLAEIAVESAKSALSFGMDPKVAMLSFSTKGSAKSDDVTKVQEAVKLAQQKAEEEKLEAIIDGEFQFDAAIVPGVAEKKAPGAKLQGDANVFVFPSLEAGNIGYKIAQRLGGYDAVGPVLQGLNSPVNDLSRGCSIEDVYNLSIITAAQALQ

SEQ ID NO: 43976 - protein, 1983 aa, Staphylococcus aureus
MNLLKKNKYSIRKYKVGIFSTLIGTVLLLSNPNGAQALTTDNNVQSDTNQATPVNSQDTNVANNRGLANSAQNTPNQSATTNQSTNQALVNHNNGSIANQATPTSVQSSTPSAQNNNHTDGNTTATETVSNANNKDVVSNNTTLNVPNKTNENGSGGHLTLKEIQEDVRHSSDKPELVAIAEQASNRPKKRSRRAAPADPNATPADPAAAAAGNGGAPVAITAPYTPTTDPNANNAGQNAPNEVLSFDDNGIRPSTNRSVPSVTVVDNLPGFTLINGGKVGVFSHAMVRTSMFDSGDAKNYQAQGNVIALGRIKGNDTNDHGDFNGIEKSLTVNPNSELIFEFNTMTTKNYQGVTNLIIKNADNDTVIAEKSVAYGPIWRLFKVPENVSHLKIQFVPKNDAITDARGIYQLRDGYKYYDFVDSIGLHSGSHVYVERRTMEPTATNNKEFTVTTSLKNNGNFGASFNTDDFVYKVQLPEGVEYVNNSLTKDFPSSNSGVDMNDFNVTYDAANRVITIKSTGGGSGNSPARLMPDKILDLKYKLRVNNVPTPRTVTFNDTLTYKTYTQDFINSPAESHTVSTNPYTIDIIMNKDALQAEVDRRIQQADYTFASLDIFNDLKRRAQTILDENRNNVPLNKRVSQADIDSLTNQMQHTLIRSVDAENAVNKKVDQMEDLVNQNDELTDEEKQAAIQVIEEHKNEIIGNIGDQTTDDGVTRIKDQGIQTLSGDTATPVVKPNAKKAIRDKATKQREIINATPDATEDEIQDALNQLATDETDAIDNVTNATTNADVEIAKNNGINTIGAVVPQVTHKQAARDAINQATATKRQQINSNREATQEEKNAALNELTQATNHALEQINQATTNADVDNAKGDGLNAINPIAPVTVVKQAARDAVSHDAQQHIAEINANPDATQEERQAAIDKVNAAVTAANTNILNANTNADVEQVKTNAIQGIQAITPATKVKTDAKNAIDKSAETQHNTIFNNNDATLEEQQAAQQLLDQAVATAKQNINAADTNQEVAQAKDQGTQNIVVIQPATQVKTDARNAVNDKAREAITNINATPGATREEKQEAINRVNTLKNRALTDIGVTSTTAMVNSIRDDAVNQIGAVQPHVTKKQTATGVLNDLATAKKQEINQNTNATTEEKQVALNQVDQELATAINNINQADTNAEVDQAQQLGTKAINAIQPNIVKKPAALAQINQHYNAKLAEINATPDATNDEKNAAINTLNQDRQQAIESIKQANTNAEVDQAATVAENNIDAVQVDVVKKQAARDKITAEVAKRIEAVKQTPNATDEEKQAAVNQINQLKDQAINQINQNQTNDQVDTTTNQAVNAIDNVEAEVVIKPKAIADIEKAVKEKQQQIDNSLDSTDNEKEVASQALAKEKEKALAAIDQAQTNSQVNQAATNGVSAIKIIQPETKVKPAAREKINQKANELRAKINQDKEATAEERQVALDKINEFVNQAMTDITNNRTNQQVDDTTSQALDSIALVAPEHIVRAAARDAVKQQYEAKKQEIEQAEHATDEEKQVALNQLANNEKLALQNINQAVTNNDVKRVETNGIATLKGVQPHIVIKPEAQQAIKATAENQVESIKDTPHATVDELDEANQLISDTLKQAQQEIENTNQDAAVTDVRNQTIKAIEQIKPKVRRKRAALDSIEENNKNQLDAIRNTLDTTQDERDVAIDTLNKIVNTIKNDIAQNKTNAEVDRTETDGNDNIKVILPKVQVKPAARQSVGVKAEAQNALIDQSDLSTEEERLAAKHLVEQALNQAIDQINHADKTAQVNQDSIDAQNIISKIKPATTVKATALQQIQNIATNKINLIKANNEATDEEQNIAIAQVEKELIKAKQQIASAVTNADVAYLLHDEKNEIREIEPVINRKASAREQLTTLFNDKKQAIEANIQATVEERNSILAQLQNIYDTAIGQIDQDRSNAQVDKTASLNLQTIHDLDVHPIKKPDAGKRLMMILHASLL

SEQ ID NO: 43977 - protein, 604 aa, Staphylococcus aureus
MNKTKGFTKYKKMRYMPGLDGLRAIAVLGIIIYHLNKQWLTGGFLGVDTFFVISGYLITSLLLKEYDDTGIIKLKSFWIRRLKRLLPAVIVLLMVVGTATLLLKSDNIIRVKHDIIAAIFYVSNWWYIAKDVNYFEQFSFMPLKHLWSLAIEEQFYIFFPVILVTLLLTIKKRYKIGFIFWGVSIISLGLMMFIYSINGDHSRVYFGTDTRLQTLLLGVILAFLWPPFKLKNDPPKVVKYVIDSIGSLSFIVLILLFFIINDETNWIYDGGFYLISILTLFIIASVVHPSTWIAKIFSNPVLVFIGKRSYSLYLWHFAVISFVHSYYVDGQIPVYVYFIDISLTIIFAELSYRFIETPFRKEGIKALNWRPSYIPQFIRMAIVVTLLIPFMLILVGAFNKYGKDIIGEKANSFDTTIEDNYLMRIAPIDNIHIDGLVSEKKKESSDVYNNIKPLLIGDSVMVDIGESFKSSVPKSRIDGKVGRQLYQTLPLVKANYSQYKKSSDQVVLELGTNGDFTVKQLDDLLNQFGKAKIYLVNTRVPRIYEANVNRLLADAAKRKSNVTLIDWNKRSQGHSEYFAPDGVHLEYKGVLALKDEILKALKKK

SEQ ID NO: 43978 - protein, 665 aa, Staphylococcus aureus
MAMNKQNNYSDDSIQVLEGLEAVRKRPGMYIGSTDKRGLHHLVYEIVDNSVDEVLNGYGNEIDVTINKDGSISIEDNGRGMPTGIHKSGKPTVEVIFTVLHAGGKFGQGGYKTSGGLHGVGASVVNALSEWLEVEIHRDGSIYHQSFKNGGSPSSGLVKKGKTKKTGTKVTFKPDDTIFKASTSFNFDVLSERLQESAFLLKNLKITLNDLRSGKERQEHYHYEEGIKEFVSYVNEGKEVLHDVATFSGEANGIEVDVAFQYNDQYSESILSFVNNVRTKDGGTHEVGFKTAMTRVFNDYARRINELKTKDKNLDGNDIREGLTAVVSVRIPEELLQFEGQTKSKLGTSEARSAVDSVVADKLPFYLEEKGQLSKSLVKKAIKAQQAREAARKAREDARSGKKNKRKDTLLSGKLTPAQSKNTEKNELYLVEGDSAGGSAKLGRDRKFQAILPLRGKVINTEKARLEDIFKNEEINTIIHTIGAGVGTDFKIEDSNYNRVIIMTDADTDGAHIQVLLLTFFFKYMKPLVQAGRVFIALPPLYKLEKGKGKTKRVEYAWTDEELNKLQKELGKGFTLQRYKGLGEMNPEQLWETTMNPETRTLIRVQVEDEVRSSKRVTTLMGDKVQPRREWIEKHVEFGMQEDQSILDNSEVQVLENDQFDEEEI

SEQ ID NO: 43979 - protein, 122 aa, Staphylococcus aureus
MANHEQIIEAIKEMSVLELNDLVKAIEEEFGVTAAAPVAVAGAAGGADAAAEKTEFDVELTSAGSSKIKVVKAVKEATGLGLKDAKELVDGAPKVIKEALPKEEAEKLKEQLEEVGATVELK

SEQ ID NO: 43980 - protein, 202 aa, Staphylococcus aureus
MSHYYDEDPSVISNEQRIQYQLNHHKIDLITDNGVFSKDKVDYGSDVLVQTFLKAHPPGPSKRIADVGCGYGPIGLMIAKVSPHHSITMLDVNHRALALVEKNKKLNGIDNVIVKESDALSAVEDKSFDFILTNPPIRAGKETVHRIFEQALHRLDSNGELFVVIQKKQGMPSAKKRMNELFGNVEVVNKDKGYYILRSIKA

SEQ ID NO: 43981 - protein, 173 aa, Staphylococcus aureus
MEYKSYYDSPVGRLELLSDGVSLTAVLFENQQGDGTREENTSLAIFREATQWLDAYFKGDNPEITIPLKPTGSHFQQCVWNELRQVPYGTLTTYGAIAKKVGKVLDKPKMSAQAVGGAVGSNPLSIIVPCHRVVGKTGSLTGFGGTINNKIKLLELENIDMSKLYIPKHSTKP

SEQ ID NO: 43982 - protein, 370 aa, Staphylococcus aureus
MAPKLQAQFDAVKVLNDTQSKFEMVQILDENGNVVNEDLVPDLTDEQLVELMERMVWTRILDQRSISLNRQGRLGFYAPTAGQEASQLASQYALEKEDYILPGYRDVPQIIWHGLPLTEAFLFSRGHFKGNQFPEGVNALSPQIIIGAQYIQAAGVAFALKKRGKNAVAITYTGDGGSSQGDFYEGINFAAAYKAPAIFVIQNNNYAISTPRSKQTAAETLAQKAIAVGIPGIQVDGMDALAVYQATKEARDRAVAGEGPTLIETMTYRYGPHTMAGDDPTRYRTSDEDAEWEKKDPLVRFRKFLENKGLWNEDKENEVIERAKADIKAAIKEADNTEKQTVTSLMEIMYEDMPQNLAEQYEIYKEKESK

SEQ ID NO: 43983 - protein, 299 aa, Staphylococcus aureus
MMENSTTEARNEATMHLDEMTVEEALITMNKEDQQVPLAVRKAIPQLTKVIKKTIAQYKKGGRLIYIGAGTSGRLGVLDAAECVPTFNTDPHEIIGIIAGGQHAMTMAVEGAEDHKKLAEEDLKNIDLTSKDVVIGIAASGKTPYVIGGLTFANTIGATTVSISCNEHAVISEIAQYPVEVKVGPEVLTGSTRLKSGTAQKLILNMISTITMVGVGKVYDNLMIDVKATNQKLIDRSVRIIQEICAITYDEAMALYQVSEHDVKVATVMGMCGISKEEATRRLLNNGDIVKRAIRDRQP

SEQ ID NO: 43984 - protein, 263 aa, Staphylococcus aureus
MSNKYKEQAQDILTAVGGVENIVDATYDTKCITIHMQHTIPSTANEVKQIVDVTSVAENDAQLVIKLNGNVDEVYQQLQRLIKNANVEESENTDNINSQDTSYTPQVKVTTPILVKAPIAGRRILLKEVRDSIFREKMVGEGLAIKAHEESKVIAPFNGLISMIVPTKHAVGIQSEDGVDIVIHIGVNTVDLEGKGFKCFVKQNDHVEAGQTLLQFDQQYIQQQGYNADVIVVISNSADLGKVELTMNEIITTEDVIFKIFKN

SEQ ID NO: 43985 - protein, 478 aa, Staphylococcus aureus
MTKLPQNFMWGGALAANQFEGGYEKGGKGLSVIDVMTSGAHGKARQITESIDLNHYYPNHEGIDFYHRYKEDIALFKEMGLKCLRTSIAWTRIFPNGDEDVPNEEGLAFYDRIFDELIAQGIEPVVTLSHFEMPLHLAKHYGGFRNREVVDYFVHFARVVFERYKDKVTYWMTFNEINNQMDTSNPIFLWTNSGVALTENDNPEEVLYQVAHHELLASALAVRLGKEINPKFKIGTMISHVPIYPYSCHPKDMMEAQIANRLRFFFPDVQVRGYYPSYAKKMLARKGYDVGWQEGDDSILQQGTVDYIGFSYYMSTAVKHDVDTTVENNIVNGGLNHSVENPHIATSDWGWAIDPDGLRYTLNVLYDRYQLPLFIVENGFGAVDEVVDGHIHDDYRIEYLKAHITAAIEAVDQDGVDLIGYTPWGIIDIVSFTTGEMKKRYGLIYVDRDNDGHGTMERLKKDSFYWYQQVIASNGDKL

SEQ ID NO: 43986 - protein, 456 aa, Staphylococcus aureus
MGQTLFDKVWNRHVLYGKLGEPQLLYIDLHLIHEVTSPQAFEGLRLQNRKLRRPDLTFATLDHNVPTIDIFNIKDEIANKQITTLQKNAIDFGVHIFDMGSDEQGIVHMVGPETGLTQPGKTIVCGDSHTATHGAFGAIAFGIGTSEVEHVFATQTLWQTKPKNLKIDINGTLPTGVYAKDIILHLIKTYGVDFGTGYALEFTGETIKNLSMDGRMTICNMAIEGGAKYGIIQPDDITFEYVKGRPFADNFAKSVDKWRELYSDDDAIFDRVIELDVSTLEPQVTWGTNPEMGVNFSEPFPEINDINDQRAYDYMGLEPGQKAEDIDLGYVFLGSCTNARLSDLIEASHIVKGNKVHPNITAIVVPGSRTVKKEAEKLGLDTIFKNAGFEWREPGCSMCLGMNPDQVPEGVHCASTSNRNFEGRQGKGARTHLVSPAMAAAAAIHGKFVDVRKVVV

SEQ ID NO: 43987 - protein, 625 aa, Staphylococcus aureus
MEAYKIEHLNKSYADKTIFDNLDLSISEGEKIGLVGINGTGKSTLLKVIGGIDDDFTANVMHPNQYRIRYSSQKQDLNEDMTVFDAVLSSDTTTLRIIKQYEQAVQAYADDQSDKLFKRMIDAQDAMDQHDAWDYNAEIKTILSKLGIHDTTKYIKELSGGQQKRVVLAKTLIEQPDLLLLDEPTNHLDFESISWLINYVKQYPHTVLFVTHDRYFLNEVSTRIIELNRGKLASYPGNYESYIEMRAEREVTLQKQQQKQRALYKEELAWMRAGAKARTTKQQARINRFNDLENEVNQQYKDDKGELNLAYSRLGKQVFELEDLSKAINDKVLFEHLTEIIQKGERIGVVGPNGAGKTTLLNILSGEDQQFEGKLKTGQTVKVAYFKQTDETLDRDIRMIDYLREESEVAKEKDGTSVSITQLLERFLFPSATHGKKVYKLSGGEQKRLYLLRLLVHQPNVLLLDEPTNDLDTETLTILEDYIHTFGGTVITVSHDRYFLNKVAQSYWFIHDGQMEKIIGTFEDYESYKKSLDKNKSTLKQQSKSYTTVRKKNGLSYKEKLEYEQLMKRIEQAEVRMEEIDVLMIEASADYGKIKELNEEKEQLEIQYDLDITRWSELEEIKEQQ

SEQ ID NO: 43988 - protein, 711 aa, Staphylococcus aureus
MKSLILAEKPSVARDIADALQINQKRNGYFENNQYIVTWALGHLVTNATPEQYDKNLKEWRLEDLPIIPKYMKTVVIGKTSKQFKTVKALILDNKVKDIIIATDAGREGELVARLILDKVGNKKPIRRLWISSVTKKAIQQGFKNLKDGRQYNDLYYAALARSEADWIVGINATRALTTKYDAQLSLGRVQTPTIQLVNTRQQEINQFKPQQYFTLSLTVKGFDFQLESNQRYTNKETLEQMVNNLKNVDGKIKSVATKHKKSYPQSLYNLTDLQQDMYRRYKIGPKETLNTLQSLYERHKVVTYPRTDSNYLTTDMVDTMKERIQATMATTYKDQARPLMSKTFSSKMSIFNNQKVSDHHAIIPTEVRPVMSDLSNRELKLYDMIVERFLEALMPPHEYDAITVTLEVAGHTFVLKENVTTVLGFKSIRQGESITEMQQPFSEGDEVKISKTNIREHETTPPEYFNEGSLLKAMENPQNFIQLKDKKYAQTLKQTGGIGTVATRADIIDKLFNMNAIESRDGKIKVTSKGKQILELAPEELTSPLLTAQWEEKLLLIERGKYQAKTFINEMKDFTKDVVNGIKNSDRKYKHDNLTTTECPTCGKFMIKVKTKNGQMLVCQDPSCKTKKNVQRKTNARCPNCKKKLTLFGKGKEAVYRCVCGHSETQAHMDQRMKSKSSGKVSRKEMKKYMNKNEGLDNNPFKDALKNLNL

SEQ ID NO: 43989 - protein, 494 aa, Staphylococcus aureus
MDASTLFKKVKVKRVLGSLEQQIDDITTDSRTAREGSIFVASVGYTVDSHKFCQNVADQGCKLVVVNKEQSLPANVTQVVVPDTLRVASILAHTLYDYPSHQLVTFGVTGTNGKTSIATMIHLIQRKLQKNSAYLGTNGFQINETKTKGANTTPETVSLTKKIKEAVDAGAESMTLEVSSHGLVLGRLRGVEFDVAIFSNLTQDHLDFHGTMEAYGHAKSLLFSQLGEDLSKEKYVVLNNDDSFSEYLRTVTPYEVFSYGIDEEAQFMAKNIQESLQGVSFDFVTPFGTYPVKSPYVGKFNISNIMAAMIAVWSKGTSLETIIKAVENLEPVEGRLEVLDPSLPIDLIIDYAHTADGMNKLIDAVQPFVKQKLIFLVGMAGERDLTKTPEMGRVACRADYVIFTPDNPANDDPKMLTAELAKGATHQNYIEFDDRAEGIKHAIDIAEPGDTVVLASKGREPYQIMPGHIKVPHRDDLIGLEAAYKKFGGGPVDQ

SEQ ID NO: 43990 - protein, 57 aa, Staphylococcus aureus
MTSNHHAPYDLGYTRATMDNTKGSETVRSSKSHKVVLSSDCSLQLDYMKLESLVIVD

SEQ ID NO: 43991 - protein, 43 aa, Staphylococcus aureus
MYSVLNVYLTFKYFLVKVILLMRALDNLFFLKKAVVRQCIEKN

SEQ ID NO: 43992 - protein, 215 aa, Staphylococcus aureus
MNIILMGLPGAGKGTQASEIVKKFPIPHISTGDMFRKAIKEETELGKEAKSYMDRGELVPDEVTVGIVKERISEDDAKKGFLLDGFPRTIEQAEALNNIMSELDRNIDAVINIEVPEEELMNRLTGRRICESCGTTYHLVFNPPKVEGICDIDGGKLYQREDDNPETVANRLSVNIKQSKPILDFYDQKGVLKNIDGSKDISDVTKDVIDILDHL

SEQ ID NO: 43993 - protein, 513 aa, Staphylococcus aureus
MEMAKEQELILVLDFGSQYNQLITRRIREMGVYSELHDHEISIEEIKKMNPKGIILSGGPNSVYEEGSFTIDPEIYNLGIPVLGICYGMQLTTKLLGGKVERANEREYGKAIINAKSDELFAGLPAEQTVWMSHSDKVIEIPEGFEVIADSPSTDYAAIEDKKRRIYGVQFHPEVRHTEYGNDLLNNFVRRVCDCKGQWTMENFIEIEIEKIRQRVGDRRVLCAMSGGVDSSVVAVLLHKAIGDQLTCIFVDHGLLRKGEGDMVMEQFGEGFNMNIIRVNAKDRFMNKLKGVSDPEQKRKIIGNEFVYVFDDEASKLKGVDFLAQGTLYTDVIESGTKTAQTIKSHHNVGGLPEDMEFELIEPINTLFKDEVRKLGIELGIPEHLVWRQPFPGPGLGIRVLGEITEDKLEIVRESDAILRQVIREEGLEREIWQYFTVLPNIQSVGVMGDYRTYDHTVGIRAVTSIDGMTSDFARIDWEVLQKISSRIVNEVDHVNRVVYDITSKPPSTIEWE

SEQ ID NO: 43994 - protein, 427 aa, Staphylococcus aureus
MSSIVVVGTQWGDEGKGKITDFLAEQSDVIARFSGGNNAGHTIQFGGETYKLHLVPSGIFYKDKLAVIGNGVVVDPVALLKELDGLNERGIPTSNLRISNRAQVILPYHLAQDEYEERLRGDNKIGTTKKGIGPAYVDKVQRIGIRMADLLEKETFERLLKSNIEYKQAYFKGMFNETCPSFDDIFEEYYAAGQRLKEFVTDTSKILDDAFVADEKVLFEGAQGVMLDIDHGTYPFVTSSNPIAGNVTVGTGVGPTFVSKVIGVCKAYTSRVGDGPFPTELFDEDGHHIREVGREYGTTTGRPRRVGWFDSVVLRHSRRVSGITDLSINSIDVLTGLDTVKICTAYELDGKEITEYPANLDQLKRCKPIFEELPGWTEDVTSVRTLEELPENARKYLERISELCNVQISIFSVGPDREQTNLLKELW

SEQ ID NO: 43995 - protein, 191 aa, Staphylococcus aureus
MKKELLEWIISIAVAFVILFIVGKFIVTPYTIKGESMDPTLKDGERVAVNIIGYKTGGLEKGNVVVFHANKNDDYVKRVIGVPGDKVEYKNDTLYVNGKKQDEPYLNYNLKHKQGDYITGTFQVKDLPNANPKSNVIPKGKYLVLGDNREVSKDSRAFGLIDEDQIVGKVSFRFWPFSEFKHNFNPENTKN

SEQ ID NO: 43996 - protein, 337 aa, Staphylococcus aureus
MKDLLQAQQKLIPDLIDKMYKRFSILTTISKNQPVGRRSLSEHMDMTERVLRSETDMLKKQDLIKVKPTGMEITAEGEQLISQLKGYFDIYADDNRLSEGIKNKFQIKEVHVVPGDADNSQSVKTELGRQAGQLLEGILQEDAIVAVTGGSTMACVSEAIHLLPYNVFFVPARGGLGENVVFQANTIAASMAQQAGGYYTTMYVPDNVSETTYNTLLLEPSVINTLDKIKQANVILHGIGDALKMAHRRQSPEKVIEQLQHHQAVGEAFGYYFDTQGQIVHKVKTIGLQLEDLESKDFIFAVAGGKSKGEAIKAYLTIAPKNTVLITDEAAAKIILE

SEQ ID NO: 43997 - protein, 336 aa, Staphylococcus aureus
MAVKVAINGFGRIGRLAFRRIQEVEGLEVVAVNDLTDDDMLAHLLKYDTMQGRFTGEVEVVDGGFRVNGKEVKSFSEPDASKLPWKDLNIDVVLECTGFYTDKDKAQAHIEAGAKKVLISAPATGDLKTIVFNTNHQELDGSETVVSGASCTTNSLAPVAKVLNDDFGLVEGLMTTIHAYTGDQNTQDAPHRKGDKRRARAAAENIIPNSTGAAKAIGKVIPEIDGKLDGGAQRVPVATGSLTELTVVLEKQDVTVEQVNEAMKNASNESFGYTEDEIVSSDVVGMTYGSLFDATQTRVMSVGDRQLVKVAAWYDNEMSYTAQLVRTLAYLAELSK

SEQ ID NO: 43998 - protein, 1188 aa, Staphylococcus aureus
MVYLKSIDAIGFKSFADQTNVQFDKGVTAIVGPNGSGKSNITDAIKWVLGEQSAKSLRGSKMEDIIFSGAEHRKAQNYAEVQLRLDNHSKKLSVDENEVIVTRRLYRSGESEYYINNDRARLKDIADLFLDSGLGKEAYSIISQGRVDEILNAKPIDRRQIIEESAGVLKYKKRKAESLNKLDQTEDNLTRVEDILYDLEGRVEPLKEEAAIAKEYKTLSHQMKHSDIVVTVHDIDQYTNDNRQLDQRLNDLQGQQANKEADKQRLSQQIQQYKGKRHQLDNDVESLNYQLVKATEAFEKYTGQLNVLEERKKNQSETNARYEEEQENLMELLENISNEISEAQDTYKSLKSKQKELNAVIRELEEQLYVSDEAHDEKLEEIKNEYYTLMSEQSDVNNDIRFLKHTIEENEAKKSRLDSRLVEVFEQLKDIQGQIKTTKKEYQQTNKELSAVDKEIKNIEKDLTDTKKAQNEYEEKLYQAYRYTEKMKTRIDSLATQEEEYTYFFNGVKHILKAKNKELKGIHGAVAEIIDVPSKLTQAIETALGASLQHVIVDSEKDGRQAIQFLKERNLGRATFLPLNVIQSRVVATDIKSIAKEANGFISIASEAVKVAPEYQNIIGNLLGNTIIVDHLKHANELARAIKYRTRIVTLEGDIVNPGGSMTGGGARKSKSILSQKDELTTMRHQLEDYLRQTESFEQQFKELKIKSDQLSELYFEKSQKHNTLKEQVHHFEMELDRLTTQETQIKNDHEEFEFEKNDGYTSDKSRQTLSEKETHLESIKASLKRLEDEIERYTKLSKEGKESVTKTQQTLHQKQSDLAVVKERIKTQQQTIDRLNNQSQQTKHQLKDVKEKIAFFNSDEVMGEQAFQNIKDQINGQQETRTRLSDELDKLKQQRIELNEQIDAQEATLQVCHQDILAIENHYQDIKAEQSKLDVLIHHAIDHLNDEYQLTVERAKSEYTSDESIDALRKKVKLMKMSIDELGPVNLNAIEQFEELNERYTFLSEQRTDLRKAKETLEQIISEMDQEVTERFKETFHAIQGHFTAVFKQLFGGGDAELQLTEADYLTAGIDIVVQPPGKKLQHLSLLSGGERALTAIALLFAILKVRSAPFVILDEVEAALDEANVIRYAKYLNELSDETQFIVITHRKGTMEFADRLYGVTMQESGVTKLVSVNLNTIDDVLKEEQ

SEQ ID NO: 43999 - protein, 2391 aa, Staphylococcus aureus
MIMGNLRFQQEYFRIYKNNTESTTHRNAYWVKLAKNVEATKMMYALSTIVQQHASIRHFFDVTTDDNLTMILHEFLPFIEIKQVPSSSANYDLEAFFKQELSTYHFNDSPLFKVKLFQFADAAYILLDFHVSIFDDSQIDIFLDDLCNAYRGNTVINNTRQHAHINRNDDKDNQDASHIALDSNYFRLENNSDIHIDSYFPIKHPFEQALYQTYLIDDMTSIDMASLAVSVYLANHIMSQQHDVTLGIHVPSHLPNDLHGNIVPLTLTIDAKDVCQRFTTDFNKCVLQNMSQLQCAKSSLSLETIFHCYHHMMSCCNDVIEDVHQIHDAHTSLADIEIFPHQHGFKIIYNSAAYDLLSIETLSDLVRNIYLQITEENGNKRTTVDELNLMTERDIQLYDDINLSLPEIDDAQTVVTLFEQQVEATPNHVAVQFDGVFITYQTLNARANDLAHRLRNQYGVEPNDRVAVIAEKSIEMIIAMIGVLKAGGAYVPIDPNYPSDRQEYILKDATPKVVITYQALYENGKQNINHIDLNKIAWKNIDNLSKCNTLEDHAYVIYTSGTTGNPKGTLIPHRGIVRLVHRNHYVPLNEETTILLSGTIAFDAATFEIYGALLNGGKLIVAKKEQLLNPIAVEQLINENDVNTMWLTSSLFNQIASERIEVLVPLKYLLIGGEVLNAKWVDLLNQKPKHPQIINGYGPTENTTFTTTYNIPNKVPNRIPIGKPILGTHVYIMQGERRCGVGIPGELCTSGFGLAAGYLNQPELTADKFIKDSNINQLMYRSGDIVRLLPDGNIDYLYRKDKQVKIRGFRIELSEVEHALERIQGINKAVVIVQNHDQDQYIVAYYEAMHTLSHNKIKSQLRMTLPEYMIPVNFMHIEQIPITINGKLDKKALPIMDYVDTDAYVAPSTDTEHLLCQIFADILHVNQVGIHDNFFELGGHSLKATLVVNRIEASTGKRLQIGDLLQKPTVFELAQAIAKVQEQNYEVIPEAIVKDDYVLSSAQKRMYLLWKSNHKDTVYNVPFLWRLSSGLNVAQLQQAVQHLIARHEILRTQYIVVDDEVRQRIVADVVADFEEVNTHFTDEQEIMRQFVAPFNLEKPSQIRVRYIRSPLHAYLFIDTHHIINDGMSNIQLMNDLNALYQHKLLLPLKLQYKDYSEWMSHRDMTKHRQYWLSQFKDEVPILSLPTDYVRPNIKTTNGAMMSFTMNQQMRQLLQKYVEKHQITDFMFFMSVVMTLLSRYARKDDVVVGSVMSARMHKGTEQMLGMFANTLVYRGQPSPDKMWTQFLQEVKEMSLEAYEHQEYPFECLVNDLDQSHDASRNPLFDVMLVLQNNETNHAHFGHSKLTHIQPKSVTAKFDLSFIIEEDRDDYTINIEYNTDLYHSETVRHMGNQCMIMIDYILKHQDTLQICDIPNGTEELLNWVNTHVNDRMLNVPGNKSIISYFNEVVSRQGNHVALVMNDLTMTYETLRNYVDAIAHMLLSNGVGNGQRVALFTERSFEMIAAMLATVKVGASYIPIDIDFPNKRQGAILEDAKVTAVMSYGVEIETTLPVIQLENAKGFVESKENEQYDDLHGNQLENTAMLDNEMYAIYTSGTTGMPKGVAIRQRNLLNLVHAWSTELQLGDNEVFLQHANIVFDASVMEIYCCLLNGHTLVIPDREERVNPEQLQQLINKHRVTVASIPLQMCSIMEDFYIEKLITGGATSTASFVKYIEKHCGTYFNAYGPSESTVITSYWSHHCGDLIPETIPIGKPLSNIQVYIMSDGLLCGIGMPGELCIAGDSLAIGYINRPELMADKWQNNPFGKGKLYHSGDLARYTSDGQIEFLGRIDKQVKVNGYRIELDEIENVILAIRGISDCVVTVSHFDTHDILNAYYVGEQQVEQDLKQYLNDQLPKYMIPKTITHIDCMPLTTNDKVDTTRLPNPSPIQQSNKVYSEPSNEIEQTFVDVFGEVLKQNDVGVDDDFFELGGNSLEAMLVVSHLKRFGHHISMQTLYQYKTVRQIVNYMYQNQQSLVALPDNLSELQKIVMSRYNLGILEDSLSHRPLGNTLLTGATGFLGAYLIEALQGYSHRIYCFIRADNEEIAWYKLMTNLNDYFSEETVEMMLSNIEVIVGDFECMDDVVLPENMDTIIHAGARTDHFGDDDEFEKVNVQGTVDVIRLAQQHHARLIYVSTISVGTYFDIDTEDVTFSEADVYKGQLLTSPYTRSKFYSELKVLEAVNNGLDGRIVRVGNLTSPYNGRWHMRNIKTNRFSMVMNDLLQLDCIGVSMAEMPVDFSFVDTTARQIVALAQVNTPQIIYHVLSPNKMPVKSLLECVKRKEIELVSDESFNEILQKQDMYETIGLTSVDREQQLAMIDTTLTLKIMNHISEKWPTITNNWLYHWAQYIKTIFNK

SEQ ID NO: 44000 - protein, 429 aa, Staphylococcus aureus
MNFSESERLQQLSNEYILGGVNSPSRSYKAVGGGAPVVMKEGHGAYLYDVDGNKFIDYLQAYGPIIAGHAHPHITKAIQEQAAKGVLFGTPTELEIEFSKKLRDAIPSLEKIRFVNSGTEAVMTTIRVARAYTKRNKIIKFAGSYHGHSDLVLVAAGSGPSQLGSPDSAGVPESVAREVITVPFNDINAYKEAIEFWGDEIAAVLVEPIVGNFGMVMPQPGFLEEVNEISHNNGTLVIYDEVITAFRFHYGAAQDLLGVIPDLTAFGKIVGGGLPIGGYGGRQDIMEQVAPLGPAYQAGTMAGNPLSMKAGIALLEVLEQDGVYEKLDSLGQQLEEGLLKLIEKHNITATINRIYGSLTLYFTDEKVTHYDQVEHSDGEAFGKFFKLMLNQGINLAPSKFEAWFLTTEHTEEDIQQTLKAADYAFSQMK

SEQ ID NO: 44001 - protein, 119 aa, Staphylococcus aureus
MISKIDKNKVRLKRHARVRTNLSGTAEKPRLNVYRSNKHIYAQIIDDNKGVTLAQASSKDSDIATTATKVELATKVGEAIAKKAADKGIKEIVFDRGGYLYHGRVKALAEAARESGLEF

SEQ ID NO: 44002 - protein, 166 aa, Staphylococcus aureus
MARREEETKEFEERVVTINRVAKVVKGGRRFRFTALVVVGDKNGRVGFGTGKAQEVPEAIKKAVEAAKKDLVVVPRVEGTTPHTITGRYGSGSVFMKPAAPGTGVIAGGPVRAVLELAGITDILSKSLGSNTPINMVRATIDGLQNLKNAEDVAKLRGKTVEELYN

SEQ ID NO: 44003 - protein, 716 aa, Staphylococcus aureus
MDNQLINSIIEKYQFSKKQIEAVLTLLEEKNTVPFIARYRKEQTGGLDEVQIKQIDDEYQYMVNLQKRKEEVIKNIEQQGLLTEELKKDILKQNKLQRVEDLYRPFKQKKKTRATEAKRKGLEPLAIWMKARKHEVSIEEKAQQFINEEVQSVEDAIKGAQDIIAEQISDNPKYRTKILKDMYHQGVLTTSKKKNAEDEKGIFEMYYAYSEPIKRIANHRVLAVNRGEKEKVLSVKFEFDTTSVEDFIARQEINHNNVNRSYILEAIKDSLKRLIVPSIEREIHADLTEKAENHAIDVFSENLRNLLLQPPMKGKQILGVDPAFRTGCKLAVINPFGTFIAKGVIYPHPPVSKKEAAEKDFVQMVKAYDVQLIAIGNGTASRETEQFVADLIKKHQLPVQFIIVNEAGASVYSASEIARDEFPDFQVEERSAVSIGRRVQDPLSELVKIDPKSIGVGQYQHDVNQKALENALTFVVETAVNQVGVDVNTASSSLLQYVSGLSSQIAKNIIAYREENGAIKHNKELSKIKRLGAKTFEQSIGFLRIVDGSEPLDNTSIHPESYKVTYQLLDKLGFGGNDLGSDALKAKLNSLDMDELAIELQVGVPTLEDIIKSLKAPNRDPRDEFDTPILKSDVLSIEDLKEGMKLSGTVRNVVDFGAFVDIGVKQDGLVHVSKLSKKFVKNPMDIVSVGDIVDVWVYSIDKNKDKVSLTMIDPHE

SEQ ID NO: 44004 - protein, 102 aa, Staphylococcus aureus
MFAIIETGGKQIKVEEGQEIFVEKLDVNEGDTFTFDKVLFVGGDSVKVGAPTVEGATVTATVNKQGRGKKITVFTYKRRKNSKRKKGHRQPYTKLTIDKINA

SEQ ID NO: 44005 - protein, 87 aa, Staphylococcus aureus
MRLDKYLKVSRLIKRRTLAKEVSDQGRITINGNVAKAGSDVKVEDVLTIRFGQKLVTVKVTALNEHASKDNAKGMYEIIEERRLEEA

SEQ ID NO: 44006 - protein, 397 aa, Staphylococcus aureus
MAHTITIVGLGNYGIDDLPLGIYKFLKTQDKVYARTLDHPVIESLQDELTFQSFDHVYEAHDQFEDVYNDIVAQLVEAANEKDIVYAVPGHPRVAETTTVKLLALAKDNTDIDVKVLGGKSFIDDVFEAVNVDPNDGFTLLDATSLQEVILNVRTHTLITQVYSAMVAANLKITLMERYPDDYPVQIVTGARSDGADNVVTCPLYELDHDENAFNNLTSVFVPKIITSTYLYHDFDFATEVIDTLVDEDKGCPWDKVQTHETLKRYLLEETFELFEAIDNEDDWHMIEELGDILLQVLLHTSIGKKEGYIDIKEVITSLNAKMIRRHPHIFGDANAETIDDLKEIWSKAKDAEGKQPRVKFEKVFAEHFLNLYEKTKDKSFDEASLKQWLEKGESNT

SEQ ID NO: 44007 - protein, 470 aa, Staphylococcus aureus
MEEHYYVSIDIGSSSVKTIVGEKFHNGINVIGTGQTYTSGIKNGLIDDFDIARQAIKDTIKKASIASGVDIKEVFLKLPIIGTEVYDESNEIDFYEDTEINGSHIEKVLEGIREKNDVQETEVINVFPIRFIVDKENEVSDPKELIARHSLKVEAGVIAIQKSILINMIKCVEACGVDVLDVYSDAYNYGSILTATEKELGACVIDIGEDVTQVAFYERGELVDADSIEMAGRDITDDIAQGLNTSYETAEKVKHQYGHAFYDSASDQDIFTVEQVDSDETVQYTQKDLSDFIEARVEEIFFEVFDVLQDLGLTKVNGGFIVTGGSANLLGVKELLSDMVSEKVRIHTPSQMGIRKPEFSSAISTISSSIAFDELLDYVTINYHDNEETEEDVIDVKDKDNESKLGGFDWFKRKTNKKDTHENEVESTDEEIYQSEDNHQEHKQNHEHVQDKDKDKEESKFKKLMKSLFE

SEQ ID NO: 44008 - protein, 390 aa, Staphylococcus aureus
MLEFEQGFNHLATLKVIGVGGGGNNAVNRMIDHGMNNVEFIAINTDGQALNLSKAESKIQIGEKLTRGLGAGANPEIGKKAAEESREQIEDAIQGADMVFVTSGMGGGTGTGAAPVVAKIAKEMGALTVGVVTRPFSFEGRKRQTQAAAGVEAMKAAVDTLIVIPNDRLLDIVDKSTPMMEAFKEADNVLRQGVQGISDLIAVSGEVNLDFADVKTIMSNQGSALMGIGVSSGENRAVEAAKKAISSPLLETSIVGAQGVLMNITGGESLSLFEAQEAADIVQDAADEDVNMIFGTVINPELQDEIVVTVIATGFDDKPTSHGRKSGSTGFGTSVNTSSNATSKDESFTSNSSNAQATDSVSERTHTTKEDDIPSFIRNREERRSRRTRR

SEQ ID NO: 44009 - protein, 589 aa, Staphylococcus aureus
MSKTQHEVNQNIDPLKMAESLELEQLNEKTLNDMRSGSEVLVEALLKENVDYLFGYPGGAVLPLYDTFYDGKIKHILARHEQGAVHAAEGYARVSGKTGVVVVTSGPGATNVMTGITDAHCDSLPLVVFTGQVATPGIGKDAFQEADILSMTSPITKQNYQVKRVEDIPKIVHEAFHVANSGRKGPVVIDFPKDMGVLATNVDLCDEINIPGYEVVTEPENKDIDTFISLLKEAKKPVVLAGAGINQSKSNQLLTQFVNKHQIPTVTTLLGLGAVPYEDTLFLGMGGMHGSYASNMALTECDLLINLGSRFDDRLASKPDAFAPNAKIVHVDIDPSEINKVIHVDLGIIADCKRFLECLNDKNVETIEHSDWVKHCQNNKQKHPFKLGEEDQVFCKPQQTIEYIGKITNGEAIVTTDVGQHQMWAAQFYPFKNHGQWVTSGGLGTMGFGIPSSIGAKLANPDKTVVCFVGDGGFQMTNQEMALLPEYGLDVKIVLINNGTLGMVKQWQDKFFNQRFSHSVFNGQPDFMKMAEAYGVKGFLIDKPEQLEEQLDAAFAYQGPVLIEVRISPTEAVTPMVPSGKSNHEMEGL

SEQ ID NO: 44010 - protein, 84 aa, Staphylococcus aureus
MTRILKLQVADQVSTLNRITSAFVRLQYNIDTLHVTHSEQPGISNMEIQVDIQDDTSLHILIKKLKQQINVLTVECYDLVDNEA

SEQ ID NO: 44011 - protein, 89 aa, Staphylococcus aureus
MAISQERKNEIIKEYRVHETDTGSPEVQIAVLTAEINAVNEHLRTHKKDHHSRRGLLKMVGRRRHLLNYLRSKDIQRYRELIKSLGIRR

SEQ ID NO: 44012 - protein, 213 aa, Staphylococcus aureus
MFNQSYLNVYFICGTSDVPSHRTIHEVLEAALKAGITLFQFREKGESALKGNDKLVLAKELQHLCHQYDVPFIVNDDVSLAKEINADGIHVGQDDAKVKEIAQYFTDKIIGLSISDLDEYAKSDLTHVDYIGVGPIYPTPSKHDAHIPVGPEMIATFKEMNPQLPIVAIGGINTNNVAPIVEAGANGISVISAISKSENIEKTVNRFKDFFNN

SEQ ID NO: 44013 - protein, 263 aa, Staphylococcus aureus
MNYLNKIRIENPLTICYTNDVVKNFTANGLLSIGASPAMSEAPEEAEEFYKVAQALLINIGTLTAQNEQDIIAIAQTANEAGLPIVFDPVAVGASTYRKQFCKLLLKSAKVSVIKGNASEILALIDDTATMKGTDSDANLDAVAIAKKAYAIYKTAIVITGKEDVIVQDNKAIVLANGSPLLARVTGAGCLLGGVIAGFLFRETEPDIEALIEAVSVFNIAAEVAAENENCGGPGTFSPLLLDTLYHLNETTYQQRIRIQEVE

SEQ ID NO: 44014 - protein, 229 aa, Staphylococcus aureus
MEFSQKLYQAAKPIINDIYEDDFIQKMLSGDIGADALRHYLKADAAYLKEFTNLYALLIPKMNSMNDVKFLVEQIEFMVEGEVLAHDILAQIVGESYEEIIKTKVWPPSGDHYIKHMYFQAHSRENAIYTIAAMAPCPYIYAELAKRSQSDHKLNREKDTAKWFDFYSTEMDDIINVFEALMNKLAESMSDKELEQVKQVFLESCIHERRFFNMAMTLEQWEFGGKVND

SEQ ID NO: 44015 - protein, 105 aa, Staphylococcus aureus
MTLSGKISVKAETIAHVVKELESISQKYDEIAQNFGKIAQLNYYSSEKAAHSMENGYSSAATVISGLKGPLSTLGGGVMNSAQKFFEADEHWGTEFAKLYYNIEG

SEQ ID NO: 44016 - protein, 614 aa, Staphylococcus aureus
MTKDIEYLTADYDNEKSSIQSVIDAIEGQDFLDVDTTMDDAVSDVSSLDEDGAISLTSSVVGPQGSKLMGYYQNELYDYASQLDSKMKEIIDTPFIEDIDKAFKGITNVKLENILIKNGGGHGRDTYGASGKIAKGDAKKSDSDVYSIDEILKSDQEFVKVIDQHYKEMKKEDKKLSKSDFEKMMTQGASCDYMTVAEAEEIEEQKKKEEAIEIAALAGMVVLSCINPVAGAVAIGTYSAYSAANAATGKNIVTGRKLSKEERIMEGLSLIPLPGMGFLKGAGKSLMKLGFKGGEKFAVKTGLQKTMQQAVSRISPKMGMMKNSVLNQSRNFAQNTHVGQMLSNMRGQATHTVQQSRNWIGQQAQNVKRIVNNGLDKEIAHPFKQQLAPAGMGGIKFAETTTLRNMGQNMKRAVTPQNHVTHGPKDSMVRSEGKHSVSSHEINLSKYVESPNYTKVKYGEQYARLRPKKLKANIEYTTPTGHIYRTDHKGRIKEVYVDNLSLKDGGRNNHAQRTVGGEDRLPDDDGGHLIARMFGGSKDIDNLVAQSKYINRSFKENGDWYKLEKLWEKAIKSGKSIENIKIEVKYKGNSQRPTIFKVEYEINGKRNIRRILNK

SEQ ID NO: 44017 - protein, 209 aa, Staphylococcus aureus
  MISC_FEATURE (62)..(62): X=any amino acid
  MISC_FEATURE (67)..(67): X=any amino acid
  MISC_FEATURE (110)..(110): X=any amino acid
  MISC_FEATURE (112)..(112): X=any amino acid
  MISC_FEATURE (156)..(156): X=any amino acid
  MISC_FEATURE (163)..(163): X=any amino acid
  MISC_FEATURE (187)..(187): X=any amino acid
GSFRPVAGNLHLHRTMISPSLSLRQCPNRYAFRAGRNLPDKEFRYLRTVIVTAAVYWGFDSXLRRSXPLLLTFQHRAGVSPYTSPYGLAETCVFDKQSLGPIHCGSSGRXPXRAPLLPKLRGHFAEFLNESSLAHLRILILTTCVGLRYGHLFSIXRLFSAVXNQRLEDTMSSPHHSSALTSTGFAXYSALLLRRAIQSHASPILLRPP

SEQ ID NO: 44018 - protein, 209 aa, Staphylococcus aureus
  MISC_FEATURE (62)..(62): X=any amino acid
  MISC_FEATURE (67)..(67): X=any amino acid
  MISC_FEATURE (110)..(110): X=any amino acid
  MISC_FEATURE (112)..(112): X=any amino acid
  MISC_FEATURE (156)..(156): X=any amino acid
  MISC_FEATURE (163)..(163): X=any amino acid
  MISC_FEATURE (187)..(187): X=any amino acid
GSFRPVAGNLHLHRTMISPSLSLRQCPNRYAFRAGRNLPDKEFRYLRTVIVTAAVYWGFDSXLRRSXPLLLTFQHRAGVSPYTSPYGLAETCVFDKQSLGPIHCGSSGRXPXRAPLLPELRGHFAEFLNESSLAHLRILILTTCVGLRYGHLFSIXRLFSAVXNQRLEDSMSSPHHSSALTSTGFAXYSALLLRRAIQSHASPILLRPP

SEQ ID NO: 44019 - protein, 530 aa, Staphylococcus aureus
MSVDTYTETTKIDKLLKKPTSHFQLSTTQLYNKILDNNEGVLTELGAVNASTGKYTGRSPKDKFFVSEPSYRDNIDWGEINQPIDEETFLKLYHKVLDYLDKKDELYVFKGYAGSDKDTMLKLTVINELAWHNLFAKNMFIRPESKEEATKIKPNFTIVSAPHFKADPEVDGTKSETFVIISFKHKVILIGGTEYAGEMKKGIFSVMNYLLPMQDIMSMHCSANVGEKGDVALFFGLSGTGKTTLSADPHRKLIGDDEHGWNKNGVFNIEGGCYAKAINLSKEKEPQIFDAIKYGAILENTVVAEDGSVDFEDNRYTENTRAAYPINHIDNIVVPSKAAHPNTIIFLTADAFGVIPPISKLNKDQAMYHFLSGFTSKLAGTERGVTEPEPSFSTCFGAPFFPLHPTVYADLLGELIDLHDVDVYLVNTGWTGGKYGVGRRISLHYTRQMVNQAISGKLKNAEYTKDSTFGLSIPVEIEDVPKTILNPINAWSDKEKYKAQAEDLIQRFEKNFEKFGEKVEHIAEKGSFNK

SEQ ID NO: 44020 - protein, 234 aa, Staphylococcus aureus
MKALVLGGSGSIGSEIVKQLLTDGFEVYVQYYRTDINELTSKFNDDKVRFIQADLSQTIDIDKTFGDIKSLDCLIYASGQSLYGVLQDMKDHDIDACYQLNVLQLIRLCRYFVDVLRQSANGRIIVISSIWGETGASMETIYSAMKSAQLGFVKALSQELALTSVTVNAIAPGFVAGNMASEWQEDELQAMITELPQQRLVLPSEVAHTCAYLYHSNARSVTGTIQKVNGAWYI

SEQ ID NO: 44021 - protein, 61 aa, Staphylococcus aureus
MAKTSMVAKQQKKQKYAVREYTRCERCGRPHSVYRKFKLCRICFRELAYKGQIPGVRKASW

SEQ ID NO: 44022 - protein, 335 aa, Staphylococcus aureus
MNLAKRILQGEQLTKETVLKIYEDTNIDTLDLLNEAYILRKHYFGKKVKLNMILNAKSGICPENCGYCGQSRDIKQKQRYALIPEEQIIDGAKVAHDNHIGTYCIVMSGRGPSDKEVDHISNTVRTIKSQHPQLKICACLGLTNDEQAKKLKSAGVDRYNHNINTSENYHDNVVTTHSYKDRTDTIELMKANNISPCSGVICGMGESNQDIVDMAFALKEMDADSIPINFLHPIKGTKFGSMDDLTPMKCLRIVALFRLINPTKEIRIAGGREVNLRSLQPLALKAANSIFVGDYLITGGQPNQLDYDMINDLGFEIDYDTCENKENKNDVSRAN

SEQ ID NO: 44023 - protein, 140 aa, Staphylococcus aureus
MKISTKGRYGLTLMISLAKKEGQGCISLKSIAEENNLSDLYLEQLVGPLRNAGLIRSVRGAKGGYQLRVPAEEISAGDIIRLLEGPITFVESIESEPPAQKQLWIRMRDAVRDVLDNTTLKYLAEYVDTSEDLDGYMFYI

SEQ ID NO: 44024 - protein, 60 aa, Staphylococcus aureus
MADESKFDQFKGNVKETVGNVTDNKELEKEGQQDKATGKAKEVVENAKNKITDAIDKLKK

SEQ ID NO: 44025 - protein, 48 aa, Staphylococcus aureus
MSFMDKAKDAVEKFKNSDNEQVKNVKDKINEYTGSNNEEKKENEDKEK

SEQ ID NO: 44026 - protein, 393 aa, Staphylococcus aureus
MTRVVLAAAYRTPIGVFGGAFKDVPAYDLGATLIEHIIKETGLNPSEIDEVIIGNVLQAGQGQNPARIAAMKGGLPETVPAFTVNKVCGSGLKSIQLAYQSIVTGENDIVLAGGMENMSQSPMLVNNSRFGFKMGHQSMVDSMVYDGLTDVFNQYHMGITAENLVEQYGISREEQDTFAVNSQHKAVRAQQNGEFDSEIVPVSIPQRKGEPILVTKDEGVRENVSVEKLSRLRPAFKKDGTVTAGNASGINDGAAMMLVMSEDKAKELNIEPLAVLDGFGSHGVDPSIMGIAPVGAVEKALKRSKKELSDIDVFELNEAFAAQLLAVDRELKLPPEKVNVKGGAIALGHPIGASGARVLVTLLHQLNDEVETGLTSLCIGGGQAIAAVVSKYK

SEQ ID NO: 44027 - protein, 302 aa, Staphylococcus aureus
MSVFIDKNTKVMVQGITGSTALFHTKQMLDYGTKIVAGVTPGKGGQVVEGVPVFNTVEEAKNETGATVSVIYVPAPFAADSILEAADADLDMVICITEHIPVLDMVKVKRYLQGRKTRLVGPNCPGVITADECKIGIMPGYIHKKGHVGVVSRSGTLTYEAVHQLTEEGIGQTTAVGIGGDPVNGTNFIDVLKAFNEDDETKAVVMIGEIGGTAEEEAAEWIKANMTKPVVGFIGGQTAPPGKRMGHAGAIISGGKGTAEEKIKTLNSCGVKTAATPSEIGSTLIEAAKEAGIYESLLTVNK

SEQ ID NO: 44028 - protein, 453 aa, Staphylococcus aureus
MLRCLIANRGEIAVRIIRACREYGIETVAVYAKGDEQSLHVHLADQAICIGEANALDSYLNIDRIISAAQITGANAIHPGYGFLSESTKFAQTVEEQGIAFIGPTKKTMEMMGDKITARQTVHHAGVPVIPGSNGAVNHVSEIENLAKDIGYPVVIKAASGGGGKGIRIVKKAEDLEKAFKEAKSEGKKYFDDDRVYVEAFIPVAKHVEVQVMGDGQDNYVHLGERDCSVQRKNQKLIEESPCAALTEERRQQICNDAVKVARAANYRSAGTIEFLVTDTAHYFIEMNARIQVEHTVTEMRAERDLVAAQLYLLEHNHLPFSQSDIQFNGHVIEARINAENPEKKFQPTPGKVTALHLPQGFNVRVDSLLYHGYQVSPYYDSLVAKVIVKSHDRASAIDKLKVTLDEMVIDGFSTTADFLYAVLNYPLYRDGDAKDVDIKFLEKHQIVKGVEL

SEQ ID NO: 44029 - protein, 122 aa, Staphylococcus aureus
MSNKLDGINKMITAKHKQMDDLYDEKREVKALIDESDELNHSIEQLYQHLGDRYHSSNMASRMEQFRDEFHFAKRRSTEALYEQQQQIQHGIRKAEEEMIDLEMRRNVEIETVTKEENKWKQ

SEQ ID NO: 44030 - protein, 98 aa, Staphylococcus aureus
METIGSIIYLKEGSQKLMIINRGPIVEIENQKYMFDYSACKYPIGVVEDEIYYFNEENIDSVIFKGYSDQDEVRFQELFENMKQNLDSEIQRGEVTPQ

SEQ ID NO: 44031 - protein, 333 aa, Staphylococcus aureus
MQNKQILFNKIPEGMPQEDTFKIEEIDTPKLESDGVLVQTLYISVDPYMRGRMTKADSYVQPFEIGKPIVSHVVAKVIDSTLADYKKGDVVVGMLPWRIINHVQADQITKVPTTDVPLDLYLSVLGMPGQTAYHGLLDIGQPKAGDTVVVSAASGAVGSVVGQIAKIKGCRVVGIAGGDKKVNYLTETLGFDAGIDYKKEDFAEALAQAVPDGIDVYFENVGGTVGDEVFKHLNRFARVPVCGAISSYNHPEADIGPRIQGTLIKKQVMMRGFLVSEFANAFKEASEQLATWVQEGKIQSQVTIEDGFENAPHAFKNLFTGDNFGKQVIKVTE

SEQ ID NO: 44032 - protein, 305 aa, Staphylococcus aureus
MATKNEEILRKPDWLKIKLNTNENYTGLKKMMREKNLNTVCEEAKCPNIHECWGARRTATFMILGAVCTRACRFCAVKTGLPNELDLNEPERVAESVELMNLKHVVITAVARDDLRDAGSNVYAETVRKVRERNPFTTIEILPSDMGGDYDALETLMASRPDILNHNIETVRRLTPRVRARATYDRTLEFLRRSKELQPDIPTKSSIMVGLGETIEEIYETMDDLRANDVDILTIGQYLQPSRKHLKVQKYYTPLEFGKLRKVAMDKGFKHCQAGPLVRSSYHADEQVNEAAKEKQRQGEAQLNS

SEQ ID NO: 44033 - protein, 127 aa, Staphylococcus aureus
MIKVDQHYFELIENYRECFNEEQFIARYSDILDKYDYIVGDYGYDQLRLKGFYKDSNKKAEMSKRFSNIQDYIFEYCNFGCPYFVLRHLSKQEVKKLIEEVHPSDVIDDDNKLQDVKIKPTIQDTEH

SEQ ID NO: 44034 - protein, 200 aa, Staphylococcus aureus
MARFRGSNWKKSRRLGISLSGTGKELEKRPYAPGQHGPNQRKKLSEYGLQLREKQKLRYLYGMTERQFRNTFDIAGKKFGVHGENFMILLASRLDAVVYSLGLARTRRQARQLVNHGHILVDGKRVDIPSYSVKPGQTISVREKSQKLNIIVESVEINNFVPEYLNFDADSLTGTFVRLPERSELPAEINEQLIVEYYSR

SEQ ID NO: 44035 - protein, 174 aa, Staphylococcus aureus
MKERYLIIDGYNMIGQSPTLSAIAKENLEEARMQLIDAIANYNAVISDEIICVFDAYDQSGVEREYMYHGVKTIFTKEKETADSFIERYVYELYDKHTKHIAVVTSDMSEQHAIFGSGAYRISSREMWRDLKENEIDVSKSLDDISENKPRTRIPLSSEILAEFEKIRRGHHKK

SEQ ID NO: 44036 - protein, 437 aa, Staphylococcus aureus
MNQYHSNAQQPSAWRFFVYSLVGILCFFIPFTINGNNTIFVDHVHLAIRSIIGPLMPYVALIMILIGTALPIVRRTFMTSITNLVITLFKVAGAMIGIMYVFKIGPSILFKANYGPFLFEKLMMPLSILIPVGAIALSLLVGYGLLEFVGVYMEPIMRPIFKTPGKSAVDAVASFVGSYSLGLLITNRVYKQGMYNKREATIIATGFSTVSATFMIIVAKTLGLMPHWNLYFWITLVITFVVTAITAWLPPITNESTEYYNGQEGEQEVAIEGSRLKTAYAEAMKQNALTPSLVKNVWDNFKDGLEMTVGILPSILSIGFLGLIVANYTPFIDWLGYIFYPFIYIFPIADQAVLAKASAISIVEMFLPSLLVTKAAMSTKFVVGVVSVSAIIFFSALVPCILATEIKIPVWKLIIIWFLRVALSLLITIPVALLIFG

SEQ ID NO: 44037 - protein, 1168 aa, Staphylococcus aureus
MTILTTLIKEDNHFQDLNQVFGQANTLVTGLSPSAKVTMIAEKYAQSNQQLLLITNNLYQADKLETDLLQFIDAEELYKYPVQDIMTEEFSTQSPQLMSERIRTLTALAQGKKGLFIVPLNGLKKWLTPVEMWQNHQMTLRVGEDIDVDQFLNKLVNMGYKRESVVSHIGEFSLRGGIIDIFPLIGEPIRIELFDTEIDSIRDFDVETQRSKDNIEEVDITTASDYIITEEVIRHLKEELKTAYENTRPKIDKSVRNDLKETYESFKLFESTYFDHQILRRLVAFMYETPSTIIEYFQKDAIIAVDEFNRIKETEESLTVESDSFISNIIESGNGFIGQSFIKYDDFETLIEGYPVTYFSLFATTMPIKLNHIIKFSCKPVQQFYGQYDIMRSEFQRYVNQNYHIVVLVETETKVERMQAMLSEMHIPSITKLHRSMSSGQAVIIEGSLSEGFELPDMGLVVITERELFKSKQKKQRKRTKAISNAEKIKSYQDLNVGDYIVHVHHGVGRYLGVETLEVGQTHRDYIKLQYKGTDQLFVPVDQMDQVQKYVASEDKTPKLNKLGGSEWKKTKAKVQQSVEDIAEELIDLYKEREMAEGYQYGEDTAEQTTFELDFPYELTPDQAKSIDEIKDDMQKSRPMDRLLCGDVGYGKTEVAVRAAFKAVMEGKQVAFLVPTTILAQQHYETLIERMQDFPVEIQLMSRFRTPKEIKQTKEGLKTGFVDIVVGTHKLLSKDIQYKDLGLLIVDEEQRFGVRHKERIKTLKHNVDVLTLTATPIPRTLHMSMLGVRDLSVIETPPENRFPVQTYVLEQNMSFIKEALERELSRDGQVFYLYNKVQSIYEKREQLQMLMPDANIAVAHGQMTERDLEETMLSFINNEYDILVTTTIIETGVDVPNANTLIIEDADRFGLSQLYQLRGRVGRSSRIGYAYFLHPANKVLTETAEDRLQAIKEFTELGSGFKIAMRDLNIRGAGNLLGKQQHGFIDTVGFDLYSQMLEEAVNEKRGIKEPESEVPEVEVDLNLDAYLPTEYIANEQAKIEIYKKLRKTETFDQIIDIKDELIDRFNDYPVEVARLLDIVEIKVHALHSGITLIKDKGKIIDIHLSVKATENIDGEVLFKATQPLGRTMKVGVQNNAMTITLTKQNQWLDSLKFLVKCIEESMRISDEA

SEQ ID NO: 44038 - protein, 205 aa, Staphylococcus aureus
MPFTPNEIKNKEFSRVKNGLEPTEVANFLEQLSTEIERLKEDKKQLEKVIEERDTNIKSYQDVHQSVSDALIQAQKAGEETKQAAEKQAEAIIAKAEAQANQMVGDAVEKARRLAFQTEDMKRQSKVFRSRFRMLVEAQLDLLKNEDWDYLLNYDLDAEQVTLENIHHLHENDLKPDEVAANAQNNASNTPDNNQQSNDSETTKK

SEQ ID NO: 44039 - protein, 393 aa, Staphylococcus aureus
MSELIIYNGKVYTEDGKIDNGYIHVKDGQIVAIGEGDDKAAIDNDTTNKIQVIDAKGHHVLPGFIDIHIHGGYGQDAMDGSYDGLKYLSENLLSEGTTSYLATTMTQSTDKIDKALTNIAKYEAEQDVHNAAEIVGIHLEGPFISENKVGAQHPQYVVRPFIDKIKHFQETANRLIKIMTFAPEVEGAKEALETYKDDIIFSIGHTVATYEEAVEAVERGAKHVTHLYNAATPFQHREPGVFGAAWLNDALHTEMIVDGTHSHPASVAIAYRMKGNERFYLITDAMRAKGMPEGEYDLGGQKVTVQSQQARLANGALAGSILKMNHGLRNLISFTGDTLDHLWRVTSLNQAIALGIDDRKGSIKVNKDADLVILDDDMNVKSTIKQGKVHTFS

SEQ ID NO: 44040 - protein, 506 aa, Staphylococcus aureus
MQNFKELGISDNTVQSLESMGFKEPTPIQKDSIPYALQGIDILGQAQTGTGKTGAFGIPLIEKVVGKQGVQSLILAPTRELAMQVAEQLREFSRGQGVQVVTVFGGMPIERQIKALKKGPQIVVGTPGRVIDHLNRRTLKTDGIHTLILDEADEMMNMGFIDDMRFIMDKIPAVQRQTMLFSATMPKAIQALVQQFMKSPKIIKTMNNEMSDPQIEEFYTIVKELEKFDTFTNFLDVHQPELAIVFGRTKRRVDELTSALISKGYKAEGLHGDITQAKRLEVLKKFKNDQINILVATDVAARGLDISGVSHVYNFDIPQDTESYTHRIGRTGRAGKEGIAVTFVNPIEMDYIRQIEDANGRKMSALRPPHRKEVLQAREDDIKEKVENWMSKESESRLKRISTELLNEYNDVDLVAALLQELVEANDEVEVQLTFEKPLSRKGRNGKPSGSRNRNSKRGNPKFDSKSKRSKGYSSKKKSTKKFDRKEKSSGGSRPMKGRTFADHQK

SEQ ID NO: 44041 - protein, 664 aa, Staphylococcus aureus
MIGKIINERYKIVDKLGGGGMSTVYLAEDTILNIKVAIKAIFIPPREKEETLKRFEREVHNSSQLSHQNIVSMIDVDEEDDCYYLVMEYIEGPTLSEYIESHGPLSVDTAINFTNQILDGIKHAHDMRIVHRDIKPQNILIDSNKTLKIFDFGIAKALSETSLTQTNHVLGTVQYFSPEQAKGEATDECTDIYSIGIVLYEMLVGEPPFNGETAVSIAIKHIQDSVPNVTTDVRKDIPQSLSNVILRATEKDKANRYKTIQEMKDDLSSVLHENRANEDVYELDKMKTIAVPLKKEDLAKHISEHKSNQPKRETTQVPIVNGPAHHQQFQKPEGTVYEPKPKKKSTRKIVLLSLIFSLLMIALVSFVAMAMFGNKYEETPDVIGKSVKEAEQIFNKNNLKLGKISRSYSDKYPENEIIKTTPNTGERVERGDSVDVVISKGPEKVKMPNVIGLPKEEALQKLKSLGLKDVTIEKVYNNQAPKGYIANQSVTANTEIAIHDSNIKLYESLGIKQVYVEDFEHKSFSKAKKALEEKGFKVESKEEYSDDIDEGDVISQSPKGKSVDEGSTISFVVSKGKKSDSSDVKTTTESVDVPYTGKNDKSQKVKVYIKDKDNDGSTEKGSFDITSDQRIDIPLRIEKGKTASYIVKVDGKTVAEKEVSYDDI

SEQ ID NO: 44042 - protein, 137 aa, Staphylococcus aureus
MPTINQLVRKPRQSKIKKSDSPALNKGFNSKKKKFTDLNSPQKRGVCTRVGTMTPKKPNSALRKYARVRLSNNIEINAYIPGIGHNLQEHSVVLVRGGRVKDLPGVRYHIVRGALDTSGVDGRRQGRSLYGTKKPKN

SEQ ID NO: 44043 - protein, 276 aa, Staphylococcus aureus
METLELQGAKLRYHQVGQGPVLIFIPGANGTGNIFLPLAEQLKDHFTVVAVDRRDYGESELTEPLPDSASNPDSDYRVKRDAQDIAELAKSLSDEPVYILGSSSGSIVAMHVLKDYPEVVKKIAFHEPPINTFLPDSTYWKDKNDDIVHQILTEGLEKGMKTFGETLNIAPIDAKMMSQPADTEEGRIEQYKRTMFWSEFEIRQYTHSDITLDDFTKYSDKITLLNGTDSRGSFPQDVNFYINKETGIPIVDIPGGHLGYIQKPEGFADVLLNMWG

SEQ ID NO: 44044 - protein, 336 aa, Staphylococcus aureus
MKSITFEEHYVIEDIQKETMNAISADPKGVPMKVMLEGLEKKTGFTNADELSHHDERIQFMNNQDVQIQVLSYGNGSPSNLVGQKAIELCQKANDQLANYIAQYPNRFVGFATLPINEPEAAAREFERCINDLGFKGALIMGRAQDGFLDQDKYDIIFKTAENLDVPIYLHPAPVNSDIYQSYYKGNYPEVTAATFACFGYGWHIDVGIHAIHLVLSGIFDRYPKLNMIIGHWGEFIPFFLERMDEALFAEHLNHSVSYYFKNSFYITPSGMLTKPQFDLVKKEVGIDRILYAADYPYIEPEKLGVFLDELGLTDEEKEKISYTNGAKLLGLSSNN

SEQ ID NO: 44045 - protein, 366 aa, Staphylococcus aureus
MSKFKSLLLLFGTLILLSGCSNIEIFNAKGPVASSQKFLILYSIVFMLVICFVVLGMFAIFIYKYSYNKNAESGKMHHNAIIETIWFVIPIIIVAALAIPTVKTLYDYEKPPKSEKDPMVVYAVSAGYKWFFAYPDEHIETVNTLTIPKDRPVVFKLQAMDTMTSFWIPQLGGQKYAMTGMTMNWTLEASQTGTFRGRNSNFNGEGFSRQTFKVNAVSQKDYDKWVKEVKGKKTLDQDTFDKQLLPSTPNKALEFNGTHMAFVDPAADPEYIFYAYKRFNFELKDPNFTSEENMFKDVSDKPLIPARKAQITNANYKRHGMKLMILGNDEPYNNEFKKDESKNAKEMKKISKDAQDQDNDDHGGGH

SEQ ID NO: 44046 - protein, 331 aa, Staphylococcus aureus
MSNQFKSEEERRQWEQFQAFQNQQNQQHQQYGQKKSKKGWFWGCGGCLVLFILIIIGISACTAGVTGNLGGNSSKEANKTHKIGETVKNGDLEVTVNSVETMKSVGPSLAPTNAKGIFVVADVTIKNKGKEALTIDSSMFKLKSGDKTFEADNTGSMSANQSDNGSIENSFFLQRINPDSTAQGKIVFDVSENIANAKDKKLEVISSLFSVKKITFDLSDAKKTSKAKKDKQDTEVAVASSNSDNVNYEASATTPATTSSADTDSEDSEKSSKDEDKQNASKSDKSSVEKSESNEETATVEPMPQSKPTTSEAPPSQNNHNENNMYDASTE

SEQ ID NO: 44047 - protein, 601 aa, Staphylococcus aureus
MCGIVGYIGYDNAKELLLKGLEKLEYRGYDSAGIAVVNDDNTTVFKEKGRIAELRKVADSSDFDGPVGIGHTRWATHGVPNHENSHPHQSSNGRFTLVHNGVIENYEELKGEYLQGVSFISETDTEVIVQLVEYFSNQGLSTEEAFTKVVSLLHGSYALGLLDAEDKDTIYVAKNKSPLLLGVGEGFNVIASDALAMLQVTSEYKEIHDHEIVIVKKDEVIIKDADGNVVERDSYIAEIDASDAEKGVYAHYMLKEIHEQPAVMRRIIQEYQDAEGNLKIDQDIINDVKEADRIYVIAAGTSYHAGLVGKEFLEKWAGVPTEVHVASEFVYNMPLLSEKPLFVYISQSGETADSRAVLVETNKLGHKSLTITNVAGSTLSREADHTLLLHAGPEIAVASTKAYTAQIAVLSILSQIVAKEHGREADIDLLRELAKVTTAIEAIVDDAPIMEQIATDFLETTRNAFFIGRTIDYNVSLEGALKLKEISYIQAEGFAGGELKHGTIALIEDGTPVVALATQENVNLSIRGNVKEVVARGAHPCIISMEGLEKEGDTYVIPHVHELLTPLVSVVALQLISYYAALHRDLDVDKPRNLAKSVTVE

SEQ ID NO: 44048 - protein, 608 aa, Staphylococcus aureus
MKWLKQLQSLHTKLVIVYVLLIIIGMQIIGLYFTNNLEKELLDNFKKNITQYAKQLEISIEKVYDEKGSVNAQKDIQNLLSEYANRQEIGEIRFIDKDQIIIATTKQSNRSLINQKANDSSVQKALSLGQSNDHLILKDYGGGKDRVWVYNIPVKVDKKVIGNIYIESKINDVYNQLNNINQIFIVGTAISLLITVILGFFIARTITKPITDMRNQTVEMSRGNYTQRVKIYGNDEIGELALAFNNLSKRVQEAQANTESEKRRLDSVITHMSDGIIATDRRGRIRIVNDMALKMLGMAKEDIIGYYMLSVLSLEDEFKLEEIQENNDSFLLDLNEEEGLIARVNFSTIVQETGFVTGYIAVLHDVTEQQQVERERREFVANVSHELRTPLTSMNSYIEALEEGAWKDEELAPQFLSVTREETERMIRLVNDLLQLSKMDNESDQINKEIIDFNMFINKIINRHEMSAKDTTFIRDIPKKTIFTEFDPDKMTQVFDNVITNAMKYSRGDKRVEFHVKQNPLYNRMTIRIKDNGIGIPINKVDKIFDRFYRVDKARTRKMGGTGLGLAISKEIVEAHNGRIWANSVEGQGTSIFITLPCEVIEDGDWDE

SEQ ID NO: 44049 - protein, 588 aa, Staphylococcus aureus
MSKRTTYCGLVTEAFLGQEITLKGWVNNRRDLGGLIFVDLRDREGIVQVVFNPAFSEEALKIAETVRSEYVVEVQGTVTKRDPETVNPKIKTGQVEVQVTNIKVINKSETPPFSINEENVNVDENIRLKYRYLDLRRQELAQTFKMRHQITRSIRQYLDDEGFFDIETPVLTKSTPEGARDYLVPSRVHDGEFYALPQSPQLFKQLLMISGFDKYYQIVKCFRDEDLRADRQPEFTQVDIEMSFVDQEDVMQMGEEMLKKVVKEVKGVEINGAFPRMTYKEAMRRYGSDKPDTRFEMELIDVSQLGRDMDFKVFKDTVENDGEIKAIVAKGAAEQYTRKDMDALTEFVNIYGAKGLAWVKVVEDGLTGPIGRFFETENVETLLTLTGAEAGDLVMFVADKPNVVAQSLGALRVKLAKELGLIDETKLNFLWVTDWPLLEYDEDAKRYVAAHHPFTSPKEADIAKLGTAPEEAEANAYDIVLNGYELGGGSIRIHDGELQEKMFEVLGFTKEQAQEQFGFLLDAFKYGAPPHGGIALGLDRLVMLLTNRTNLRDTIAFPKTASATCLLTNAPGEVSDKQLEELSLRIRH

SEQ ID NO: 44050 - protein, 315 aa, Staphylococcus aureus
MSWPLKHGKGAYMSKVQNESNNVVKRGLKDRHISMIAIGGCIGTGLFVTSGGAIHDAGALGALIGYAIIGIMVFFLMTSLGEMATYLPVSGSFSTYATRFVDPSLGFALGWNYWFNWVVTVAADITIAAQVIQYWTPLQGIPAWAWSALFLVIIFSLNSLSVRVYGESEYWLALIKVITVIVFIAIGLLTIVGIMGGHVVGFEIFNKGEGPILGGNLGGSLLSILGVFLIAGFSFQGTELIGITAGESENPERAVPKAIKQVFWRILLFYILAIFVIGMLIPYDSSALMGGSDNVATSPFTLVFKNAGFRLQHHL

SEQ ID NO: 44051 - protein, 38 aa, Staphylococcus aureus
MPVFLAFFIYHKLRYKTKKIPLEQVDLRQDVSMDEIKG

SEQ ID NO: 44052 - protein, 92 aa, Staphylococcus aureus
MARSIKKGPFVDEHLMKKVEAQEGSEKKQVIKTWSRRSTIFPNFIGHTFAVYDGRKHVPVYVTEDMVGHKLGEFAPTRTFKGHVADDKKTRR

SEQ ID NO: 44053 - protein, 701 aa, Staphylococcus aureus
MNNGFFNSDFDSIFRRMMQDMQGSNQVGNKKYYINGKEVSPEELAQLTQQGSNQSAEQSAQAFQQAAQRQQGQQGGNGNYLEQIGRNLTQEARDGLLDPVIGRDKEIQETAEVLSRRTKNNPILVGEAGVGKTAIVEGLAQAIVEGNVPAAIKDKEIISVDISSLEAGTQYRGAFEENIQKLIEGVKSSQNAVLFFDEIHQIIGSGATGSDSGSKGLSDILKPALSRGEISIIGATTQDEYRNNILKDAALTRRFNEVLVNEPSAKDTVEILKGIREKFEEHHQVKLPDDVLKACVDLSIQYIPQRLLPDKAIDVLDITAAHLSAQSPAVDKVETEKRISELENDKRKAVSAEEYKKADDIQNEIKSLQDKLENSNGEHTAVATVHDISDTIQRLTGIPVSQMDDNDIERLKNISNRLRSKIIGQDQAVEMVSRAIRRNRAGFDDGNRPIGSFLFVGPTGVGKTELAKQLAIDLFGNKDALIRLDMSEYSDTTAVSKMIGTTAGYVGYDDNSNTLTEKVRRNPYSVILFDEIEKANPQILTLLLQVMDDGNLTDGQGNVINFKNTIIICTSNAGFGNGNDAEEKDIMHEMKKFFRPEFLNRFNGIVEFLHLDKDALQDIVNLLLDDVQVTLDKKGITMDVSQDAKDWLIEEGYDEELGARPLRRIVEQQVRDKITDYYLDHTDVKHVDIDVEDNELVVKGK

SEQ ID NO: 44054 - protein, 110 aa, Staphylococcus aureus
MKKLANYLWVEKVGDLYVFSMTPELQDDIGTVGYVEFVSPDEVKVDDEIVSIEASKTVIDVQTPLSGTIIERNTKAEEEPTILNSEKPEENWLFKLDDVDKEAFLALPEA

SEQ ID NO: 44055 - protein, 420 aa, Staphylococcus aureus
MIKIPRGTQDILPEDSKKWRYIENQLDELMTFYNYKEIRTPIFESTDLFARGVGDSTDVVQKEMYTFKDKGDRSITLRPEGTAAVVRSYIEHKMQGNPNQPIKLYYNGPMFRYERKQKGRYRQFNQFGVEAIGAENPSVDAEVLAMVMHIYQSFGLKHLKLVINSVGDMASRKEYNEALVKHFEPVIHEFCSDCQSRLHTNPMRILDCKVDRDKEAIKTAPRITDFLNEESKAYYEQVKAYLDDLGIPYIEDPNLVRGLDYYTHTAFELMMDNPNYDGAITTLCGGGRYNGLLELLDGPSETGIGFALSIERLLLALEEEGIELDIEENLDLFIVTMGDQADRYAVKLLNHLRHNGIKADKDYLQRKIKGQMKQADRLGAKFTIVIGDQELENNKIDVKNMTTGESETIELDALVEYFKK

SEQ ID NO: 44056 - protein, 138 aa, Staphylococcus aureus
MRLKVLFHFIAAIFISFMLLWMTMLFDLISNQSHLKALLLNLDFLIPSDNTPYILEIICHLLIGSVIYFVFVLLFHTSKRLYYLCYIPLFFLFIALYPFLVFIAQRPIFQFSVTELIGWIITHIFFMSLMALVIPRIK

SEQ ID NO: 44057 - protein, 450 aa, Staphylococcus aureus
MRRHAIILAAGKGTRMKSKKYKVLHEVAGKPMVEHVLESVKGSGVDQVVTIVGHGAESVKGHLGERSLYSFQEKQLGTAHAVQMAKSHLEDKEGTTIVVCGDTPLITKETLETLIAHHEDANAQATVLSASIQQPYGYGRIVRNASGRLERIVEEKDATQAEKDINEISSGIFAFNNKTLFEKLTQVKNDNAQGEYYLPDVLSLILNDGGIVEVYRTNDVEEIMGVNDRVMLSQAEKAMQRRTNHYHMLNGVTIIDPDSTFIGPDVTIGSDTVIEPGVRINGRTEIGEDVVIGQYSEINNSTIENGACIQQSVVNDASVGANTKVGPFAQLRPGAQLGADVKVGNFVEIKKADLKDGAKVSHLSYIGDAVIGERTNIGCGTITVNYDGENKFKTIVGKDSFVGCNVNLVAPVTIGDDVLVAAGSTITDDVPNDSLAVARARQTTKEGYRK

SEQ ID NO: 44058 - protein, 269 aa, Staphylococcus aureus
MRYTILTKGDSKSNALKHKMMNYMKDFRMIEDSENPEIVISVGGDGTLLQAFHQYSHMLSKVAFVGVHTGHLGFYADWLPHEVEKLIIEINNSEFQVIEYPLLEIIMRYNDNGYETRYLALNEATMKTENGSTLVVDVNLRGKHFERFRGDGLCVSTPSGSTAYNKALGGALIHPSLEAMQITEIASINNRVFRTVGSPLVLPKHHTCLISPVNHDTIRMTIDHVSIKHKNVNSIQYRVANEKVRFARFRPFPFWKRVHDSFISSDEER

SEQ ID NO: 44059 - protein, 284 aa, Staphylococcus aureus
MKFKYHISQQETVKAFLARHDFSKKTVSAIKNNGALIVNDEPVTVRKQLMPNDILEIHLPREIPSVNLIPYARKLEVLYEDAFIIIVTKPNNQNCTPSREHPHESLIEQVLYHCQEHGENINPHIVTRLDRNTTGIVIFAKYGHIHHLFSKVNLKKIYTCLVYGKTHTSGIIEANIRRSKDSIITREVASDGKYAKTSYEVINQNDKYSLCKVHLHTGRTHQIRVHFQHIGHPIVGDSLYDGFHDKIHGQVLQCTQIYFVHPINKNNIYITIDYKQLLKLFNQL

SEQ ID NO: 44060 - protein, 394 aa, Staphylococcus aureus
MNSIIELTDYYSSNNYAPLKLVISKGKGVKVWDTDGKQYIDCISGFSVANQGHCHPTIVKAMTEQASKLSIISRVLYSDNLGKWEEKICHLAKKDKVLSLNSGTEAVEAAIKIARKWGSEVKGITDGQVEIIAMNNNFHGRTLGSLSLSNHDAYKAGFHPLLQGTTTVDFGDIEQLTQAISPNTAAIILEPIQGEGGVNIPPKGYIQAVRQLCDKHQILMIADEIQVGLGRTGKWFAMEWEQVVPDIYILGKALGGGLYPVSAVLANNDVMRVLTPGTHGSTFGGNPLAIAISTAALDVLKDEQLVERSERLGSFLLKALLQLKHPSIKEIRGRGLFIGIELNTDAAPFVDQLIQRGILCKDTHRTIIRLSPPLVIDKEEIHQIVAAFQDVFKN

SEQ ID NO: 44061 - protein, 553 aa, Staphylococcus aureus
MRKIQAKKGLSIECKGWEQEAVLRMLYNNLDPEVAERPEDLVVYGGIGKAARNWEAFEAIEKTLRELESDETMLVQSGKPVAVFKTHEEAPRVLISNSVLVPEWANWDHFNELDKKGLIMYGQMTAGSWIYIGSQGIVQGTYETFAELGNQHFNGDLAGTVTLTAGLGGMGGAQPLAITMNHGVAICVDVDETRVDKRIDTKYCDVKTADLDEALKLAEEAKERGEGLSIGLVGNAVDIHQAILEKGFKIDIITDQTSAHDPLNGYVPQGYSVEEAKVLREKDPKKYVELSQASMAKHVELMLEFQKRGAVAFDYGNNIRQVAFNNGVKNAFDFPGFVPAYIRPLFCEGKGQFRFAALSGDPKDIERADEEMRKLFPENEKLLRWLDLAEEKISYQGLPSRIAWLGYGERAKMGLALNRLVRDGEISAPIVIGRDHLDAGSVASPNRETESMKDGSDAVGDWAVLNALINTAAGGSWISFHHGGGVGMGYSLHAGMVVVADGSERAERRLERVLTTDPGMGVARHVDAGYDIAIQTAKEKGIHIPMIDKAGDK

SEQ ID NO: 44062 - protein, 263 aa, Staphylococcus aureus
MEQFYQLGWTLDSAGGASGEAYMAEQDGQKLFLKRNSNPFIAALSAEGIVPKLVWTKRIETGEVVTAQHWKNGRELSSNEMKQTRVAHLLKKIHNSRPLLSMLKRMEMEPITPEIMLNKINASLSREVLTHHIVRKSLTYLEEHIPSLDSRFFTVVHGDVNHNNWLLSDRDELFLVDWEGAMIADPAIDIGMLLYNYVPQQQWSEWLETYGVQESLNLNKRMKWYTVIQSIGLVQWYEEQKRYKDMNTWLKFLNEVMNSNMFI

SEQ ID NO: 44063 - protein, 232 aa, Staphylococcus aureus
MSVGILIFVISVIISIITTMRENSHKDRQNQKPPQKTSTDNEPKKGGFFEEIERTFKEISEELNEEEKKSSKRKYDDTLPPLFDELPKEEPKSKPVVEPMAPKKQPETKPMTEKPITVPKAEPVEQKHRPSRQDNSDEIRRQLEKSLRDDIKTIRTDIDREKEKQIAKMEKRARDIIEDKYLSERTKRLKLKQLLNSQNVEKDLTKSAFQFDKDEVINGMIWSEILAKPKQL

SEQ ID NO: 44064 - protein, 455 aa, Staphylococcus aureus
MAFEGLSERLQATMQKMRGKGKLTEADIKIMMREVRLALFEADVNFKVVKEFIKTVSERALGSDVMQSLTPGQQVIKIVQDELTKLMGGENTSINMSNKPPTVVMMVGLQGAGKTTTAGKLALLMRKKYNKKPMLVAADIYRPAAINQLQTVGKQIDIPVYSEGDQVKPQQIVTNALKHAKEEHLDFVIIDTAGRLHIDEALMNELKEVKEIAKPNEIMLVVDSMTGQDAVNVAESFDDQLDVTGVTLTKLDGDTRGGAALSIRSVTQKPIKFVGMSEKLDGLELFHPERMASRILGMGDVLSLIEKAQQDVDQEKAKDLEKKMRESSFTLDDFLEQLDQVKNLGPLDDIMKMIPGMNKMKGLDKLNMSEKQIDHIKAIIQSMTPAERNNPDTLNVSRKKRIAKGSGRSLQEVNRLMKQFNDMKKMMKQFTGGGKGKKGKRNQMQNMLKGMNLPF

SEQ ID NO: 44065 - protein, 282 aa, Staphylococcus aureus
MNHIEISKDVKIPVLGFGVFQIPQEQTAEAVKEAIKAGYRHIDTAQSYLNETEVGQGIEASGIDRSELFITTKVWIENVNYEDTIKSIERSLQRLNLDYLDLVLIHQPYNDVYGSWRALEELKENGKIKAIGVSNFGVDRIVDLGIHNQIQPQVNQIEINPFHQQEEQVAALQQENVVVEAWAPFAEGKNQLFQNQLLQAIADKYNKSIAQVILRWLVERDIVVLAKSVNPERMAQNLDIFDFELTEEDKQQIATLEESNSQFFSHADPEMIKALTSRELDV

SEQ ID NO: 44066 - protein, 202 aa, Staphylococcus aureus
MCFDINNLDIKKLNFRKVKNAIHLSLSGDKYQFLEDGKTINNTYFLAVYDNAINIFEDLFSPSDSINLVHVVYVYSEPYKKTNVIKKFTSLTIDELYYFKEYKKEKDDNILCEEFSYKCSIKDIKYKKLLKAISNQDFKGLVPNINQNDNYSEIYIINNTKNLIYHLYDDRGLWLAFNNNEDYARYSEKYNDLISEFDNEDI

SEQ ID NO: 44067 - protein, 97 aa, Staphylococcus aureus
MSENAIIHDDYFYNLKAVKTHNIAKNVNKSLLNDKGVSIGKFIQKLKGKNPTWRYPKIKWTISKNKGQSYGGSYWKLINNKGKRIASLTKEGKILRE

SEQ ID NO: 44068 - protein, 108 aa, Staphylococcus aureus
ENVVVEAWAPFAEGKNQLFQNQLLQAIADKYNKSIAQVILRWLVERDIVVLAKSVNPERMAQNLDIFDFELTEEDKQQIATLEESNSQFFSHADPEMIKALTSRELDV

SEQ ID NO: 44069 - protein, 67 aa, Staphylococcus aureus
MKYKHFAIITLITGIVMLTAMYFVPFGYHKIPIFAGMAIIFTVYFSNKKSIDETNIFSKKNRNKNKQ

SEQ ID NO: 44070 - protein, 181 aa, Staphylococcus aureus
MSNTTLHATTIYAVRHNGKAAMAGDGQVTLGQQVIMKQTARKVRRLYEGKVLAGFAGSVADAFTLFEKFETKLQQFSGNLERAAVELAQEWRGDKQLRQLEAMLIVMDKDAILVVSGTGEVIAPDDDLIAIGSGGNYALSAGRALKRHASHLSAEEMAYESLKVAADICVFTNDNIVVETL

SEQ ID NO: 44071 - protein, 105 aa, Staphylococcus aureus
MHIKKGDNVKVIAGKDKGKEGKVIATLPKKDRVVVEGVNIMKKHQKPTQLNPEGGILETEAAIHVSNVQLLDPKTNEPTRVGYKFVDGKKVRIAKKSGEEIKSNN

SEQ ID NO: 44072 - protein, 448 aa, Staphylococcus aureus
MAKHPFEQFNLESSLIDAVKDLNFEKPTEIQNRIIPRILKRTNLIGQSQTGTGKSHAFLLPLMQLIDSEIKEPQAIVVAPTRELAQQLYDAANHLSQFKAGVSVKVFIGGTDIEKDRQRCNAQPQLIIGTPTRINDLAKTGHLHVHLASYLVIDEADLMIDLGLIEDVDYIAARLEDNANIAVFSATIPQQLQPFLNKYLSHPEYVAVDSKKQNKKNIEFFLIPTKGAAKVEKTLNLIDILNPYLCIIFCNSRDNANDLARSLNEAGIKVGMIHGGLTPRERKQQMKRIRNLEFQYVIASDLASRGIDIEGVSHVINFDVPNDIDFFTHRVGRTGRGNYKGVAITLYSPDEEHNISLIEDRGFVFNTVDIKDGELKEVKAHNQRQARMRKDDHLTNQVKDKVRSKIKNKVKPGYKKKFKQEVEKMKRQERKQFSKQQNRQKRKQNKKG

SEQ ID NO: 44073 - protein, 296 aa, Staphylococcus aureus
MLLGSHVSMSGKKMLEGSAIEAYEYGETTFMIYTGAPQNTRRKSIEDLNITKGHEVMEKYGLSNIVVHAPYIINIANTTKPETFNLGVDFLQQEIERTQAIGAKDIVLHPGAHVGAGVDAGINKIIEGLNEVLTNDNNVRIALETMAGKGTEIGRSFEELARIIDGVHNNERLSVCFDTCHTHDAGYNVKEDFDGVLNEFDKIIGVDRIKVVHVNDSKNDRGAQKDRHENIGFGYIGFDALNYIVHHDSFKDIPKILETPYVGEDKKNKKPPYKLEIEMLKQQQFDPELKNKVMQQ

SEQ ID NO: 44074 - protein, 243 aa, Staphylococcus aureus
MNGNIIVAHGMRHGRQNQALEAFISELVKDDIHHYDIAFLESEHQDLETVMTTLIQSGVDHFKIVPLLIFSAMHYLKDIPNIVHEMKRRYPDIKVEVSEPLGTHPLMRRLIEQRICDALAGDEQQVGVMVVAHGNINGNFTKAHEELQICAQHLQINKPTYARTLYGEISFTHDLESISKRYQKLIVVPLFLYDGRLVNKVKQQMNDMVINTDIHFTPSINFDPILKQIINDRLESLMIPMKI

SEQ ID NO: 44075 - protein, 38 aa, Staphylococcus aureus
MNRSIYFLGGQLLCVKHLWQMNQTLSANGMLSMLKAKH

SEQ ID NO: 44076 - protein, 146 aa, Staphylococcus aureus
MKLHELKPAEGSRKERNRVGRGVATGNGKTSGRGHKGQKARSGGGVRPGFEGGQLPLFRRLPKRGFTNINRKEYAIVNLDQLNKFEDGTEVTPALLVESGVVKNEKSGIKILGNGSLDKKLTVKAHKFSASAAEAIDAKGGAHEVI

SEQ ID NO: 44077 - protein, 346 aa, Staphylococcus aureus
MTKLKVGVIGVGGIAQDRHIPALLKLKDTVSLVAVQDINTVQMIDVAKRFNIPQAVETPSELFKLVDAVVICTPNKFHADLSIEALNHGVHVLCEKPMAMTTEECDRMIEAANKNHKLLTVAYHYRHTDVAMTAKKAIEAGVVGKPLVARVQAMRRRKVPGWGVFTNKALQGGGSLIDYGCHLLDLSLWLLGKDMVPHEVLGKTYNQLSKQPNQINDWGTFDHTKFDVDDHVTSYMTFANRASMQFECSWSANIKEDKVHVSLSGEDGGINLFPFEIYEPRFGTIFESKANVEHNEDIAGERQARNFVNACLGIEEIVVKPEEARNVNALIEAIYRSDLDNKSIQL

SEQ ID NO: 44078 - protein, 322 aa, Staphylococcus aureus
MKIGVFSVLFYDKNFEDMLDYVAESGLDMIEVGTGGNPGDKFCKLDELLENEDKRQAFMKSITDRGLQISGFSCHNNPISPDPIEAKEADETLRKTIRLANLLDVPVVNTFSGIAGSDDTAKKPNWPVTPWPTAYSEIYDYQWNEKLIPYWQDLAEFAKEQDVKIAIELHAGFLVHTPYTMLKLREATNEYIGANLDPSHLWWQGIDPIAAIRILGQANAIHHFHAKDTYINQENVNMYGLTDMQPYGNVATRAWTFRTVGYGHSPYVWADIISQLIINGYDYVLSIEHEDPIMSVEEGFQKACQTLKSVNIYDKPADMWWA

SEQ ID NO: 44079 - protein, 252 aa, Staphylococcus aureus
MTILSVQHVSKTYGKKHTFQALKDINFDIQKGEFVAIMGPSGSGKTTLLNVLSSIDQISSGSVIANGQELNKLNQKALAKFRKESLGFIFQDYSILPTLTVKENIMLPLSVQKMSKATMEENYKAITTALGIYDLGNKYPSELSGGQQQRTAAARAFVHKPQIIFADEPTGALDSKSANDLLQRLEEMNKSFDTTIVMVTHDPVAASFAERVIMLKDGQIHTQLYQEGRSKQAFYEDIVHLQSVLGGVSNDI

SEQ ID NO: 44080 - protein, 368 aa, Staphylococcus aureus
MKAVHFGAGNIGRGFIGYILADNNVKVTFADVNEEIINALAHDHQYDVILADESKTTTRVNNVDAINSMQPSEALKQAILEADIITTAVGVNILPIIAKSFAPFLKEKTNHVNIVACENAIMATDTLKKAVLDITGPLGNNIHFANSAVDRIVPLQKNENILDVMVEPFYEWVVEKDAWYGPELNHIKYVDDLTPYIERKLLTVNTGHAYLAYAGKFAGKATVLDAVKDSSIEAGLRRVLAETSQYITNEFDFTEAEQAGYVEKIIDRFNNSYLSDEVTRVGRGTLRKIGPKDRIIKPLTYLYNKDLERTGLLNTAALLLKYDDTADQETVEKNNYIKEHGLKAFLSEYAKVDDGLADEIIEAYNSLS

SEQ ID NO: 44081 - protein, 275 aa, Staphylococcus aureus
MTVAEKKEWYLEYEIEINRPGLLGDVSSLLGMLGISIVTINGVDQGKRGLLIKTDNLEKVERFEQIARGINEIEITKLKKPELRDRLAVRHGRYIEQDAKDKKTFRFEREDLGLLVDFLAELFKEEGHKLIGIRGMPRVGKTESIVAGSVCAHKRWLFISSTLIKQTVRSSLIKGEYDANHVYIIDGAVTARESNPKHQELVNEVMTLPSIKVVEHPDLFVETSTCTMEDFDYIIELRENENQEIHYEEMKKQTVQSKNNLDFGDPFGGGFGFFE

SEQ ID NO: 44082 - protein, 130 aa, Staphylococcus aureus
MKTVGEALKGRRERLGMTLTELEQRTGIKREMLVHIENNEFDQLPNKNYSEGFIRKYASVVNIEPNQLIQAHQDEIPSNQAEWDEVITVFNNNKDLDYKSKSKEPIQLLVIMGITVLITLLLWIMLVLIF

SEQ ID NO: 44083 - protein, 278 aa, Staphylococcus aureus
MDLASKYFNGVNWRYIDHSSGLEPMQSFAFDDTFCESVGKDISDNVVRTWIHQHTVILGIHDSRLPFLKDGIDYLTNEIGYNAIVRNSGGLGVVLDQGVLNISLMFKGQTETTIDEAFTVMYLLISKMFEDENVDIDTMEIEHSYCPGKFDLSIDGKKFAGISQRRVRGGIAVQIYLCVEGSGSERALMMQTFYEHALKGEVTKFKYPEIEPSCMASLETLLNKTITVQDVMFLLLYAIKDLGGVLNMTPITQEEWQRYDTYFDKMIERNKKMIDQMQ

SEQ ID NO: 44084 - protein, 377 aa, Staphylococcus aureus
MMEFTIKRDYFITQLNDTLKAISPRTTLPILTGIKIDAKEHEVILTGSDSEISIEITIPKTVDGEDIVNISETGSVVLPGRFFVDIIKKLPGKDVKLSTNEQFQTLITSGHSEFNLSGLDPDQYPLLPQVSRDDAIQLSVKVLKNVIAQTNFAVSTSETRPVLTGVNWLIQENELICTATDSHRLAVRKLQLEDVSENKNVIIPGKALAELNKIMSDNEEDIDIFFASNQVLFKVGNVNFISRLLEGHYPDTTRLFPENYEIKLSIDNGEFYHAIDRASLLAREGGNNVIKLSTGDDVVELSSTSPEIGTVKEEVDANDVEGGSLKISFNSKYMMDALKAIDNDEVEVEFFGTMKPFILKPKGDDSVTQLILPIRTY

SEQ ID NO: 44085 - protein, 367 aa, Staphylococcus aureus
MKDTQLAQITLTDDSTGAIANPIHLSTAYKHPKLGQSTGFDYTRTKNPTRSTFETCFAKLEHGIASFATSSGMSAIQLICNLFKPHDEILVSFDLYGGTFRLFEFYEQQYDIKFKYVDFTDYEQVEKEITDKTVALFIEPISNPQMIAIDVKPYYQLCKAKGLLSIIDNTFLTPYLSTPLAEGADIVLHSATKYIGGHNDVLAGVVTVKDESLAQQLFDFHNMTGATLSPIDSYLLLRGLKTLHLRIERAQSNARKLAKKCQSLQAIDEVLYSGQTGMLSLRLNKAYSVAKLLENLDICIFAESLGGTETLVTFPYTQTHVDMPDAEKDKRGIDEYLIRLSLGVENYEDIERDIIQALDKAQIGEIV

SEQ ID NO: 44086 - protein, 692 aa, Staphylococcus aureus
MALLEAFLIFIFAVIISSVINNRFPQIPTAFIQIALGVVIFIIPIQVDFQFNSEVFMFAVIAPLLFVEGTHVSRTKLLEYRKPILLMSMALVFATVVGVGYFIHWIWPALPMPAAFAIAAILCPTDAVAVSAITRGKLLPKGSMTILEGESLLNDAAGIISFKIAVTALVTGTFSLFQAVEQFIISTILGVLIGAIIGFVVVRIRIDLTANKGLKDNNTLTFIQLLTPFVVYFLAEEVHASGIIAVVIAGLIHGLERDRLIRAQTELQMNYHQIWNTFSYALNGFVFVVLGFMIPTVVIDIFQTEPDNFSFLIVITILIAIAIYACRFVWVYFWYKDFYFPKNIQSYLDEEHDSHETPPSRVRYAFIMTMCGIHGTISLSMALTLPFIITKGQAFEYRNDLLFIASFMVLISLILAQIVLPLITPSAEDTTFKGMTYQSAKIFIVQKVIQHFKNESKKDKNDTNYRPVLNQYYGELLFLLNSEPNNQNTKELKRLEDIAKVIETSTLERLIDKGKATYQDINNYRNIVELTETHRTASFVEKFANFFKMLWLRLKAMKHYKALNKESKKQEFENSFKDVQKIMRIVNHNIILRLKEEQNSTNVLEVSLVINHYYDMSRSLKWRAQRRKERQENSNQIIPQAMFHNHKLEALYLQRHLLDELIRKNKINNIVAAQIRENINYNEIVLSLQSKH

SEQ ID NO: 44087 - protein, 224 aa, Staphylococcus aureus
MRVKDNLQQISTQINDKSEKNNFSTKPNVIAVTKYVTIERAKEAYEAGIRHFGENRLEGFFQKKEALPSDAVIHFIGSLQSRKVKDVINDVDYFHALDRLSLAKEINKRAEHKIKCFLQVNVSGEASKHGIALEDVDQFIDDLKKYDKIEIVGLMTMAPLTDDEAYIRSLFKQLRLKKEEIQRLNLEYAPCDELSMGMSNDYLIAVEEGATFVRIGTKLVGEEE

SEQ ID NO: 44088 - protein, 187 aa, Staphylococcus aureus
MSHLALKDLFSGFFVIDDEEEVEVPDKQQQVNEAPAKEQSQQTTKQNAIKSVPQKSASRYTTTSEERNNRMSNYSKNNSRNVVTMNNATPNNASQESSKMCLFEPRVFSDTQDIADELKNRRATLVNLQRIDKVSAKRIIDFLSGTVYAIGGDIQRVGTDIFLCTPDNVEVAGSITDHIENMEHSFD

SEQ ID NO: 44089 - protein, 72 aa, Staphylococcus aureus
MAKQDVIELEGTVLDTLPNAMFKVELENGHEILAHVSGKIRMNYIRILPGDKVTVEMSPYDLTRGRITYRYK

SEQ ID NO: 44090 - protein, 37 aa, Staphylococcus aureus
MKVRPSVKPICEKCKVIKRKGKVMVICENPKHKQRQG

SEQ ID NO: 44091 - protein, 463 aa, Staphylococcus aureus
MAKDMDTIVSLAKHRGFVFPGSDIYGGLSNTWDYGPLGVELKNNVKKAWWQKFITQSPFNVGIDAAILMNPKVWEASGHLNNFNDPMIDNKDSKIRYRADKLIEDYMQDVKGDENFIADGLSFEQMKKIIDDEGIVCPVSKTANWTEIRQFNLMFKTFQGVTEDSTNEIFLRPETAQGIFVNYKNVQRSMRKKLPFGIGQIGKSFRNEITPGNFIFRTREFEQMELEFFCKPGEEIEWQNYWKTFASDWLTSLNMSSENMRLRDHDEDELSHYSNATTDIEYKFPFGWGELWGIASRTDFDLRKHAEHSGEDFRYHDPETNEKYIPYCIEPSLGADRVTLAFLCDAYDEEGVEGSKDARTVLHFHPALAPYKAAILPLSKKLSGEAIKIFEQLSSKFSIDFDESQSIGKRYRRQDEIGTPYCVTFDFDSLEDNQVTVRDRDSMEQVRMPISELEAFLTEKTKF

SEQ ID NO: 44092 - protein, 86 aa, Staphylococcus aureus
MENFDKTMKFDYEELPTQDVRDVLNNVYRTLDERGYNAVNQIVGYLLSGDPAYIPRQNEARNQIRHIDRDVIMEELVSYYLKEQNK

SEQ ID NO: 44093 - protein, 452 aa, Staphylococcus aureus
MINVTLKQIQSWIPCEIEDQFLNQEINGVTIDSRAISKNMLFIPFKGENVDGHRFVSKALQDGAGAAFYQRGTPIDENVSGPIIWVEDTLTALQQLAQAYLRHVNPKVIAVTGSNGKTTTKDMIESVLHTEFKVKKTQGNYNNEIGLPLTILELDNDTEISILEMGMSGFHEIEFLSNLAQPDIAVITNIGESHMQDLGSREGIAKAKSEITIGLKDNGTFIYDGDEPLLKPHVKEVENAKCISIGVATDNALVCSVDDRDTTGISFTINNKEHYDLPILGKHNMKNATIAIAVGHELGLTYNTIYQNLKNVSLTGMRMEQHTLENDITVINDAYNASPTSMRAAIDTLGTLTGRRILILGDVLELGENSKEMHIGVGNYLEEKHIDVLYTFGNEAKYIYDSGQQHVEKAQHFNSKDDMIEVLTSDLKAHDRVLVKGSRGMKLEEVVNALIS

SEQ ID NO: 44094 - protein, 431 aa, Staphylococcus aureus
MQLNSNGWHVDDHIVVAVSTGIDSMCLLYQLLNDYKDSYRKLTCLHVNHGVRSASIEEARFLEAYCERHHIDLHIKKLDLSHSLDRNNSIQNEARIKRYEWFDEMMNVLEADVLLTAHHLDDQLETIMYRIFNGKSTRNKLGFDELSKRKGYQIYRPLLAVSKKEIKQFQERYHIPYFEDESNKDNKYIRNDIRNRIIPAIDENNQLKVSHLLKLKQWHDEQYDILQYSAKQFIQEFVKFDEQSKYLEVSRQAFNNLPNSLKMVVLDCLLSKYYELFNISAKTYEEWFKQFSSKKAQFSINLTDKWIIQIAYGKLIIMAKNNGDTYFRVQTIKKPGNYFFNKYRLEIHSNLPKCLFPLTVRTRQSGDTFKLNGRDGYKKVNRLFIDCKVPQWVRDQMPIVLDKQQRIIAVGDLYQQQTIKKWIIISKNGDE

SEQ ID NO: 44095 - protein, 312 aa, Staphylococcus aureus
MALFLQPVFKDRIWGGHALKAFNYDIPNETTGECWAISAHPNGPNTIINGPYKDMTLDQLWSQHRELFDNDSRDSFPLLTKVLDANDKLSVQVHPDDDYALKHEGELGKTECWYILDAAPGAEIIYGVHAHNKQTLIDMIDNHEFDSLFKRIPVKPGDFYYVPAGTVHAIGSGILILETQQSSDTTYRIYDYDRRDQNGQLRDLHLEQSKDVIELGNHEPNTTPITTHIDTHTVTQFVDNQYFAVYKWDIHGDLKFNKPHAYCLVTIIDGTGTLTVNDKHYDIQKGSSFILTTEDEDIHFVGNISAIVSHPG

SEQ ID NO: 44096 - protein, 650 aa, Staphylococcus aureus
MKIVAITSCPNGIAHTYMAQEKLEQVAKEMGVDIKVETQGGVGAENVLTTQDIEEADGVIIAADKQVDLSRFVGKRLINENVREGIHNPRGLIQRIINQDAPIYQSETNYHSKDRGKSKSGIQMVYQHLMNGVSFMVPFIVVGGLLIAIALTLGGETTSKGLVIPDDSFWKSIENIGSLAFKFMVPILAGYIAVSIADKPGLVPGMIGGAIAADGSFYGSDAGAGFLGGIVAGFLAGYIAKWIKDIKVPKAMAPIMPIIIIPIISSVVVGLIFIFLIGAPISNIFEALTTWLKSMQGANIIILAMIIGAMIAFDMGGPVNKVAFLFGSALIAEGNYAVMGMVAVAVCTPPIGLGLATFVQKYKFNHSEREMGKASFTMGLFGITEGAIPFAAQDPLRIIPANIIGAMIASVIAAIGGVGDRVAHGGPIVAVLGGIDHVLWFIFAVIVGSLVTMTTVLLLKRNTPVIAVDAPAQHTQLHDTDITQHDTEVDNVDKTAKHSHLNKPSHVFDQQTMIITDHDMSRNEAIDMLIHKLKICRYVEHTSHLKNAILEREMESTTAIGMNVAIPHAKSDVVKQPIVAVMKNNHGVKWDSLDGSLPQLIFLIAVPNNSQDTHLKILQRLSKALMNDETRQSLINANSTTEIYNLLMKI

SEQ ID NO: 44097 - protein, 796 aa, Staphylococcus aureus
MKHKLDVTINELRLKSIRKIVKRINTWSDEVKSYSDDALKQKTIEFKERLASGVDTLDTLLPEAYAVAREASWRVLGMYPKEVQLIGAIVLHEGNIAEMQTGEGKTLTATMPLYLNALSGKGTYLITTNDYLAKRDFEEMQPLYEWLGLTASLGFVDIVDYEYQKGEKRNIYEHDIIYTTNGRLGFDYLIDNLADSAEGKFLPQLNYGIIDEVDSIILDAAQTPLVISGAPRLQSNLFHIVKEFVDTLIEDVHFKMKKTKKEIWLLNQGIEAAQSYFNVEDLYSEQAMVLVRNINLALRAQYLFESNVDYFVYNGDIVLIDRITGRMLPGTKLQAGLHQAIEAKEGMEVSTDKSVMATITFQNLFKLFESFSGMTATGKLGESEFFDLYSKIVVQAPTDKAIQRIDEPDKVFRSVDEKNIAMIHDIVELHETGRPVLLITRTAEAAEYFSKVLFQMDIPNNLLIAQNVAKEAQMIAEAGQIGSMTVATSMAGRGTDIKLGEGVEALGGLAVIIHEHMENSRVDRQLRGRSGRQGDPGSSCIYISLDDYLVKRWSDSNLAENNQLYSLDAQRLSQSNLFNRKVKQIVVKAQRISEEQGVKAREMANEFEKSISIQRDLVYEERNRVLEIDDAENRDFKALAKDVFEMFVNEEKVLTKSRVVEYIYQNLSFQFNKDVACVNFKDKQAVVTFLLEQFEKQLALNRKNMQSAYYYNIFVQKVFLKAIDSCWLEQVDYLQQLKASVNQRQNGQRNAIFEYHRVALDSFEVMTRNIKKRMVKNICQSMITFDKEGMPVIHFP

SEQ ID NO: 44098 - protein, 591 aa, Staphylococcus aureus
MYYSYGNYEAFARPKKPENVENKSAYLIGSGLASLAAACFLIRDGQMEGSKIHILEELPKAGGSLDGENMPLKGYVVRGGREMENHFECLWDLFRSIPSLEIDNASVLDEFYWLNKEDPNYSRCRVIEKQGQRLVTDGDFTLTKTAIKEILDLCLTNEEDLDDVKITDVFSDDFFNSNFWIYWKTMFAFEPWHSAMEMRRYLMRFVHHIGGLADFSALKFTKYNQYESLVLPMVEYLKSHGVQFEYDVKVEDIKVDVTTSQKIAREILIHRHGKAESIKLTVDDLVFVTNGSITESSTYGDNDTPAPPTDELGGSWTLWKNLARQSPEFGNPDKFCQNIPKKSWFVSATSTTNNKEIIDTIESICKRDPLAGKTVTGGIITINDSAWQMSFTINRQQQFKDQPENEISTWIYALYSDVNGDYIKKPITECSGNEICQEWLYHLGVSTDKIEDLAKHVSNTIPVYMPYITSYFMTRAIGDRPLVVPHQSQNLSFIGNFAETERDTVFTTEYSVRTAMEAVYQLLNIDRGIPEVINSTFDLRVLMDAVYELNDHQDLREITKDSKMQKLALAGFLKKIKGTYIETLLKEHKLL

SEQ ID NO: 44099 - protein, 924 aa, Staphylococcus aureus
MTNERKEVSEAPVNFGANLGLMLDLYDDFLQDPSSVPEDLQVLFSTIKNDDSIVPALKSTSSQNSDGTIKRVMRLIDNIRQYGHLKADIYPVNPPKRKHVPKLEIEDFDLDQQTLEGISAGIVSDHFADIYDNAYEAILRMEKRYKGPIAFEYTHINNNTERGWLKRRIETPYKVTLNNNEKRALFKQLAYVEGFEKYLHKNFVGAKRFSIEGVDALVPMLQRTITIAAKEGIKNIQIGMAHRGRLNVLTHVLEKPYEMMISEFMHTDPMKFLPEDGSLQLTAGWTGDVKYHLGGIKTTDSYGTMQRIALANNPSHLEIVAPVVEGRTRAAQDDTQRAGAPTTDHHKAMPIIIHGDAAYPGQGINFETMNLGNLKGYSTGGSLHIITNNRIGFTTEPIDARSTTYSTDVAKGYDVPIFHVNADDVEATIEAIDIAMEFRKEFHKDVVIDLVGYRRFGHNEMDEPSITNPVPYQNIRKHDSVEYVFGKKLVNEGVISEDEMHSFIEQVQKELRQAHDKINKADKMDNPDMEKPAELALPLQADEQSFTFDHLKEINDALLTYPDGFNILKKLNKVLEKRHEPFNKEDGLVDWAQAEQLAFATILQDGTPIRLTGQDSERGTFSHRHAVLHDEQTGETYTPLHHVPDQKATFDIHNSPLSEAAVVGFEYGYNVENKKSFNIWEAQYGDFANMSQMIFDNFLFSSRSKWGERSGLTLFLPHAYEGQGPEHSSARLERFLQLAAENNCTVVNLSSSSNYFHLLRAQAASLDSEQMRPLVVMSPKSLLRNKTVAKPIDEFTSGGFEPILTESYQADKVTKVILATGKMFIDLKEALAKNPDESVLLVAIERLYPFPEEEIEALLAQLPNLEEVSWVQEEPKNQGAWLYVYPYVKVLVADKYDLSYHGRIQRLLQLKAMEKFINLFKIKL

SEQ ID NO: 44100 - protein, 517 aa, Staphylococcus aureus
MKYFIPAWYDDQRWWQDTTVPYYQLQNKTEFDDMISLMGMHLENDLDYQLIVLNHAPNLRTFLHRYDLYETKYSSVFDEIQGFSHHAPQAINYHHLKWPDDVEFVYTPYLLKCVTSEQTYTNIYFSQEGYSIWFEEFERDQLQRRYIFDDRGYLSAIRYFDDQGEASYQQYLTINGDCVLHEDLKNGRVTVSKRYQHHYQQTEYNNMAQLIEEKFQAMIAQQIHEDDHVIVASDARHNRQIANHIPAKLLSYSFFKNRNETVSDEEYQSIVKNAHLIVDSVQLERDLISHQEKYQRENTMIRITPFETRQSPNISSQLMETFIGVWIDGMSDADLQQMMQRLVDYIAQEDYYRLILLSRHQNDIPMWLRECITSVNEEYQAKQNADVNVSALMTPEDQDDIIAVKTIHAEHDVVEALRTLRLVIDMSKEPDLYLQISAISAGIPQINGQQTDYVSDYDNGRIINTVDELDDALNYYLFYLKNWNYAYAYSLKLIDAYASKNIINQLDELIEGENDAT

SEQ ID NO: 44101 - protein, 522 aa, Staphylococcus aureus
MPRKFRVLQIGGDDLEPIFQHKKGVSWDYFDIGLFEFDSGYVEAIEAIVEAEGRFDFIYIQAPYSETLTNLLQMISEPYNTYVDESFWSVEYEQDENVQKYVVQPLHYRNIEERNNKLEAVSFSGQYGDKVSPKLALVHPNFKVDVVYQGNSELTLSGEFGKEFKPIASWQNNLVYDKDKVIQIWPEFDIDGAVELQYTFRLIQTGADGALIEQIILTDDMLDSPLEIPAKPFDAYISVTVKARGNGTVHLGPIHKRWSRLDMGQFLLGGSRFVDSQRQEFIYYFHPGDMKPPLNVYFSGYRTAEGFEGYYMMKRMNAPFLLIGDPRVEGGSFYIGSSEYEQGIINVIDETLEKLNFKSHELILSGLSMGSFGALYYGAQLNPQAIIVGKPLVNIGTIAEHMRLLRPEEFGTALDVLVSNEGDTSQASIKALNQKFWQTFQKKSLSQTVFAIAYMQHDDYDPHAFQELLPVLTAHQARVMNRSIPGRHNDDSPTIASWFVNFYNIILEDKFGRVQHAEKQNI

SEQ ID NO: 44102 - protein, 38 aa, Staphylococcus aureus
MKNWNYAYAYSLKLIDAYASKNIINQLDELIEGENDAT

SEQ ID NO: 44103 - protein, 469 aa, Staphylococcus aureus
MWKEKVQQYEDQIINDLKGLLAIESVRDDAKASEDAPVGPGPRKALDYMYEIAHRDGFTTHDVDHIAGRIEAGKGNDVLGILCHVDVVPAGDGWDSNPFEPVVTEDAIIARGTLDDKGPTIAAYYAIKILEDMNVDWKKRIHMIIGTDEESDWKCTDRYFKTEEMPTLGFAPDAEFPCIHGEKGITTFDLVQNKLTEDQDEPDYELITFKSGERYNMVPDHAEARVLVKENMTDVIQDFEYFLEQNHLQGDSTVDSGILVLTVEGKAVHGMDPSIGVNAGLYLLKFLASLNLDNNAQAFVAFSNRYLFNSDFGEKMGMKFHTDVMGDVTTNIGVITYDNENAGLFGINLRYPEGFEFEKAMDRFANEIQQYGFEVKLGKVQPPHYVDKNDPFVQKLVTAYRNQTNDMTEPYTIGGGTYARNLDKGVAFGAMFSDSEDLMHQKNEYITKKQLFNATSIYLEAIYSLCVEE

SEQ ID NO: 44104 - protein, 314 aa, Staphylococcus aureus
MSFASEMKNELTRIDVDEMNAKAELSALIRMNGALSLSNQQFVINVQTENATTARRIYSLIKRVFNVEVEILVRKKMKLKKNNIYICRTKMKAKEILDELGILKDGIFTHEIDHSMIQDDEMRRSYLRGAFLAGGSVNNPETSSYHLEIFSQNESHAEGLTKLMNSYELNAKHLERKKGSITYLKEAEKISDFLSLIGGYQALLKFEDVRIVRDMRNSVNRLVNCETANLNKTVSAAMKQVESIKLIDKEIGIENLPDRLREIARIRVEHQEISLKELGEMVSTGPISKSGVNHRLRKLNDLADKIRNGEQIEL

SEQ ID NO: 44105 - protein, 304 aa, Staphylococcus aureus
MYKINIIRSDSVYKNILKAPINDRDSIFTKEILVPFKKKFEVQHMPIYNDDKQTMSAIQFLDAFQISPKDLRMSDQMSIQYLNNDFWSNCEKYLKVAIDQFSNYSISSQVSNYHFTVLLGDSQKPLMYLNKNRGGDGGIPGYIMIYLVPSTSTINSMKSLIAHEVNHNMRYQYIDWDGGSLIELIIAEGLAENYVESLYGKAHIGPWVTNTNWSRDNVKIKNTIYNHLHLKHIFESMPYLYGDDINKLQGRPIVGLSHAAGYACGYHLVKYFLQKTNIPIEVATTLPAQKIINEVTEFWHTHTL

SEQ ID NO: 44106 - protein, 246 aa, Staphylococcus aureus
MAYTYTLKDIIEITGVTKRTLHYYDEIGLLVPDKNDKNYRVYKQQDLEKLQKILILKSFDFDIAKIKQYISYDNEQLRKLLSEQISKLDKKISDLQLIRRSVCEFIKGLSLIDTSILNKTLQSQYDKEASIKYGHTKAYQSFIRRKDSLQSQDIRHKLTTIFNKFNHMSLSHYPIQDCSDLVFEWKAFMNTIADFDDETLCCIAKTYEDDTRFKDYFNSYDNQNLASYISEAVNYFLSNVNKSDNF

SEQ ID NO: 44107 - protein, 68 aa, Staphylococcus aureus
MPYLYGDDINKLQGRPIVGLSHAAGYACGYHLVKYFLQKTNIPIEVATTLPAQKIINEVTEFWHTHTL

SEQ ID NO: 44108 - protein, 206 aa, Staphylococcus aureus
MKKWTNRLMTIAGVVLILVAAYLFAKPHIDNYLHDKDKDEKIEQYDKNVKEQASKDNKQQAKPQIPKDKSKVAGYIEIPDADIKEPVYPGPATPEQLNRGVSFAEENESLDDQNISIAGHTFIDRPNYQFTNLKAAKKGSMVYFKVGNETRKYKMTSIRDVKPTDVEVLDEQKGKDKQLTLITCDDYNEKTGVWEKRKIFVATEVK

SEQ ID NO: 44109 - protein, 451 aa, Staphylococcus aureus
MGKYFGTDGVRGVANQELTPELAFKLGRYGGYVLAHNKGEKHPRVLVGRDTRVSGEMLESALIAGLISIGAEVMRLGIISTPGVAYLTRDMGAELGVMISASHNPVADNGIKFFGSDGFKLSDEQENEIEALLDQENPELPRPVGNDIVHYSDYFEGAQKYLSYLKSTVDVNFEGLKIVLDGANGSTSSLAPFLFGDLEADTETIGCSPDGYNINEKCGSTHPEKLAEKVVETESDFGLAFDGDGDRIIAVDENGQIVDGDQIMFIIGQEMHKNQELNNDMIVSTVMSNLGFYKALEQEGIKSNKTKVGDRYVVEEMRRGNYNLGGEQSGHIVMMDYNTTGDGLLTGIQLASVIKMTGKSLSELAGQMKKYPQSLINVRVTDKYRVEENVDVKEVMTKVEVEMNGEGRILVRPSGTEPLVRVMVEAATDEDAERFAQQIADVVQDKMGLDK

SEQ ID NO: 44110 - protein, 391 aa, Staphylococcus aureus
MTEEFNESMINDIKEGDKVTGEVQQVEDKQVVVHINGGKFNGIIPISQLSTHHIDSPSEVVKEGDEVEAYVTKVEFDEENETGAYILSRRQLETEKSYSYLQEKLDNNEIIEAKVTEVVKGGLVVDVGQRGFVPASLISTDFIEDFSVFDGQTIRIKVEELDPENNRVILSRKAVEQEENDAKKDQLLQSLNEGDVIHGKVARLTQFGAFIDIGGVDGLVHVSELSHEHVQTPEEVVSIGQDVKVKIKSIDRDTERISLSIKDTLPTPFENIKGQFHENDVIEGVVVRLANFGAFVEIAPGVQGLVHISEIAHKHIGTPGEVLEPGQQVNVKILGIDEENERVSLSIKATLPNEDVVESDPSTTKAYLENEEEDNPTIGDMIGDKLKNLKL

SEQ ID NO: 44111 - protein, 132 aa, Staphylococcus aureus
MTMTDPIADMLTRVRNANMVRHEKLELPASNIKKEIAEILKSEGFIKNVEYVEDDKQGVLRLFLKYGQNDERVITGLKRISKPGLRVYAKASEMPKVLNGLGIALVSTSEGVITDKEARKRNVGGEIIAYVW

SEQ ID NO: 44112 - protein, 291 aa, Staphylococcus aureus
MKKIEAWLSKKGLKNKRTLIVVIAFVLFIIFLFLLLNSNSEDSGNITITENAELRTGPNAAYPVIYKVEKGDHFKKIGKVGKWIEVEDTSSNEKGWIAGWHTNLDIVADNTKEKNPLQGKTIVLDPGHGGSDQGASSNTKYKSLEKDYTLKTAKELQRTLEKEGATVKMTRTDDTYVSLENRDIKGDAYLSIHNDALESSNANGMTVYWYHDNQRALADTLDATIQKKGLLSNRGSRQENYQVLRQTKVPAVLLELGYISNPTDETMIKDQLHRQILEQAIVDGLKIYFSA

SEQ ID NO: 44113 - protein, 260 aa, Staphylococcus aureus
MKVRTLTAIIALIVFLPILLKGGLVLMIFANILALIALKELLNMNMIKFVSVPGLISAVGLIIIMLPQHAGPWVQVIQLKSLIAMSFIVLSYTVLSKNRFSFMDAAFCLMSVAYVGIGFMFFYETRSEGLHYILYAFLIVWLTDTGAYLFGKMMGKHKLWPVISPNKTIEGFIGGLFCSLIVPLAMLYFVDFNMNVWILLGVTLILSLFGQLGDLVESGFKRHFGVKDSGRILPGHGGILDRFDSFMFVLPLLNILLIQS

SEQ ID NO: 44114 - protein, 292 aa, Staphylococcus aureus
MSQDVNELSKQPTPDKAEDNAFFPSPYSLSQYTAPKTDFDGVEHKGAYKDGKWKVLMIAAEERYVLLENGKMFSTGNHPVEMLLPLHHLMEAGFDVDVATLSGYPVKLELWAMPTEDEAVISTYNKLKEKLKQPKKLADVIKNELGPDSDYLSVFIPGGHAAVVGISESEDVQQTLDWALDNDRFIVTLCHGPAALLSAGLNREKSPLEGYSVCVFPDSLDEGANIEIGYLPGRLKWLVADLLTKQGLKVVNDDMTGRTLKDRKLLTGDSPLASNELGKLAVNEMLNAIQNK

SEQ ID NO: 44115 - protein, 117 aa, Staphylococcus aureus
MEAKAVARTIRIAPRKVRLVLDLIRGKNAAEAIAILKLTNKASSPVIEKVLMSALANAEHNYDMNTDELVVKEAYANEGPTLKRFRPRAQGRASAINKRTSHITIVVSDGKEEAKEA

SEQ ID NO: 44116 - protein, 46 aa, Staphylococcus aureus
MNGQENLYRIAIQYYGSGSPENVEKIRRANGLSGNNIRNGQQIVIP

SEQ ID NO: 44117 - protein, 569 aa, Staphylococcus aureus
MSNKNKSYDYVIIGGGSAGSVLGNRLSEDKDKEVLVLEAGRSDYFWDLFIQMPAALMFPSGNKFYDWIYSTDEEPHMGGRKVAHARGKVLGGSSSINGMIYQRGNPMDYEGWAEPEGMETWDFAHCLPYFKKLEKTYGAAPYDKFRGHDGPIKLKRGPATNPLFQSFFDAGVEAGYHKTPDVNGFRQEGFGPFDSQVHRGRRMSASRAYLHPAMKRKNLTVETRAFVTEIHYEGRRATGVTYKKNGKLHTIDANEVILSGGAFNTPQLLQLSGIGDSEFLKSKGIEPRVHLPGVGENFEDHLEVYIQHKCKEPVSLQPSLDIKRMPFIGLQWIFTRTGAAASNHFEGGGFVRSNNEVDYPNLMFHFLPIAVRYDGQKAAVAHGYQVHVGPMYSNSRGSLKIKSKDPFEKPSIRFNYLSTEEDKKEWVEAIRVARNILSQKAMDPFNGGEISPGPEVQTDEEILDWVRRDGETALHPSCSAKMGPASDPMAVVDPLTMKVHGMENLRVVDASAMPRTTNGNIHAPVLMLAEKAADIIRGRKPLEPQYIDYYKHGVHDENEGAIEVKPYAK

SEQ ID NO: 44118 - protein, 802 aa, Staphylococcus aureus
MANTKKTTLDITGMTCAACSNRIEKKLNKLDDVNAQVNLTTEKATVEYNPDQHDVQEFINTIQHLGYGVTVETVELDITGMTCAACSSRIEKVLNKMNGVQNATVNLTTEQAKVDYYPEETDADKLVTRIQKLGYDASIKDNNKDQTSRKAEALQHKLIKLIISAVLSLPLLMLMFVHLFNMHIPALFTNPWFQFILATPVQFIIGWQFYVGAYKNLRNGGANMDVLVAVGTSAAYFYSIYEMVRWLNGSTTQPHLYFETSAVLLTLILFGKYLEARAKSQTTNALGELLSLQAKEARILKDGNEVMIPLNEVHVGDTLIVKPGEKIPVDGKIIKGMTAIDESMLTGESIPVEKNVDDTVIGSTMNKNGTITMTATKVGGDTALANIIKVVEEAQSSKAPIQRLADIISGYFVPIVVGIALLIFIVWITLVTPGTFEPALVASISVLVIACPCALGLATPTSIMVGTGRAAENGILFKGGEFVERTHQIDTIVLDKTGTITNGRPVVTDYHGDNQTLQLLATAEKDSEHPLAEAIVNYAKEKQLTLTETTTFKAVPGHGIEATIDHHHILVGNRKLMADNDISLPKHISDDLTHYERDGKTAMLIAVNYSLTGIIAVADTVKDHAKDAIKQLHDMGIEVAMLTGDNKNTAQAIAKQVGIDTVIADILPEEKAAQIAKLQQQGKKVAMVGDGVNDAPALVKADIGIAIGTGTEVAIEAADITILGGDLMLIPKAIYASKATIRNIRQNLFWAFGYNIAGIPIAALGLLAPWVAGAAMALSSVSVVTNALRLKKMRLEPRRKDA

SEQ ID NO: 44119 - protein, 326 aa, Staphylococcus aureus
MSKSNQKIASIEQLSNNEGIISALAFDQRGALKRMMAKHQTEEPTVAQIEQLKVLVAEELTQYASSILLDPEYGLPASDARNKDCGLLLAYEKTGYDVNAKGRLPDCLVEWSAKRLKEQGANAVKFLLYYDVDDAEEINIQKKAYIERIGSECVAEDIPFFLEVLTYDDNIPDNGSVEFAKVKPRKVNEAMKLFSEPRFNVDVLKVEVPVNMKYVEGFAEGEVVYTKEEAAQHFKDQDAATHLPYIYLSAGVSAELFQETLKFAHEAGAKFNGVLCGRATWSGAVQVYIEQGEDAAREWLRTTGFKNIDDLNKVLKDTATSWKQRK

SEQ ID NO: 44120 - protein, 452 aa, Staphylococcus aureus
MNYTQQLKQKDSEYVWHPFTQMGVYSKEEAIIIEKGKGSYLYDTNGNKYLDGYASLWVNVHGHNNKYLNKVIKKQLNKIAHSTLLGSSNIPSIELAEKLIEITPSNLRKVFYSDTGSASVEIAIKMAYQYWKNIDREKYAKKNKFITLNHGYHGDTIGAVSVGGIKTFHKIFKDLIFENIQVESPSFYRSNYDTENEIMTAILTNIEQILIERNDEIAGFILEPLIQGATGLFVHPKGFLKEVEKLCKKYDVLLICDEVAVGFGRTGKMFACNHEDVQPDIMCLGKAITGGYLPLAATLTSQKIYNTFLSDSHGVNTFFHGHTYTGNQIVCTVALENIRLYEKRKLLSHIETTSSTLEKQLHALKRHRNVGDVRGRGLMFGVELVTDKDSKTPLEIEKVERIVRKCKENGLMIRNLENVITFVPVLSMSNKEVKTMVRIFKKAVHNILDRKC

SEQ ID NO: 44121 - protein, 59 aa, Staphylococcus aureus
MAKLQITLTRSVIGRPETQRKTVEALGLKKTNSSVVVEDNPAIRGQINKVKHLVTVEEK

SEQ ID NO: 44122 - protein, 38 aa, Staphylococcus aureus
MVLLKHHLKQKVSYLQHHSKKQQEFLQMQQLKVSVMTY

SEQ ID NO: 44123 - protein, 584 aa, Staphylococcus aureus
MLSLTMLLLERVGLIIILAYVLMNIPYFKNLMNRRRTWKARWQLCIIFSLFALMSNLTGIVIDHQHSLSGSVYFRLDDDVSLANTRVLTIGVAGLVGGPFVGLFVGVISGIFRVYMGGADAQVYLISSIFIGIIAGYFGLQAQRRKRYPSIAKSAMIGIVMEMIQMLSILTFSHDKAYAVDLISLIALPMIIVNSVGTAIFMSIIISTLKQEEQMKAVQTHDVLQLMNQTLPYFKEGLNRESAQQIAMIIKNLMKVSAVAITSKNEILSHVGAGSDHHIPTNEILTSLSKDVLKSGKLKEVHTKEEIGCSHPNCPLRAAIVIPLEMHGSIVGTLKMYFTNPNDLTFVERQLAEGLANIFSSQIELGEAETQSKLLKDAEIKSLQAQVSPHFFFNSINTISALVRINSEKARELLLELSYFFRANLQGSKQHTITLDKELSQVRAYLSLEQARYPGRFNININVEDKYRDVLVPPFLIQILVENAIKHAFTNRKQGNDIDVSVIKETATHVRIIVQDNGQGISKDKMHLLGETSVESESGTGSALENLNLRLKGLFGKSAALQFESTSSGTTFWCVLPYERQEEE

SEQ ID NO: 44124 - protein, 246 aa, Staphylococcus aureus
MKALIIDDEPLARNELTYLLNEIGGFEEINEAENVKETLEALLINQYDIIFLDVNLMDENGIELGAKIQKMKEPPAIIFATAHDQYAVQAFELNATDYILKPFGQKRIEQAVNKVRATKAKDDNNASAIANDMSANFDQSLPVEIDDKIHMLKQQNIIGIGTHNGITTIHTTNHKYETTEPLNRYEKRLNPTYFIRIHRSYIINTKHIKEVQQWFNYTYMVILTNGVKMQVGRSFMKDFKASIGLL

SEQ ID NO: 44125 - protein, 485 aa, Staphylococcus aureus
MTDIINKLQAFADANPQSIAVRHTTDELTYQQLMDESSKLAHRLQGSKKPMILFGHMSPYMIVGMIGAIKAGCGYVPVDTSIPEDRIKMIINKVQPEFVFNTTDESFESLEGEVFTIEDIKTSQDPVIFDSQIKDNDTVYTIFTSGSTGEPKGVQIEYASLVQFTEWMLELNKSGNKQQWLNQAPFSFDLSVMAIYPCLASGGTLNLVDKNMINKPKLLNEMLTATPINIWVSTPSFMEMCLLLPTLNEEQYGSLNEFFFCGEILPHRAAKALVSRFPSATIYNTYGPTEATVAVTSIQITQEILDQYPTLPVGVERLGARLSTTDDGELVIEGQSVSLGYLKNDQKTAEVFNFDDGIRTYHTGDKAKFENGQWFIQGRIDFQIKLNGYRMELEEIETQLRQSEFVKEAIVVPVYKNDKVIHLIGAIVPTTEVTDNAEMTKNIKNDLKSRLPEYMIPRKFEWMEQLPLTSNGKIDRKKIAEVING

SEQ ID NO: 44126 - protein, 50 aa, Staphylococcus aureus
MKSKSKQPPNKYVEAFKPYLLTLLYLAIFITLYLIYGSGDTHNNFIYNEF

SEQ ID NO: 44127 - protein, 144 aa, Staphylococcus aureus
MDRTKQSLNVFVGMNRALDTLEQITKEDVKRYGLNITEFAVLELLYNKGPQPIQRIRDRVLIASSSISYVVSQLEDKGWITREKDKDDKRVYMACLTEKGQSQMADIFPKHAETLTKAFDVLTKDELTILQQAFKKLSAQSTEV

SEQ ID NO: 44128 - protein, 435 aa, Staphylococcus aureus
MTQTVNVIGAGLAGSEAAYQLAERGIKVNLIEMRPVKQTPAHHTDKFAELVCSNSLRGNALTNGVGVLKEEMRRLNSIIIEAADKARVPAGGALAVDRHDFSGYITETLKNHENITVINEEINAIPDGYTIIATGPLTTETLAQEIVDITGKDQLYFYDAAAPIIEKESIDMDKVYLKSRYDKGEAAYLNCPMTEDEFNRFYDAVLEAEVAPVNSFEKEKYFEGCMPFEVMAERGRKTLLFGPMKPVGLEDPKTGKRPYAVVQLRQDDAAGTLYNIVGFQTHLKWGAQKEVIKLIPGLENVDIVRYGVMHRNTFINSPDVLNEKYELISQPNIQFAGQMTGVEGYVESAASGLVAGINLAHKILGKGEVVFPRETMIGSMAYYISHAKNNKNFQPMNANFGLLPSLETRIKDKKERYEAQANRALDYLENFKKTL

SEQ ID NO: 44129 - protein, 525 aa, Staphylococcus aureus
MTFLTVMQFIVNIIVVGFLLTVIVIGLIWLIKDKRQSQHSVLRNYPLLARIRYISEKMGPELRQYLFSGDNEGKPFSRNDYKNIVLAGKYNSRMTSFGTTKDYQDGFYIQNTMFPMQRNEISVDNTTLLSTFIYKIANERLFSREEYRVPTKIDPYYLSDDHAIKLGEHLKHPFILKRIVGQSGMSYGALGKNAITALSKGLAKAGTWMNTGEGGLSEYHLKGNGDIIFQIGPGLFGVRDKEGNFSEGLFKEVAQLSNVRAFELKLAQGAKTRGGHMEAEKVNEEIAKIRNVEPYKTINSPNRYEFIHNAEDLIRFVDQLQQLGQKPVGFKIVVSKVSEIETLVRTMVELDKYPSFITIDGGEGGTGATFQELQDGVGLPLFTALPIVSGMLEKYGIRDKVKLAASGKLVTPDKIAIALGLGADFVNIARGMMISVGCIMSQQCHMNTCPVGVATTDAKKEKALIVGEKQYRVTNYVTSLHEGLFNIAAAVGVSSPTEITADHIVYRKVDGELQTIHDYKLKLIS

SEQ ID NO: 44130 - protein, 181 aa, Staphylococcus aureus
MTFLTVMQFIVNIIVVGFMLTVIVIGLIWLIKDKRQSQHSVLRNYPLLARIRYISEKMGPELRQYLFSGDNEGKPFSRNDYKNIVLAGKYNSRMTSFGTTKDYQDGFYIQNTMFPMQRNEISVDNTTLLSTFIYKIANERLFSREEYRVPTKIDPYYLSDDHAIKLGEHLKHPFVLKRIVG

SEQ ID NO: 44131 - protein, 401 aa, Staphylococcus aureus
MSEKKILILCQYFYPEYVSSATLPTQLAEDLIANHINVDVMCGWPYEYSNHKQVSKTEMHRGIRIRRLKYSRFNNKSKVGRIINFFSLFSKFVINIPKMLKYDQILVYSNPPILPLIPDVLHRLLKKKYSFVVYDIAPDNAIKTGATRPGSMIDKLMRYINRHVYKNAENVIVLGTEMKNYLLNHQISKNADNIHVIPNWYDMRQLQDNRIYNDTFKAYREQYDKILLYSGNMGQLQDMETLISFLKLNKDQPQTLTILCGHGKKFADVKTAIEDHRIENVKMFEFLTGTDYADVLKIADVCIASLIKEGVGLGVPSKNYGYLAAKKPLVLIMDKQSDIVQHVEQYDAGIQIDNGDAHAIYNFINTHSSKELHEMGERAHQLFKDKYTREINTMKYYNLLK

SEQ ID NO: 44132 - protein, 800 aa, Staphylococcus aureus
MSEIIQDLSLEDVLGDRFGRYSKYIIQERALPDVRDGLKPVQRRILYAMYSSGNTHDKNFRKSAKTVGDVIGQYHPHGDFSVYEAMVRLSQDWKLRHVLIEMHGNNGSIDNDPPAAMRYTEAKLSLLAEELLRDINKETVSFIPNYDDTTLEPMVLPSRFPNLLVNGSTGISAGYATDIPPHNLAEVIQATLKYIDNPDITVNQLMKYIKGPDFPTGGIIQGIDGIKKAYESGKGRIIVRSKVEEETLRNGRKQLIITEIPYEVNKSSLVKRIDELRADKKVDGIVEVRDETDRTGLRIAIELKKDVNSESIKNYLYKNSDLQISYNFNMVAISDGRPKLMGIRQIIDSYLNHQIEVVANRTKFELDNAEKRMHIVEGLIKALSILDKVIELIRSSKNKRDAKENLIEVFEFTEEQAEAIVMLQLYRLTNTDIVALEGEHKELEALIKQLRHILDNHDALLNVIKEELNEIKKKFKSERLSLIEAEIEEIKIDKEVMVPSEEVILSMTRHGYIKRTSIRSFNASGVEDIGLKDGDSLLKHQEVNTQDTVLVFTNKGRYLFIPVHKLADIRWKELGQHVSQIVPIEEDEVVINVFNEKDFNTDAFYVFATQNGMIKKSTVPLFKTTRFNKPLIATKVKENDDLISVMRFEKDQLITVITNKGMSLTYNTSELSDTGLRAAGVKSINLKAEDFVVMTEGVSENDTILMATQRGSLKRISFKILQVAKRAQRGITLLKELKKNPHRIVAAHVVTGEHSQYTLYSKSNEEHGLINDIHKSEQYTNGSFIVDTDDFGEVIDMYIS

SEQ ID NO: 44133 - protein, 319 aa, Staphylococcus aureus
MNRNIVKLVVFMLILVVAVAGCGQKDTEEKTEMTTIKDELGTEKIKKNPKRVVVLEYSFADYLAALDMKPVGIADDGSTKNITKSVRDKIGAYESVGSRPQPNMEVISKLKPDLIIADVSRHKKIKSELSKIAPTIMLVSGTGDYNANIEAFKTVAKAVGKEKEGEKRLEKHDKILAEIRKKIEQSTLKSAFAFGISRAGMFINNEDTFMGQFLIKMGIQPEVTKDKTTHVGERKGGPYIYLNNEELANINPKVMILATDGKTDKNRTKFIDPAVWKSLKAVKDNKVYDVDRNKWLKSRGIIASESMAEDLEKIAEKAK

SEQ ID NO: 44134 - protein, 308 aa, Staphylococcus aureus
MTSSTNVKALIEKNINKKGKHNDKIIPVILAAISAISILTTLGILITLLLETITFFTRIPITEFLFSTTWNPTGSDPKFGIWALIIGTLKITVIATIFAVPVGLGAAIYLSEYASDRARRIIKPILEILAGIPTIVFGFFALTYVTPVLRSFISGLGEFNAISPGLVVGIMIVPLITSLSEDAMASVPNKIREGAYGLGATKLEVATKVVLPAATSGIVASIVLAISRAIGETMIVSLAAGSSPTASLSLTSSIQTMTGYIVEIATGDATFGSNIYYSIYAVGFTLFIFTLIMNLLSQWISKRFREEY

SEQ ID NO: 44135 - protein, 578 aa, Staphylococcus aureus
MQNKELIQHAAYAAIERILNEYFREENLYQVPPQNHQWSIQLSELETLTGEFRYWSAMGHHMYHPEVWLIDGKSKKITTYKEAIARILQHMAQSADNQTAVQQHMAQIMSDIDNSIHRTARYLQSNTIDYVEDRYIVSEQSLYLGHPFHPTPKSASGFSEADLEKYAPECHTSFQLHYLAVHQDVLLTRYVEGKEDQVEKVLYQLADIDISEIPKDFILLPTHPYQINVLRQHPQYMQYSEQGLIKDLGVSGDLVYPTSSVRTVFSKALNIYLKLPIHVKITNFIRTNDLEQIERTIDAAQVIASVKDEVETPHFKLMFEEGYRALLPNPLGQTVEPEMDLLTNSAMIVREGIPNYHADKDIHVLASLFETMPDSPISKLAQVIEQSGLAPEAWLECYLDRTLLPILKLFSNTGISLEAHVQNTLIELKDGIPDVCFVRDLEGICLSRTIATEKQLVPNVVAASSPVVYAHDEAWHRLKYYVVVNHLGHLVSTIGKATRNEVVLWQLVAHRLMTWKKEYANNAVFVDCVEDLYQTPTIAAKANLMSKLNDCGANPIYTHIPNPICYNKEVSYCESNNS

SEQ ID NO: 44136 - protein, 359 aa, Staphylococcus aureus
MMTIKVGIIGCGGIANGKHMPSLQKVENVEMIAFCDVDISKAASAAEAYGTDNAKVYDDYKALLKDDTIDVIHVCTPNDSHCEITVAGLHAGKHVMCEKPMAKTTAEAQKMIDTAKSTGKKLTIGYQNRFRPDSQFLHQAAQRGDLGDIYFGKAHAIRRRAVPTWGVFLNEEAQGGGPLIDIGTHALDLTLWMMDNYEPESVMSSTFHKLNKQHDAANAWGSWNPDEFTVEDSAFGFIKMKNGATIILESAWAINSLEVDEAKCSLSGTKAGADMKDGLRIHGEDMGTLYTKHVELENKGVDFYEGNEVDEAEEEAKAWIDAVVNDTEPVVKPEQAMVVTKILEAIYQSAKSGKAIYFE

SEQ ID NO: 44137 - protein, 293 aa, Staphylococcus aureus
MATQDPRTKFKTTEYEKQEQEVPGLQSEMTPAPDCGETSYQGHQRLQGYKMLVTGGDSAIGRAAAIAYAKEGADVAINYLPSEEQDAQEVRQVIEESGQKAVLIPGDIRDEQFNYDLVEQAYQQLGGLDNVTLVAGHQQYHDDIHGFTTEAFTETFETNVYPLFWTVQKALEYLKPGASITTTSSVQGYNPSPILHDYAASKAAIISLTKSFSEELGPKGIRVNCVAPGPFWSPLQISGGQPQSKIPTFGQKTPLGRAGQPVELCGTYVLLASEESSYTTGQVFGVSGGVQID

SEQ ID NO: 44138 - protein, 484 aa, Staphylococcus aureus
MTKEQQLAERIIAAVGGMDNIDSVMNCMTRVRIKVLDENKVDDQELRHIDGVMGVIHDERIQVVVGPGTVNKVANHMAELSGVKLGDPIPHHHNDSEKMDYKSYAADKAKANKEAHKAKQKNGKLNKVLKSIANIFIPLIPAFIGAGLIGGIAAVLSNLMVAGYISGAWITQLITVFNVIKDGMLAYLAIFTGINAAKEFGATPGLGGVIGGTTLLTGIAGKNILMNVFTGEPLQPGQGGIIGVIFAVWILSIVEKRLHKIVPNAIDIIVTPTIALLIVGLLTIFIFMPLAGFVSDSLVSVVNGIISIGGVFSGFIIGASFLPLVMLGLHHIFTPIHIEMINQSGATYLLPIAAMAGAGQVGAALALWVRCKRNTTLRNTLKGALPVGFLGIGEPLIYGVTLPLGRPFLTACIGGGIGGAVIGGIGHIGAKAIGPSGVSLLPLISDNMYLGYIAGLLAAYAGGFVCTYLFGTTKAMRQTDLLGD

SEQ ID NO: 44139 - protein, 273 aa, Staphylococcus aureus
MKKLFGLILVLTFAVVLAACGNGNKSGSDDKKITVGASPAPHAEILEKAKPLLEKKGYDLDIKTINDYTTPNKLLDKGEIDANYFQHTPYLNTEKKDKGYKIVSAGDVHLEPMAVYSKKYKSLKELPKGATVYVSNNPAEQGRFLKFFVDAGLIKIKKGVKIEDAKFSDITENKKDIKFNNKQSAEFLPKIYQNEDADAVIINSNFAIEQKLNPKKDSIAVESAKDNPYANLIAVKEGHQDDKKIKALIEVLQSKDIQDFINEKYNGAVIPAK

SEQ ID NO: 44140 - protein, 454 aa, Staphylococcus aureus
MAKKKVIFECMACGYQSPKWMGKCPNCGAWNQMEEIVEKAANPKHGVKTKELAGKVQKLNSIKHETTPRVLTDSAEFNRVLGGGIVSGSLVLIGGDPGIGKSTLLLQICASLSQKKKVLYITGEESLSQTKLRAERLDEDSSELQVLAETDLEVIYQTVKEEQPDLLVVDSIQTIYHPEISSAPGSVSQVRESTQSLMNIAKQMNIATFIVGHVTKEGQIAGPRLLEHMVDTVLYFEGDEHHAYRILRAVKNRFGSTNEMGIFEMKQSGLKGVNNPSEMFLEERSTNVPGSTIVATMEGTRPLLIEVQALVTPTTFNNPRRMATGIDHNRLSLLMAVLEKKENYLLQQQDAYIKVAGGVKLTEPAVDLSVIVATASSFKDKAVDGLDCYIGEVGLTGEVRRVSRIEQRVQEAAKLGFKRVIIPKNNIGGWTYPEGIQVIGVTTVHEALSFALHS

SEQ ID NO: 44141 - protein, 414 aa, Staphylococcus aureus
MSQNKRVVITGMGALSPIGNDVKTTWENALKGVNGIDKITRIDTEPYSVHLAGELKNFNIEDHIDKKEARRMDRFTQYAIVAAREAVKDAQLDINDNTADRIGVWIGSGIGGMETFEIAHKQLMDKGPRRVSPFFVPMLIPDMATGQVSIDLGAKGPNGATVTACATGTNSIGEAFKIVQRGDADAMITGGTEAPITHMAIAGFSASRALSTNDDIETACRPFQEGRDGFVMGEGAGILVIESLESAQARGANIYAEIVGYGTTGDAYHITAPAPEGEGGSRAMQAAMDDAGIEPKDVQYLNAHGTSTPVGDLNEVKAIKNTFGEAAKHLKVSSTKSMTGHLLGATGGIEAIFSALSIKDSKVAPTIHAVTPDPECDLDIVPNEAQDLDITYAMSNSLGFGGHNAVLVFKKFEA

SEQ ID NO: 44142 - protein, 308 aa, Staphylococcus aureus
MRKLVVGSRRSKLALTQSQQFINKLKAVEPNLEIEIKEIVTKGDRIVDKQLSKVGGKGLFVKEIQHELFEKNIDMAIHSLKDVPSVIPEGLTLGCIPDRELPFDAYISKTHTPLSQLPEGSIIGTSSLRRGAQILSKYPNLEIKWIRGNIDTRLEKLQTEDYDAIILAAAGLRRMGWSDDIVTSYLDRDTLLPAIGQGALGIECRSDDEELLTLLSKVHNDEVAKCVTAERTFLAEMDGSCQVPIAGYATISDQKEIEFTGLIMTPDGKERFEYTMNGTDPVELGKTVSNKLKEQGAYEIIKRLNEQH

SEQ ID NO: 44143 - protein, 271 aa, Staphylococcus aureus
MQENLFIRFNEIILLIYLISIICYFYDFVQKSHKIRSLGIYLLGIVWVLQTISLSIFIIQTRHIPLGSISDVFYTLSWLIISISLILNLIKVLNFSVFFLNLIGLTLLGMNTFQPTHYTNKVQKIAVVDELLLVHIGLAVLSYVFFALAFVNALLYIMQYRNLKEKRFDQKYFRIGSVATLESIVFYSTLSGWIILIFSIILGTQWGVISVGERIFIDPKVILSSIITVLYGSYILLRINKWLNSRYLIYYNIILFCLNMINLFFATHFVN

SEQ ID NO: 44144 - protein, 330 aa, Staphylococcus aureus
MCTGFTIQTLNNQVLLGRTMDYDYPLDGSPAVTPRNYRWTSRTGTTGQTQYGFIGTGTDMEGFIYGDGVNEHGVAISTQYFRGYSSYGSTHKADAMNITQNEIVTWILGYTTSIEDMKQQASQIHVVAVYLNDIGEVPPLHYHVSDATGHSVEVSFKEGEVVIKDNPIGVLTNHPDLDWHYSNLRQYINISPYPATAKLLEGVTIEPLGNEAGTFGLPGGFTSTERFVRMAFMKANIAQNNDKEMDLMNAFYLLDAVNIPIGIVRPHDADNHYTMYQTVINLTTRTLYIKYYGSNEIVALKLTDDLINRKDMTIFKPEKHITIRKLNDNQ

SEQ ID NO: 44145 - protein, 178 aa, Staphylococcus aureus
MKINEFIVVEGRDDTERVKRAVECDTIETNGSAINEQTLEVIRNAQQSRGVIVLTDPDFPGDKIRSTITEHVKGVKHAYIDREKAKNKKGKIGVEHADLIDIKEALMHVSSPFDEAYESIDKSVLIELGLIVGKDARRRREILSRKLRIGHSNGKQLLKKLNAFGYTEADVRQALEDE

SEQ ID NO: 44146 - protein, 296 aa, Staphylococcus aureus
MKMLDNKDIATPSRTRALLDKYGFNFKKSLGQNFLIDVNIINNIIDASDIDAQTGVIEIGPGMGSLTEQLARHAKRVLAFEIDQRLIPVLNDTLSPYDNVTVINEDILKANIKEAVENHLQDCEKIMVVANLPYYITTPILLNLMQQDIPIDGYVVMMQKEVGERLNAEVGSKAYGSLSIVVQYYTETSKVLTVPKSVFMPPPNVDSIVVKLMQRTEPLVTVDNEEAFFKLAKAAFAQRRKTINNNYQNYFKDGKQHKEVILQWLEQAGIDPRRRGETLSIQDFAKLYEEKKNSLN

SEQ ID NO: 44147 - protein, 142 aa, Staphylococcus aureus
MAIIIGSDEAGKRLKEVIKSYLLDNKYDVVDVTEGQEVDFVDATLAVAKDVQSQEGNLGIVIDAFGAGSFMVATKIKGMIAAEVSDERSGYMTRGHNNSRMITMGSEIVGDTLAKNVVKGFVEGKYDGGRHQIRVDMLNKMC

SEQ ID NO: 44148 - protein, 171 aa, Staphylococcus aureus
MKIALGCDHIVTDTKMRVSEFLKSKGHEVIDVGTYDFTRTHYPIFGKKVGEQVVSGNADLGVCICGTGVGINNAVNKVPGVRSALVRDMTSALYAKEELNANVIGFGGRIIGELLMCDIIDAFINAEYKATEENKKLIAKIKHLETSNADQADPHFFDEFLEKWDRGEYHD

SEQ ID NO: 44149 - protein, 91 aa, Staphylococcus aureus
MSTVQSDIFKTNSASSSIKSAVETCNNVSKPDKDESTTVSGNNNAHSVIDDLISKNQSVAEAIRNASDSIQKVGEEFNQTDVMIGNEIGKN

SEQ ID NO: 44150 - protein, 398 aa, Staphylococcus aureus
MVKFIHCSDLHLDSPFKSKSHISPKIFEDVQKSAYESFKNIVDIALQQDVDFVIIAGDLFDSENRTLRAEIFLKQQFERLQNEQIFVYVCHGNHDPLSSKISSNWPDNVSVFSNKVETYEAITKSGETIYIHGFSYENRASYENKIDEYPSSQGQKGIHIGVLHGTYSKSSVNERYTEFILEDLNSKLYHYWALGHIHERQQLSDMPVINYSGNIQGRHFNEQGEKGCLLIEGDHLKLKTKFYPTQYIRFEEATIETDKTSKQGLYEVIQNFKEQVREEGKAFYRLTLVINSETLISPQDLLQVEEMITDYEENENQFVYIDELKIQYAQNDESPLVNEFSAELLVDQTVFDKAMSDLYLNPRASKFLDDYGTFDHTALVNRAEEILKAEMRGEQNDN

SEQ ID NO: 44151 - protein, 978 aa, Staphylococcus aureus
MIIKSLEIYGYGQFVQRKIEFNKNFTEIFGENEAGKSTIQAFIHSILFGFPTKKSKEPRLEPRLGNQYGGKLVLILDDGLEIEVERIKGSAQGDVKVYLPNGAVRDDAWLQKKLNYISKKTYQGIFSFDVLGLQDIHRNLNEKQLQDYLLQAGALGSTEFTSMREVINRKKDELYKKSGKNPIINQQIEQLKQLESQIREEEAKLETYHRLVDDRDKSSRRLENLKHNLNQLSKMHEEKQKEVALHDHSQEWKSLEQQLNIEPITFPEKGVDRYEKARAHKQSLERDIGLRNERLAQLKEEATQLEPVKQSDIDAFISLNQQENEIKNKEFELTAIEKDIANKQRDKDELQANIGWSETHHDVDSSEAMKSYVSEQIKNKQEQAAYIKQLERSLEENKIEDNAVHSELDSVEEKIVPEETFEKKKEYSQQVIELNEKENLYSKLKERFEIEQQEKQKRQKLLRTTFILLTLVGIGLTAFSFISNNMLFGIIFAVLTLVFVIGIIMSKSKEVDYSEAITDEIEEIKAQLAILDENYDLDFDLDEQYRIRDHWQQALKNKDILEEKRQYIEGRLNDAKGRHDELQSTVENVKDELYLSSKISNDLIVDSISTMANIKALDQHISDLNQQRQQLVQELDTFYNHAEAVTKSQFVYFNKLSLFHDVQQWLKSAEDTNEKWRINAENTKLVTNELNHLNAQLEENNKEITALFDFINVGTEEDFYQHHEDYQTYTSNLSRFNDLTKYLENQNYSYELSSSLSEKTTAQLEEEDHLLATQVDEYNEQYLEMQAQVSDLSAQINHMETDTTLANLRHEYHSLKNQLNDIAKDWASLSYLQSLVDEHIKQIKDKRLPQVINEAVEILKHLTDGRYTMINYNEDSITVKHVNGQLYDPVELSQSTKELLYVALRISLIKVLRPYYPFPLIVDDAFVHFDKKRTEKMLNYLRSLSEHYQVLYFTCVKDNIVPSKEVITLNKIEEGGKR

SEQ ID NO: 44152 - protein, 231 aa, Staphylococcus aureus
MRIDKFLANMGVGTRNEVKQLLKKGLVNVNEQVIKSPKTHIEPENDKITVRGELIEYIENVYIMLNKPKGYISATEDHHSKTVIDLIPEYQHLNIFPVGRLDKDTEGLLLITNDGDFNHELMSPNKHVSKKYEVISANPITEDDIQAFKEGVTLTDGKVKPAILTYIDNQTSHVTIYEGKYHQVKRMFHSIQNEVLHLRRIKIADLELDSNLDSGEYRLLTENDFDKLNYK

SEQ ID NO: 44153 - protein, 553 aa, Staphylococcus aureus
MSESKEMVRGTFLITISILITKVLGVLFIIPFNYLIGGQENMAPFTYAYAPYNIAIAVATAGVPLAASKYVAKYNAIGAYKVSQKFYKSSFIVMSITGVLGFLVLYFLAPYISELTLARNIHDKNGWSVDDITWIIRIISMVVIFIPVLATWRGIFQGYKSMGPTAVSEVTEQIARVIFILIGSYLVLNVFDGSILLANGIATFAAAVGAIIGIFTLWYYWRKRKHNIDRMVESDYTDIDVSYGKMYKEIIAYSIPFVIVSLNYPLFNLVDQFTHNGALSLVGIPSQLQDIFFNMLNMSTNKIVMIPTSLSAGFAVSLIPYITKTFAEGRLHEMHHQIRTSIGVLMFITVPASIGIMALAQPLFTVFYGYDPIVLGHDPNHDGSRLLFYYAPVAILISLLSVTASMLQGIDKQKLTVYVILASVVIKLALNYPLIMLFHTPGAILSTSIALLFAIGCNFYILKKYAKFKFSYSWIHFAKIFLYSFIMMLGVELVFFLANLFLEPTKLGYLIIIILGVTVGILIYGTITIKTRLADEFLGEIPEKLRRRVRFLR

SEQ ID NO: 44154 - protein, 269 aa, Staphylococcus aureus
MEDKNSVIVFKNVSFQYQSDASFTLKDVSFNIPKGQWTSIVGHNGSGKSTIAKLMIGIEKVKSGEIFYNNQAITDDNFEKLRKDIGIVFQNPDNQFVGSIVKYDVAFGLENHAVPHDEMHRRVSEALKQVDMLERADYEPNALSGGQKQRVAIASVLALNPSVIILDEATSMLDPDARQNLLDLVRKVKSEHNITIISITHDLSEAMEADHVIVMNKGTVYKEGTATEIFDHAEELTRIGLDLPFPIKINQMLGHQTSFLTYEGLVDQL

SEQ ID NO: 44155 - protein, 336 aa, Staphylococcus aureus
MRAAVVTKDHKVSIEDKKLRALKPGEALVQTEYCGVCHTDLHVKNADFGDVTGVTLGHEGIGKVIEVAEDVESLKIGDRVSIAWMFESCGRCEYCTTGRETLCRSVKNAGYTVDGAMAEQVIVTADYAVKVPEKLDPAAASSITCAGVTTYKAVKVSNVKPGQWLGVFGIGGLGNLALQYAKNVMGAKIVAFDINDDKLAFAKELGADAIINSKDVDPVAEVMKLTDNKGLDATVVTSVAKTPFNQAVDVVKAGARVVAVGLPVDKMNLDIPRLVLDGIEVVGSLVGTRQDLREAFEFAAENKVTPKVQLRKLEEINDIFEEMEKGTITGRMVIKF

SEQ ID NO: 44156 - protein, 136 aa, Staphylococcus aureus
MNTNDAIKILKENGLKYTDKRKDMLDIFVEEDKYINAKYIQQVMDENYPGISFDTIYRNLHLFKDLGIIENTELDGEMKFRIACTNHHHHHFICEKCGDTKVIDYCPIDQIKLSLPGVNIHKHKLEVYGVCESCQD

SEQ ID NO: 44157 - protein, 324 aa, Staphylococcus aureus
MKFDRHRRLRSSATMRDMVRENHVRKEDLIYPIFVVEKDDVKKEIKSLPGVYQISLNLLESELKEAYDLGIRAIMFFGVPNSKDDIGTGAYIHDGVIQQATRIAKKMYDDLLIVADTCLCEYTDHGHCGVIDDHTHDVDNDKSLPLLVKTAISQVEAGADIIAPSNMMDGFVAEIRRGLDEAGYYNIPIMSYGVKYASSFFGPFRDAADSAPSFGDRKTYQMDPANRLEALRELESDLKEGCDMMIVKPALSYLDIVRDVKNHTNVPVVAYNVSGEYSMTKAAAQNGWIDEERVVMEQMVSMKRAGADMIITYFAKDICRYLDK

SEQ ID NO: 44158 - protein, 341 aa, Staphylococcus aureus
MTKDILILAVETSCDETSVSVIKNGRDILSNTVLSQIESHKRFGGVVPEVASRHHVEGITTTINEALVDADVSMEDIDAIAVTEGPGLIGALLIGVNAAKALAFAYDKPLIPVHHIAGHIYANHIEEPLTFPLIALIVSGGHTELVYMKDHLSFEVIGETRDDAVGEAYDKVARTIGLNYPGGPQVDRLAAEGEDTYSFPRVWLDKDSYDFSFSGLKSAVINQLHNQRQKNIPIIEANVATSFQNSVVEVLTFKAIQACKEYSVQRLIVAGGVASNKGLRQSLADQCKVNDIQLTIPSPKLCTDNAAMIGVAGHSLYQQGRFADLALNGHSNIDLEEYSAE

SEQ ID NO: 44159 - protein, 374 aa, Staphylococcus aureus
MHKKYLLLFFLLLSVALLYSCSKQNEKAQNKSVNPNEYAKHKSKMDEHWETYHGQVYHVFYHPLITDPKVAFTGDTHQAKGNNDWMITVSEFKKSLNELYKNNYIIVNPHDVYDLSSHHVKAKKIKLPKGKKPLIISIDDMNYYSYMRHHGYADRLVLDKNKHVVSETTDKKGHATYSDDNDIVPILNKFVKEHPDFSLNGEKGVVALTGYEGVLGYRTNELTSKDYTKNKKAAEEVVRAMKRDGWSFASHSYGHINFEKTSLEGIKRDTKRWKDEVEPIVGKTDMFVFPHGAQDRHTQAYDYLVDEAEFKFIAGVGPNNFTDISATNVYQDRVAIDGLNLFEFKYKLKPFFNPENVYSKQDRQFFKGNRDYEE

SEQ ID NO: 44160 - protein, 658 aa, Staphylococcus aureus
MNLNLIFKEQTLKFNKEEQETYLFLQQHNSDWANIFKEMILQGRDKVTQRLVTSMHRENLVKARTQSKKILSRDLIMLDISTTHILEIQFPQAKQTLYAPITGEHAFDRIDVEGPFYIKDDITNTITRVHHPNEILECILIEAPDLKNAASDQFQQDLINSATNMTFAISYQALSMQHDSAPLFNIIENSEDSYLRSEQAVIEGHPLHPGAKLRKGLNALQTFLYSSEFNQPIKLKIVLIHSKLSRTMSLSKDYDTTVHQLFPDLIKQLENEFTPNFNFNDYHIMIVHPWQLDDVLHSDYQAEVDKELIIEAKHTLDYYAGLSFRTLVPKYPAMSPHIKLSTNVHITGEIRTLSEQTTHNGPLMTRILNDILEKDVIFKSYASTIIDEVAGIHFYNEQDEVDYQTERSEQLGTLFRKNIYQMIPQEVTPMIPSSLVATYPFNNESPIVTLIKRYQSAASLSDFESSAKSWIETYSKALLGLVIPLVTKYGIALEAHLQNAIATFRKDGLLDTMYIRDFEGLRIDKAQLNEMGYSTSHFHEKSRILTDSKTSVFNKAFYSTVQNHLGELILTISKASNDSNLERHMWYIVRDVLDNIFDQLVLSTHKSNQVNENRINEIKDTMFAPFIDYKCVTTMRLEDEAHHYTYIKVNNPLYRENN

SEQ ID NO: 44161 - protein, 112 aa, Staphylococcus aureus
MITVDITVNDEGKVTDVIMDGHADHGEYGHDIVCAGASAVLFGSVNAIIGLTSERPDINYDDNGGHFHIRSVDTNNDEAQLILQTMLVSLHTIEEEYNENIRLNYKCGASRW

SEQ ID NO: 44162 - protein, 188 aa, Staphylococcus aureus
MKRIAVYCGASKGHDPSYVQKAYDLGKYFAEQGYELVFGAGSIGIMGAIQDGVLNHGGKAIGVMPKMLDEHEITSQRLTELILVDSMHERKNKMAELADAFVMAPGGAGSLEEFFEMYSWAQIGIHEKPIAIYNINGFFNPLQTMIDHMIEEGFIDPKYRALAPLCDTKESLIESILNFKPLGTRSYD

SEQ ID NO: 44163 - protein, 154 aa, Staphylococcus aureus
MAKKKSPGTLAENRKARHDYNIEDTIEAGIVLQGTEIKSIRRGSANLKDSYAQVKNGEMYLNNMHIAPYEEGNRFNHDPLRSRKLLLHKREIFKLGEQTREIGYSIVPLKLYLKHGHCKVLLGVARGKKKYDKRQALKEKAVKRDVARDMKARY

SEQ ID NO: 44164 - protein, 240 aa, Staphylococcus aureus
MNKNVVIKSLATLTILTSVTGIGTTLVEEVQQTAKAENNVTKIQDTNIFPYTGVVAFKSATGFVVGKNTILTNKHVSKNYKVGDRITAHPNSDKGNGGIYSIKKIINYPGKEDVSVIQVEERAIERGPKGFNFNDNVTPFKYAAGAKAGERIKVIGYPHPYKNKYVLYESTGPVMSVEGSSIVYSAHTESGNSGSPVLNSNNELVGIHFASDVKNDDNRNAYGVYFTPEIKKFIAENIDK

SEQ ID NO: 44165 - protein, 512 aa, Staphylococcus aureus
MTSKHQQKGSIVNRFLNSVEKIGNKLPDPSVLFFLMCVGLAIMTWVISLFNVSVKHPGTHQTIYIKNIISHDGFTMIMNDTIKNFSEFPALGLVLAVMIGIGVAEKTGYFDKLMISVVNRAPRFLILPTIILIGILGSTAGDAATIILPPLAAMLFIKIGYHPIAGLTMAYASAVGGFAANIVVGMQDALVYSFTEPATRIVSDSIKTNVAMNWYFIAASVVVLLPTILLVTTKLIIPRLGKYDDSLMHDDHEEASSHITDKEAHALKWANISFIVTIILLIITAIPEHSFLRNAKTGSLLDDAPLINGVGLIILVVFLVPGLVYGILSKEIKNTKDLGKMFGDAVGSMGTFIVIVFFAAQLLAYLKWSNLGIIAAVKGAKLLEHQNGIVLILGIIVLSAMVNMLIGSASAKWGILGPIFVPMLILIGFHPAFTQVIYRVGDSITNPITPMMPYLPLLLTYAQKYDKRMKLGALLSSLMPYSIALSIVWTVFVIIWFLLGIPVGPGGPIFVK

SEQ ID NO: 44166 - protein, 250 aa, Staphylococcus aureus
MRVDLNCDLGEAFGNYSFGGDHQIIPLITSANVACGFHAGDENVMNETVKLAKAHNVAVGAHPGLPDLKGFGRRNIDISNDEIYNLMIYQLGALQGFCRIHQLKINHVKPHGALYQMGAKDREIANVIAQAVYDFDPSLVLVGLANSYLISEAKNVGLITASEVFADRRYEDDGQLVSRKESDAVITDTDEALKQVLKMVKENKVISKNNKEVTLQADTICVHGDGEHALLFVSKIREILMKEGIDIQSL

SEQ ID NO: 44167 - protein, 87 aa, Staphylococcus aureus
MSERNDRKVYVGKVVSDKMDKTITVLVETYKTHKLYGKRVKYSKKYKTHDENNSAKLGDIVKIQETRPLSATKRFRIVEIVEESVII

SEQ ID NO: 44168 - protein, 283 aa, Staphylococcus aureus
MSKIFVTGATGLIGIKLVQRLKEEGHEVAGFTTSENGQQKLAAINVKAYIGDILKADTIDQALADFKPEIIINQITDLKNVDMAANTKVRIEGSKNLIDAAKKHDVKKVIAQSIAFMYEPGEGLANEETSLDFNSTGDRKVTVDGVVGLEEETARMDEYVVLRFGWLYGPGTWYGKDGMIYNQFMDGQVTLSDGVTSFVHLDDAVETSIQAIHFENGIYNVADDAPVKGSEFAEWYKEQLGVEPNIDIQPAQPFERGVSNEKFKAQGGTLIYKTWKDGMNPIK

SEQ ID NO: 44169 - protein, 400 aa, Staphylococcus aureus
MRIVQPVIEQLKAQSHPVCHYIYDLVGLEHHLQHITSSLPSNCQMYYAMKANSERTILDTISQYVEGFEVASQGEIAKGLAFKPANHIIFGGPGKTDEELRYAVSEGVQRIHVESMHELQRLNAILEDEDKTQHILLRVNLAGPFPNATLHMAGRPTQFGISEDEVDDVIEAALVMPNIHLDGFHFHSISNNLDSNLHVDVVKLYFKKAKSWSEKHRFPLKHINLGGGIGVNYADLTSQFEWDNFVENFKTLIVEQEMEDVTLNFECGRFIVAHIGYYVTEVLDIKKVHGAWYAILRGGTQQFRLPVSWQHNHPFEIYRYKDNPYSFEKVSISRQDTTLVGQLCTPKDVFAREVQIDAISTGDVIVFKYAGAYGWSISHHDFLSHPHPEFIYLTQTKEDE

SEQ ID NO: 44170 - protein, 245 aa, Staphylococcus aureus
MKIDYLTLFPEMFDGVLNHSIMKRAQENNKLQINTVNFRDYAINKHNQVDDYPYGGGQGMVLKPEPVFNAMEDLDVTEQTRVILMCPQGEPFSHQKAVELSKADHIVFICGHYEGYDERIRTHLVTDEISMGDYVLTGGELPAMTMTDAIVRLIPGVLGNEQSHQDDSFSDGLLEFPQYTRPREFKGLTVPDVLLSGNHANIDAWRHEQKLIRTYNKRPDLIEKYPLTNEDKQILERYKIGLKKG

SEQ ID NO: 44171 - protein, 227 aa, Staphylococcus aureus
MKNILKVFNTTILALIIIIATFSNSANAADSGTLNYEVYKYNTNDTSIANDYFNKPAKYIKKNGKLYVQITVNHSHWITGMSIEGHKENIISKNTAKDERTSEFEVSKLNGKIDGKIDVYIDEKVNGKPFKYDHHYNITYKFNGPTDVAGANAPGKDDKNSASGSDKGSDGTTTGQSESNSSNKDKVENPQTNAGTPAYIYAIPVASLALLIAITLFVRKKSKGNVE

SEQ ID NO: 44172 - protein, 358 aa, Staphylococcus aureus
MRNVKQIATKSIIAIISLCILTYTTMIGSVLADEIKYPSAKFNQPEAKDKTELTTSIFDEKIKENKALELLIFNQENKNVTEEQQLVDEKAQLISDMTGKIYLQVKLKGQIDKEQLVFQNDKNEEFPFVIKDEKDDTIVRILIEQHMDKINMHVKTLAEKKNLDNKEMVYSIHFKEKKVQHDDAKEVPSKHQNQENNQDQLKKDIDDKKDSQKSDTKERRTSLFTEKGLNDIPVQKDKVQQDSNKKIENERPKASGTLKVENSPPTIKKVENNHKEQPKHKDEKSKKEKKKVVEKEKALPAFNRDDDSKNSSQLSSDIKELDEPNHKKQYMLFAAGIVLATILLISAHLYSRKRGNQV

SEQ ID NO: 44173 - protein, 205 aa, Staphylococcus aureus
MYSVISKILNFILVKMSKSLYVIGKDNIPKDSKYVVTCTHESYNEVIMLGMALYPNQIHYMAKKELFKNKWIGKFLTSLNAFPVDRENPGPSTLKRPINLLKDNKTVGIFPTGSRTSQEGAPLKRGASTIAMLSKSPILPVAYVGPTKIHGLLTGQAYINIGKPIDINDLPKDLKRNERIDYITKEIETRTAKLQQELHEIVKSL

SEQ ID NO: 44174 - protein, 488 aa, Staphylococcus aureus
MYKFFQNLGRSLMLPVAILPAAAIIAGIGNTLNALHATPKIAMFFTTVGTTILEQLGILFAIGVAIGMAKKNDGAVALAATLGYFLVTVVLSPMKLAPLLGMKASEINSAFEKMNNGNVFVGIVIGLIAAYAYNKFSETELPLALSFFSGKRLVPIMTAFYCTFLVVILLFLWPLLYSWIVKFGESIVGLGSFGAFIYGVANRLLIPTGLHHALNSVFWFDTIGINDIGKFQSGKDAIKGITGRYQAGFFPIMMFGIPAAALAMYHTAKTTQKKQVYGWFLASSVAAFFVGVTEPIEFAFMFVAPILYVVHALLTGLSLFIAATFHWTAGFSFSAGLIDYVLSLINPVSNHPLMLLVQGVVFFILYYVIFRVVIQVFNLNTIGRGENELVDPTVVKDNIAPGENDIKQSKYHQHAIQILEGLGGQENIVNLTNCATRLRLELKDTSIIDQQKIKNAGAVGVTVNGKHSTQVIVGTHVQQVADEIEKHL

SEQ ID NO: 44175 - protein, 444 aa, Staphylococcus aureus
MVKNHNPKNEMQDMLTPLDAEEAAKTKLRLDMREIPKSSIKPEHFHLMYLLEQHSPYFIDAELTELRDSFQIHYDINDNHTPFDNIKSFTKNEKLRYLLNIKNLEEVNRTRYTFVLAPDELFFTRDGLPIAKTRGLQNVVDPLPVSEAEFLTRYKALVICAFNEKQSFDALVEGNLELHKGTPFETKVIEAATLDLLTAFLDEQYQKQEQDYSQNYAYVRKVGHTVFKWVAIGMTTLSVLLIAFLAFLYFSVMKHNERIEKGYQAFVKDDYTQVLNTYDDLDGKKLDKEALYIYAKSYIQTNKQGLEKDKKENLLNNVTPNSNKDYLLYWMELGQGHLDEAINIATYLDDNDITKLALINKLNEIKNNGDLSNDKRSEETKKYNDKLQDILDKEKQVKDEKAKSEEEKAKAKDEKLKQQEENEKKQKEQAQKDKEKRQEAERKK

SEQ ID NO: 44176 - protein, 182 aa, Staphylococcus aureus
MSEEVGAKRWYAVHTYSGYENKVKKNLEKRVESMNMTEQIFRVVIPEEEETQVKDGKAKTTVKKTFPGYVLVELIMTDESWYVVRNTPGVTGFVGSAGAGSKPNPLLPEEVRFILKQMGLKEKTIDVELEVGEQVRIKSGPFANQVGEVQEIETDKFKLTVLVDMFGRETPVEVEFDQIEKL

SEQ ID NO: 44177 - protein, 66 aa, Staphylococcus aureus
MPKMKTHRGAAKRVKRTASGQLKRSRAFTSHLFANKSTKQKRQLRKARLVSKSDMKRVKQLLAYKK

SEQ ID NO: 44178 - protein, 121 aa, Staphylococcus aureus
MARIAGVDIPREKRVVISLTYIYGIGTSTAQKILEEANVSADTRVKDLTDDELGRIREVVDGYKVEGDLRRETNLNIKRLMEISSYRGIRHRRGLPVRGQKTKNNARTRKGPVKTVANKKK

SEQ ID NO: 44179 - protein, 282 aa, Staphylococcus aureus
MGNYLVLQSDFGLSDGAVSAMYGVAYTVSDDIRVENLTHDIPPYDIWVASYRLYQTVKYWPKGTVFVSVVDPGVGSDRRSIACLTYSGHYIITPDNGSLSHIKHYEGIKKVIEIDEVKSRLPHSEESHTFHGRDVYAYNGARLAANKIAFERLGQAINVDSIEALEIREATKNEDSVTGSIDILDIRFGSLWTNIPLAFLKSLEIVHGNNLVVTIYHQDKKVYQNIIKFARSFADVNVGEPLVYVNSLVNIGVAVNQDSFSDLYHIGTGNDWTIHLSKAPSI

SEQ ID NO: 44180 - protein, 304 aa, Staphylococcus aureus
MTEKQFKLTVQDNTNIEVKVNFTDVDSKGIIHIFHGMAEHMERYDKLAHALSKHGFDVIRHNHRGHGINIDESTRGHYDDMKRVIGDAFEVAQTVRGNVDKPYIIIGHSMGSVIARLFVETYPQYVDGLILSGTGMYSLWKGLPTVKVLQLITKIYGAEKRVEWVNQLVSNSFNKKIRPLRTQSDWISSNPIEVDNFIKDPYSGFNVSNQLLYQTAYYMLHTSQLKNMKMLNHAMPILLVSGYDDSLGDYGKGILKLANIYRKAGIKNVKVNLYHHKRHEVLFEKDHDKIWEDLFKWLNQFYKK

SEQ ID NO: 44181 - protein, 328 aa, Staphylococcus aureus
MKENFWSELPRPFFILAPMEDVTDIVFRHVVSEAARPDVFFTEFTNTESFCHPEGIHSVRGRLTFSEDEHPMVAHIWGDKPEQFRETSIQLAKMGFKGIDLNMGCPVANVAKKGKGSGLILRPDVAAEIIQATKAGGLPVSVKTRLGYYEIDEWKDWLKHVFEQDIANLSIHLRTRKEMSKVDAHWELIEAIKNLRDEIAPNTLLTINGDIPDRKTGLELAEKYGIDGVMIGRGIFHNPFAFEKEPREHTSKELLDLLRLHLSLFNKYEKDEIRQFKSLRRFFKIYVRGIRGASELRHQLMNTQSIAEARALLDEFEAQMDEDVKIEL

SEQ ID NO: 44182 - protein, 266 aa, Staphylococcus aureus
METLKSNKARLEYLINDMRRERNDNDVLVMPSSFEDLWELYRGLANVRPALPVSDEYLAVQDAMLSDLNHQHVTDLKDLKPIKGDNIFVWQGDITTLKIDAIVNAANSRFLGCMQANHDCIDNIIHTKAGVQVRLDCAEIIRQQGRNEGVGKAKKTRGYNLPAKYIIHTVGPQIRRLPVSKMNQDLLAKCYLSCLKLADQHSLNHVAFCCISTGVFAFPQDEAAEIAVRTVESYLKETNSTLKVVFNVFTDKDLQLYKEALNRDAE

SEQ ID NO: 44183 - protein, 428 aa, Staphylococcus aureus
MKERYYELIDERVFEQELENGLRLFIIPKPGFQKTFVTYTTQFGSLDNQFKPLGQDQFVTVPDGVAHFLEHKLFEKEEEDLFTAFAEDNAQANAFTSFDRTSYLFSATDNIENNIKRLLTMVETPYFTKETVDKEKGIIAEEIKMYQEQPGYKLMFNTLRAMYQRHPIRVDIAGSVESIYDITKDDLYLCYETFYHPSNMVLFVVGDVNPEEICRIVKQHEDARNKVNQPKIERGLVDEPEDVKEAFVTESMKIQSPRLMLGFKNKPLQEAPQKYVQRDLEMSLFFELIFGEETDFYQNLLNEGLIDDTFGYQFVLEPTYSFSIVTSATEEPDKLKKLLLDELRDKKGNFQDAEAFELLKKQFIGEFISSLNSPEYIANQYTKLYFEGVSVFDMLDIVENITLDSINETSSLYLNLDQQVDSRLEIKK

SEQ ID NO: 44184 - protein, 588 aa, Staphylococcus aureus
MRLNLMMSRLNSVVIKLWLTIILIVTTVLILLSIALITFMQYYFTQETENAIREDARRISSLVEQSHNKEEAIKYSQTLIENPGGLMIINNKHRQSTASLSNIKKQMLNEVVNNDHFDDVFDKGKSVTRNVTIKEKGSSQTYILLGYPTKAQKNSHSKYSGVFIYKDLKSIEDTNNAITIITIITAVIFLTITTVFAFFLSSRITKPLRRLRDQATRVSEGDYSYKPSVTTKDEIGQLSQAFNQMSTEIEEHVDALSTSKNIRDSLINSMVEGVLGINESRQIILSNKMANDIMDNIDEDAKAFLLRQIEDTFKSKQTEMRDLEMNARFFVVTTSYIDKIEQGGKSGVVVTVRDMTNEHNLDQMKKDFIANVSHELRTPISLLQGYTESIVDGIVTEPDEIKESLAVVLDESKRLNRLVNELLNVARMDAEGLSVNKEVQPIAALLDKMKIKYRQQADDLGLNMTFNYCKKRVWSYDMDRMDQVLTNLIDNASRYTKPGDEIAITCDENESEDILYIKDTGTGIAPEHLQQVFDRFYKVDAARTRGKQGTGLGLFICKMIIEEHGGSIDVKSELGKGTTFIIKLPKPE

SEQ ID NO: 44185 - protein, 80 aa, Staphylococcus aureus
MAGGPRRGGRRRKKVCYFTANGITHIDYKDTELLKRFISERGKILPRRVTGTSAKYQRMLTTAIKRSRHMALLPYVKEEQ

SEQ ID NO: 44186 - protein, 753 aa, Staphylococcus aureus
MTINKVTVLGAGTMGAQLAALFVNAGLKVKLLDIVVDKNDPNLIAKKSYDKITDKKRPLLFDLNLVSHLTYGNFDDDLVNDDADLYIEAVKEDIEIKHAVWQQVLQHAKEDALFATNTSGIPINAIAQAFNEKDQERFFGLHFFNPPRIMKLVELIPTSHTKESIILDVKNFAQNVLGKGVIVVNDVPGFVANRVGTQTMNDIMYRAEQHKLSIVDVDALTGQAIGRPKTGTYALSDLVGLDIAVSVIKGMQQVPEETPYFHDVKIVNTLFDNGALGRKTKQGFYKKDKETKARLVYDVEKQDYVPVSQPQLPILNEFNKDLVHNLDVIFNAQDEAGLFLWETLRNNFYYSAINVPKATDDFRDIDRALVWGFNWKLGPFQLWDAMGYERVKTRMEDELGDLPQWISDLDGGFYKQDETIEYATPVSHFVKDELWDKGDAKLSVTHDDQLLLKLQSKNNVITDEFNDALVDAIDLLENDHYTSMVIYADGNNFSVGANLFLMKKAHEDGLVDDVVAQSIDKLHYSFNRLKYSLKPVVTAVQGRALGGGCELVLYSPIVVAASETYIGLVEAGVGLLPSGGGLAEMADRILRTSHKFDDKQASMTKVLTNIAFAKVSTNAFEARRYGYLRDTDTIIFNTAQRVEVALKRAKYEAETNYIPNPRHQYIALGEDFKALIQGQLDAQRRGHFISDHDYHIALNIATILAGGDLPRNTFINQRYIQSLEKIGFIDLLKSKKSYERIAHMLKTGKPLRN

SEQ ID NO: 44187 - protein, 133 aa, Staphylococcus aureus
MAVEKVYQPYDEQVYNSIPKQQPQTKPEKKTVSRKVVVQLTKFEKVLYITLITVIAMLSIYMLSLKMDAYDTRGKIADLDYKIDKQSSENSALQSEIKKNSSYERIYEKAKKQGMSLENDNVKVVRSNGEAKN

SEQ ID NO: 44188 - protein, 310 aa, Staphylococcus aureus
MAKIVVALGGNALGKSPQEQLELVKNTAKSLVGLITKGHEIVISHGNGPQVGSINLGLNYAAEHNQGPAFPFAECGAMSQAYIGYQLQESLQNELHSIGMDKQVVTLVTQVEVDENDPAFNNPSKPIGLFYNKEEAEQIQKEKGFIFVEDAGRGYRRVVPSPQPISIIELESIKTLIKNDTLVIAAGGGGIPVIREQHDGFKGIDAVIDKDKTSALLGANIQCDQLIILTAIDYVYINFNTENQQPLKTTNVDELKRYIDENQFAKGSMLPKIEAAISFIENNPKGSVLITSLNELDAALEGKVGTVIKK

SEQ ID NO: 44189 - protein, 131 aa, Staphylococcus aureus
MIKCVCLVEETADKILLVQVRNREKYYFPGGKIEEGESQVHALLREVKEELNLTLTMDEIEYIGTIVGPAYPQQDMLTELNGFRALTKIDWENVTINNEITDIRWIDKDNDALIAPAVKVWIETYGGKHDK

SEQ ID NO: 44190 - protein, 185 aa, Staphylococcus aureus
MKRLFDVVSSIYGLVVLSPILLITALLIKMESPGPAIFKQKRPTINNELFNIYKFRSMKIDTPNVATDLMDSTSYITKTGKVIRKTSIDELPQLLNVLKGEMSIVGPRPALYNQYELIEKRTKANVHTIRPGVTGLAQVMGRDDITDDQKVAYDHYYLTHQSMMLDMYIIYKTIKNIVTSEGVHH

SEQ ID NO: 44191 - protein, 642 aa, Staphylococcus aureus
MILLQLNHISKSFDGEDIFTDVDFEVKTGERIGIVGRNGAGKSTLMKIIAGVENYDSGNVSKIKNLKLGYLTQQMTLNSNATVFEEMSKPFEHIKRMESLIKEETDWLSKHANDYDSDTYKTHMSRYESLSNQFEQLEGYQYESKIKTVLHGLNFSEEDFNKPINDFSGGQKTRLSLAQMLLNEPDLLLLDEPTNHLDLETTKWLEDYLRYFKGAIVIISHDRYFLDKIVTQIYDVALGDVKRYVGNYEEFIQQRDLYYQKRMQEYESQQAEIKRLETFVEKNITRASTSGMAKSRRKILEKMERIDKPMLDAKSANIQFGFDRNTGNDVMHVKNLEIGYQTAITKPISIEVSKGDHIAIIGPNGIGKSTLIKTIANQQKALNGDITFGANLQIGYYDQKQAEFKSSKTILDYVWDQYPLMNEKDIRAVLGRFLFVQDDVKKIINDLSGGEKARLQLALLMLQRDNVLILDEPTNHLDIDSKEMLEQALQHFEGTILFVSHDRYFINQLANKVFDLTIDGGKMYLGDYQYYIEKVEEAEALKAHQEEQSVNVQAHKKSMEQSSYHNQKEQRREQRKLERQISECENEIETLETTILQIDEQLTQPEVYNNPQKANELAIQKQDSEQKLEHAMSKWEELQQKL

SEQ ID NO: 44192 - protein, 245 aa, Staphylococcus aureus
MTKELERLQKRIANSGYTSRRKAETLISEGKVKVNGTTVTELGTKVKPSDTIEVEGIKIELEDKIYILFHKPTQVITSVSDDRGRTVVTDYFKDIEARIYPVGRLDYDTSGLLLLTNDGEFTNLMTHPRYQIKKKYVAKLKGYLMREEVKALEKGIELEDGMTQPAEVKVKKQDKDKNTTLVEITITEGRNRQVRRMFEHFGHQVTKLSRIEYGPLNVVGLNAGEGRVLTPHEVKVMRHLAEHGK

SEQ ID NO: 44193 - protein, 433 aa, Staphylococcus aureus
MSKLLMIGTGPVAIQLANICYLKSDYEIDMVGRASTSEKSKRLYQAYKKEKQFEVKIQNEAHQHLEGKFEINRLYKDVKNVKGEYETVVMACTADAYYDTLQQLSLETLQSVKHVILISPTFGSQMIVEQFMSKFSQDIEVISFSTYLGDTRIVDKEAPNHVLTTGVKKKLYMGSTHSNSTMCQRISALAEQLKIQLEVVESPLHAETRNSSLYVHPPLFMNDFSLKAIFEGTDVPVYVYKLFPEGPITMTLIREMRLMWKEMMAILQAFRVPSVNLLQFMVKENYPVRPETLDEGDIEHFEILPDILQEYLLYVRYTAILIDPFSQPDENGHYFDFSAVPFKQVYKNEQDVVQIPRMPSEDYYRTAMIQHIGKMLGIKTPMIDQFLTRYEASCQAYKDMHQDQQLSSQFNTNLFEGDKALVTKFLEINRTLS

SEQ ID NO: 44194 - protein, 315 aa, Staphylococcus aureus
MRKRARIIYNPTSGKELFKRELPDALIKLEKAGYETSAYATEKIGDATLEAERAMHENYDVLIAAGGDGTLNEVVNGIAEKPNRPKLGVIPMGTVNDFGRALHIPNDIMGALDVIIEGHSTKVDIGKMNNRYFINLAAGGQLTQVSYETPSKLKSIVGPFAYYIKGFEMLPQMKAVDLRIEYDGNVFQGEALLFFLGLTNSMAGFEKLVPDAKLDDGYFTLIIVEKSNLAELGHIMTLASRGEHTKHPKVIYEKAKAINISSFTDLQLNVDGEYGGKLPANFLNLERHIDVFAPNDIVNEELINNDHVDDNLIEE

SEQ ID NO: 44195 - protein, 450 aa, Staphylococcus aureus
MKKKNIYSIRKLGVGIASVTLGTLLISGGVTPAANAAQHDEAQQNAFYQVLNMPNLNADQRNGFIQSLKDDPSQSANVLGEAQKLNDSQAPKADAQQNNFNKDQQSAFYEILNMPNLNEAQRNGFIQSLKDDPSQSTNVLGEAKKLNESQAPKADNNFNKEQQNAFYEILNMPNLNEEQRNGFIQSLKDDPSQSANLLSEAKKLNESQAPKADNKFNKEQQNAFYEILHLPNLNEEQRNGFIQSLKDDPSVSKEILAEAKKLNDAQAPKEEDNKKPGKEDGNKPGKEDGNKPGKEDNKKPGKEDGNKPGKEDNNKPGKEDGNKPGKEDNNKPGKEDGNKPGKEDGNKPGKEDGNGVHVVKPGDTVNDIAKANGTTADKIAADNKLADKNMIKPGQELVVDKKQPANHADANKAQALPETGEENPFIGTTVFGGLSLALGAALLAGRRREL

SEQ ID NO: 44196 - protein, 119 aa, Staphylococcus aureus
MIHGIGVDLIEIDRIKVLYSKQPKLVERILTKNEQHKFNNFTHEQRKIEFLAGRFATKEAFSKALGTGLGKHVAFNDIDCYNDELGKPKIDYEGFIVHVSISHTEHYAMSQVVLEKSAF

SEQ ID NO: 44197 - protein, 382 aa, Staphylococcus aureus
MSDKYYRSAYMNVDLNAVASNFKVFSTLHPNKTVMAVVKANAYGLGSVKVARHLMENGATFFAVATLDEAIELRMHGITAKILVLGVLPAKDIDKAIQHRVALTVPSKQWLKEAIKNISGEQEKKLWLHIKLDTGMGRLGIKDTNTYQEVIEIIQQYEQLVFEGVFTHFACADEPGDMTTEQYQRFKDMVNEAIKPEYIHCQNSAGSLLMDCQFCNAIRPGISLYGYYPSEYVQQKVKVHLKPSVQLIANVVQTKTLQAGESVSYGATYTATDPTTIALLPIGYADGYLRIMQGSFVNVNGHQCEVIGRVCMDQTIVKVPDQVKAGDSVILIDNHRESPQSVEVVAEKQHTINYEVLCNLSRRLPRIYHDGDQRFVTNELLK

SEQ ID NO: 44198 - protein, 323 aa, Staphylococcus aureus
MIAVNWNTQEDMTNMFWRQNISQMWVETEFKVSKDIASWKTLSEAEQDTFKKALAGLTGLDTHQADDGMPLVMLHTTDLRKKAVYSFMAMMEQIHAKSYSHIFTTLLPSSETNYLLDEWVLEEPHLKYKSDKIVANYHKLWGKEASIYDQYMARVTSVFLETFLFFSGFYYPLYLAGQGKMTTSGEIIRKILLDESIHGVFTGLDAQHLRNELSESEKQKADQEMYKLLNDLYLNEESYTKMLYDDLGITEDVLNYVKYNGNKALSNLGFEPYFEEREFNPIIENALDTTTKNHDFFSVKGDGYVLALNVEALQDDDFVFDNK

SEQ ID NO: 44199 - protein, 178 aa, Staphylococcus aureus
MSRVGKKIIDIPSDVTVTFDGNHVTVKGPKGELSRTLNERMTFKQEENTIEVVRPSDSKEDRTNHGTTRALLNNMVQGVSQGYVKVLELVGVGYRAQMQGKDLILNVGYSHPVEIKAEENITFSVEKNTVVKVEGISKEQVGALASNIRSVRPPEPYKGKGIRYQGEYVRRKEGKTGK

SEQ ID NO: 44200 - protein, 292 aa, Staphylococcus aureus
MTEFDLSTREGRWKHFGSVDPIEGTKPTTKNEMTDLQSTHKDFLFEIEEVGIKNLVYPVLVDQYQTAGTFSFSTSLTKDEKGINMSRIIESVEKHYDNGIELEFNTLYQVLRTLQTNMKQNAAGVDVSGKWFFDRYSPTTNIKAVGNADVTYGLAIDGDKVTRKELTIEATVTTLCPCSKEISEYSAHNQRGVVTVKTYINKDQNIVDDYKNKILDAMEANASSILYPILKRPDEKRVTERAYENPRFVEDLIRLIAADLVEFDWLDGFDIECRNEESIHQHDAFAKLKYRK

SEQ ID NO: 44201 - protein, 399 aa, Staphylococcus aureus
MHKLIIKYNKQLKMLNLRDGKTYTISEDERADITLKSLGEVIHLEQNNQGTWQANHTSINKVLVRKGDLDDITLQLYTEADYASFAYPSIQDTMTIGPNAYDDMVIQSLMNAIIIKDFQSIQESQYVRIVHDKNTDVYINYELQEQLTNKAYIGDHIYVEGIWLEVQADGLNVLSQNTVASSLIRLTQEMPHAQADDYNTYHRSPRIIHREPTDDIKIERPPQPIQKNNTVIWRSIIPPLVMIALTVVIFLVRPIGIYILMMIGMSTVTIVFGITTYFSEKKKYNKDVEKREKDYKAYLDNKSKEINKAIKAQRFSLNYHYPTVAEIKDIVETKAPRIYEKTSHHHDFLHYKLGIANVEKSFKLDYQEEEFNQRRDELFDDAKELYEFYTDVEQSTINQ

SEQ ID NO: 44202 - protein, 354 aa, Staphylococcus aureus
MKELVSTARIGRSLGIHLILATQKPSGVVDDQIWSNSKFKLALKVQDRQDSNEILKTPDAADITLPGRAYLQVGNNEIYELFQSAWSGATYDIEGDKLEVEDKTIYMINDYGQLQAINKDLSGLEDEETKENQTELEAVIDHIESITTRLEIEEVKRPWLPPLPENVYQEDLVETDFRKLWSDDAKEVELTLGLKDVPEEQYQGPMVLQLKKAGHIALIGSPGYGRTTFLHNIIFDVARHHRPDQAHMYLFDFGTNGLMPVTDIPHVADYFTVDQEDKIAKAIRIFNDEIDRRKKILSQYRVTSISEYRKLTGETIPHVFILIDNFDAVKDSPFQEVFENMMIKMTREGLALDM

SEQ ID NO: 44203 - protein, 313 aa, Staphylococcus aureus
  MISC_FEATURE (289)..(289): X=any amino acid
  MISC_FEATURE (303)..(303): X=any amino acid
LQGVKQKWLRKPETELTIDREFDRTSDLPVGFTEQEQIDFALQALKLMDLTEAFAPFVVLAGHASHSHNNPHHASLECGACGGASSGFNAKLLAMICNRPNVRQGLKQSGVYIPETTVFAVAEHHTSTDTLAWVYVPDTLSSIALDAYESLNDAMPMISEHANRERLDKLPTIGRVNHPVEEAQRFASDWSEVRPEWGLAKNASFIIGRRQLTKGIDLEGRTFLHNYDWRKDKDGTLLNTIISGPALVAQWINLQYYASTVAPHFYGSGNKATQTVTSGVGVMQGNCEXSDVWLIMAICYGCXSDDVSFANSF

SEQ ID NO: 44204 - protein, 635 aa, Staphylococcus aureus
MAKYRGKPFQLYVKLSCSTMMASSIILTNILPYDAQAASEKDTEISKEILSKQDLLDKVDKAIRQIEQLKQLSASSKAHYKAQLNEAKTASQIDEIIKRANELDSKENKSSHTEMNGQSDIDSKLDQLLKDLNEVSSNVDRGQQSGEDDLNAMKNDMSQTATTKYGEKDDKNDEAMVNKALEDLDHLNQQIHKSKDALKDASKDPAVSTTDSNHEVAKTPNNDGSGHVVLNKFLSNEENQSHSNQLTDKLQGSDKINHAMIEKLAKSNASTQHYTYHKLNTLQSLDQRIANTQLPKNQKSDLMSEVNKTKERIKSQRNIILEELARTDDKKYATQSILESIFNKDEADKILKDIRVDGKTDQQIADQITRHIDQLSLTTSDDLLTSLIDQSQDKSLLISQILQTKLGKAEADKLAKDWTNKGLSNRQIVDQLKKHFASTGDTSSDDILKAILNNAKDKKQAIETILATRIERQKAKLLADLITKIETDQNKIFNLVKSALNGKADDLLNLQKRLNQTKKDIDYILSPIVNRPSLLDRLNKNGKTTDLNKLANLMNQGSNLLDSIPDIPTPKPEKTLTLGKGNGLLSGLLNADGNVSLPKAGETIKEHWLPISVIVGAMGVLMIWLSRRNKLKNKA

SEQ ID NO: 44205 - protein, 267 aa, Staphylococcus aureus
MTKTKIMGILNVTPDSFSDGGKFNNVETAINRVKAMIDEGADIIDVGGVSTRPGHEMVTLEEELNRVLPVVEAIVGFDVKISVDTFRSEVAEACLKLGVDMINDQWAGLYDHRMFQIVAKYDAEIILMHNGNGNRDEPVVEEMLTSLLAQAHQAKIAGIPSNKIWLDPGIGFAKTRNEEAEVMARLDELVATEYPVLLATSRKRFTKEMMGYDTTPVERDEVTAATTAYGIMKGVRAVRVHNVELNAKLAKGIDFLKENENARHNLS

SEQ ID NO: 44206 - protein, 646 aa, Staphylococcus aureus
MSSQKKKISLFAFFLLTVITITLKTYFSYYVDFSLGVKGLVQNLILLMNPYSLVALVLSVFLFFKGKKAFWFMFIGGFLLTFLLYANVVYFRFFSDFLTFSTLNQVGNVESMGGAVSASFKWYDFVYFIDTLVYLFILIFKTKWLDTKAFSKKFVPVVMAASVALFFLNLAFAETDRPELLTRTFDHKYLVKYLGPYNFTVYDGVKTIENNQQKALASEDDLTKVLNYTKQRQTEPNPEYYGVAKKKNIIKIHLESFQTFLINKKVNGKEVTPFLNKLSSGKEQFTYFPNFFHQTGQGKTSDSEFTMDNSLYGLPQGSAFSLKGDNTYQSLPAILDQKQGYKSDVMHGDYKTFWNRDQVYKHFGIDKFYDATYYDMSDKNVVNLGLKDKIFFKDSANYQAKMKSPFYSHLITLTNHYPFTLDEKDATIEKSNTGDATVDGYIQTARYLDEALEEYINDLKKKGLYDNSVIMIYGDHYGISENHNNAMEKLLGEKITPAKFTDLNRTGFWIKIPGKSGGINNEYAGQVDVMPTILHLAGIDTKNYLMFGTDLFSKGHNQVVPFRNGDFITKDYKYVNGKIYSNKNNELITTQPADFEKNKKQVEKDLEMSDNVLNGDLFRFYKNPDFKKVNPSKYKYETGPKANSKK

SEQ ID NO: 44207 - protein, 372 aa, Staphylococcus aureus
MLVAVVKELKQGEGRVACTPENVRKLTDAGHKVIVEKNAGIGSGFSNDMYEKEGAKIVTHEQAWEADLVIKVKEPHESEYQYFKKNQIIWGFLHLASSKEIVEKMQEVGVTAISGETIIKNGKAELLAPMSAIAGQRSAIMGAYYSEAQHGGQGTLVTGVHENVDIPGSTYVIFGGGVAATNAANVALGLNAKVIIIELNDDRIKYLEDMYAEKDVTVVKSTPENLAEQIKKADVFISTILIPGAKPPKLVTREMVKSMKKGSVLIDIAIDQGGTIETIRPTTISDPVYEEEGVIHYGVPNQPGAVPRTSTMALAQGNIDYILEICDKGLEQAIKDNEALSTGVNIYQGQVTNQGLASSHDLDYKEILNVIE

SEQ ID NO: 44208 - protein, 876 aa, Staphylococcus aureus
MEMKPKYDPREVEAGRYEEWVKNGYFKPSEDKSKETYTIVIPPPNVTGKLHLGHAWDTTLQDIITRMKRMQGYDTLYLPGMDHAGIATQAKVEAKLNEQGITRYDLGREKFLEQAWDWKEEYASFIRAQWAKLGLGLDYSRERFTLDEGLSKAVKKVFVDLYNKGIIYRGERIINWDPKARTALSDIEVIHEDVQGAFYHFKYPYADGEGFIEIATTRPETMLGDTAIVVNPNDERYKDVIGKTVILPIVGRELPILADEYVDIDFGSGAMKVTPAHDPNDFEIGQRHQLENIIVMDENGKMNDKAGKYEGMDRFDCRKQLVKDLKEQDLVIKIEDHFHSVGHSERSGAVVEPYLSTQWFVRMEDLAKRSLDNQKTDDRIDFYPQRFEHTFNQWMENIRDWTISRQLWWGHQIPAWYHKETGEIYVGEEAPTDIENWQQDEDVLDTWFSSALWPFSTLGWPDLESEDFKRYYPTNALVTGYDIIFFWVARMIFQGLEFTDRRPFNDVLLHGLVRAEDGRKMSKSLGNGVDPMDVIDEYGADSLRYFLATGSSPGHDLRYSTEKVESVWNFINKIWNGARFSLMNIGEDFKVEDIDLSGNLSLADKWILTRLNETIATVTDLSDKYEFGEVGRALYNFIWDDFCDWYIEMSKIPMNSNDEEQKQVTRSVLSYTLDNIMRMLHPFMPFVTEKIWQSLPHEGDTIVKASWPEVRESLIFEESKQTMQQLVEIIKSVRQSRVEVNTPLSKEIPILIQAKDKEIETTLSQNKDYLIKFCNPSTLNISTDVEIPEKAMTSVVIAGKVVLPLEGLIDMDKEISRLEKELAKLQSELDRVDKKLSNENFVSKAPEKVINEEKRKKQDYQEKYDGVKARIEQLKA

SEQ ID NO: 44209 - protein, 167 aa, Staphylococcus aureus
MLNRVVLVGRLTKDPEYRTTPSGVSVATFTLAVNRTFTNAQGEREADFINCVVFRRQADNVNNYLSKGSLAGVDGRLQSRNYENQEGRRVFVTEVVCDSVQFLEPKNAQQNGGQRQQNEFQDYGQGFGGQQSGQNNSYNNSSNTKQSDNPFANANGPIDISDDDLPF

SEQ ID NO: 44210 - protein, 572 aa, Staphylococcus aureus
MSKLIKGIAASDGVAIAKAYLLVEPDLTFDKNEKVTDVEGEVAKFNSAIEASKVELTKIRNNAEVQLGADKAAIFDAHLLVLDDPELIQPIQDKIKNENANAATALTDVTTQFVTIFESMDNEYMKERAADIRDVSKRVLSHILGVELPNPSMIDESVVIVGNDLTPSDTAQLNKEFVQGFATNIGGRTSHSAIMSRSLEIPAIVGTKSITQEVKQGDIIIVDGLNGDVIVNPTEDELIAYQDKRECYFADKKELQKLRDADTVTVDGVHAELAANIGTPNDLPGVIENGAQGIGLYRTEFLYMGRDQMPTEEEQFEAYKEVLEAMDGKRVVVRTLDIGGDKELSYLNLPEEMNPFLGYRAIRLCLAQQDIFRPQLRALLRASVYGKLNIMFPMVATINEFREAKAILLEEKENLKNEGHDISDDIELGIMVEIPATAALADVFAKEVDFFSIGTNDLIQYTLAADRMSERVSYLYQPYNPSILRLVKQVIEASHKEGKWTGMCGEMAGDETAIPLLLGLGLDEFSMSATSILKARRQINGLSKNEMTELANRAVDCATQEEVIELVNNYVK

SEQ ID NO: 44211 - protein, 744 aa, Staphylococcus aureus
MAKQKIKIKKNKIGAVLLVGLFGLLFFILVLRISYIMITGHSNGQDLVMKANEKYLVKNAQQPERGKIYDRNGKVLAEDVERYKLVAVIDKKASANSKKPRHVVDKKETAKKLSTVIDMKPEEIEKRLSQKKAFQIEFGRKGTNLTYQDKLKIEKMNLPGISLLPETERFYPNGNFASHLIGRAQKNPDTGELKGALGVEKIFDSYLSGSKGSLRYIHDIWGYIAPNTKKEKQPKRGDDVHLTIDSNIQVFVEEALDGMVERYQPKDLFAVVMDAKTGEILAYSQRPTFNPETGKDFGKKWANDLYQNTYEPGSTFKSYGLAAAIQEGAFDPDKKYKSGHRDIMGSRISDWNRVGWGEIPMSLGFTYSSNTLMMHLQDLVGADKMKSWYERFGFGKSTKGMFDGEAPGQIGWSNELQQKTSSFGQSTTVTPVQMLQAQSAFFNDGNMLKPWFVNSVENPVSKRQFYKGQKQIAGKPITKDTAEKVEKQLDLVVNSKKSHAANYRIDGYEVEGKTGTAQVAAPNGGGYVKGPNPYFVSFMGDAPKKNPKVIVYAGMSLAQKNDQEAYELGVSKAFKPIMENTLKYLNVGKSKDDTSNAEYSKVPDVEGQDKQKAIDNVSAKSLEPVTIGSGTQIKAQSIKAGNKVLPHSKVLLLTDGDLTMPDMSGWTKEDVIAFENLTNIKVNLKGSGFVSHQSISKGQKLTEKDKIDVEFSSENVDSNSTNNSDSNSDDKKKSDSKTDKDKSD

SEQ ID NO: 44212 - protein, 257 aa, Staphylococcus aureus
MLIDTHVHLNDEQYDDDLSEVITRAREAGVDRMFVVGFNKSTIERAMKLIDEYDFLYGIIGWHPVDAIDFTEEHLEWIESLAQHPKVIGIGEMGLDYHWDKSPADVQKEVFRKQIALAKRLKLPIIIHNREATQDCIDILLEEHAEEVGGIMHSFSGSPEIADIVTNKLNFYISLGGPVTFKNAKQPKEVAKHVSMERLLVETDAPYLSPHPYRGKRNEPARVTLVAEQIAELKGLSYEEVCEQTTKNAEKLFNLNS

SEQ ID NO: 44213 - protein, 608 aa, Staphylococcus aureus
MKRLGMERFKMITLYNTLTRQKEVFKPIEPGKVKMYVCGPTVYNYIHIGNARPAINYDVVRRYFEYQGYNVEYVSNFTDVDDKLIKRSQELNQSVPEIAEKYIAAFHEDVGALNVRKATSNPRVMDHMDDIIQFIKDLVDQGYAYESGGDVYFRTRKFEGYGKLSHQSIDDLKVGARIDAGEHKEDALDFTLWKKAKPGEISWNSPFGEGRPGWHIECSVMAFHELGPTIDIHAGGSDLQFPHHENEIAQSEAHNHAPFANYWMHNGFINIDNEKMSKSLGNFILVHDIIKEVDPDVLRFFMISVHYRSPINYNLELVESARSGLERIRNSYQLIEERAQIATNIENQQTYIDQIDAILNRFETVMNDDFNTANAITAWYDLAKLANKYVLENTTSTEVIDKFKAVYQIFSDVLGVPLKSKNADELLDEDVEKLIEERNEARKNKDFARADEIRDMLKSQNIILEDTPQGVRFKRGYQQDNHIKLLNPLTLAYMGDAVLDQYVRTYIVLKLKSKPNKLHQMSKKYVSAKSQAQTLEYLMEQEWFTDEEMDILKRGRNAKSHTKAKNTDVQTYRKSSAIEAVIGFLYLEKREERLEALLNKIITIVNER

SEQ ID NO: 44214 - protein, 451 aa, Staphylococcus aureus
MKKVLIANRGEIAVRIIRACRDLGIQTVAIYSEGDKDALHTQIADEAYCVGPTLSKDSYLNIPNILSIATSTGCDGVHPGYGFLAENADFAELCEACQLKFIGPSYQSIQKMGIKDVAKAEMIKANVPVVPGSDGLMKDVSEAKKIAKKIGYPVIIKATAGGGGKGIRVARDEKELETGFRMTEQEAQTAFGNGGLYMEKFIENFRHIEIQIVGDSYGNVIHLGERDCTIQRRMQKLVEEAPSPILDDETRREMGNAAVRAAKAVNYENAGTIEFIYDLNDNKFYFMEMNTRIQVEHPVTEMVTGIDLVKLQLQVAMGDVLPYKQEDIKLTGHAIEFRINAENPYKNFMPSPGKIEQYLAPGGYGVRIESACYTNYTIPPYYDSMVAKLIIHEPTRDEAIMAGIRALSEFVVLGIDTTIPFHIKLLNNDIFRSGKFNTNFLEQNSIMNDEG

SEQ ID NO: 44215 - protein, 356 aa, Staphylococcus aureus
MTKENICIVFGGKSAEHEVSILTAQNVLNAIDKDKYHVDIIYITNDGDWRKQNNITAEIKSTDELHLENGEALEISQLLKESSSGQPYDAVFPLLHGPNGEDGTIQGLFEVLDVPYVGNGVLSAASSMDKLVMKQLFEHRGLPQLPYISFLRSEYEKYEHNILKLVNDKLNYPVFVKPANLGSSVGISKCNNEAELKEGIKEAFQFDRKLVIEQGVNAREIEVAVLGNDYPEATWPGEVVKDVAFYDYKSKYKDGKVQLQIPADLDEDVQLTLRNMALEAFKATDCSGLVRADFFVTEDNQIYINETNAMPGFTAFSMYPKLWENMGLSYPELITKLIELAKERHQDKQKNKYKID

SEQ ID NO: 44216 - protein, 437 aa, Staphylococcus aureus
MRQWTAIHLAKLARKASRAVGKRGTDLPGQIARKVDTDVLRKLAEQVDDIVFISGTNGKTTTSNLIGHTLKANNIQIIHNNEGANMAAGITSAFIMQSTPKTKIAVIEIDEGSIPRVLKEVTPSMMVFTNFFRDQMDRFGEIDIMVNNIAETISNKGIKLLLNADDPFVSRLKIASDTIVYYGMKAHAHEFEQSTMNESRYCPNCGRLLQYDYIHYNQIGHYHCQCGFKREQAKYEISSFDVAPFLYLNINDEKYDMKIAGDFNAYNALAAYTVLRELGLNEQTIKNGFETYTSDNGRMQYFKKERKEAMINLAKNPAGMNASLSVGEQLEGEKVYVISLNDNAADGRDTSWIYDADFEKLSKQQIEAIIVTGTRAEELQLRLKLAEVEVPIIVERDIYKATAKTMDYKGFTVAIPNYTSLAPMLEQLNRSFEGGQS

SEQ ID NO: 44217 - protein, 243 aa, Staphylococcus aureus
MHELTIYHFMSDKLNLYSDIGNIIALRQRAKKRNIKVNVVEINETEGITFDECDIFFIGGGSDREQALATKELSKIKTPLKEAIEDGMPGLTICGGYQFLGKKYITPDGTELEGLGILDFYTESKTNRLTGDIVIESDTFGTIVGFENHGGRTYHDFGTLGHVTFGYGNNDEDKKEGIHYKNLLGTYLHGPILPKNYEITDYLLEKACERKGIPFEPKEIDNEAEIQAKQVLIDRANRQKKSR

SEQ ID NO: 44218 - protein, 126 aa, Staphylococcus aureus
MKIILKNNSDFPIYEQIKQQVKQNILKGHVAPGEHLPSMRELAKDLQVSLITTKRAYEDLEKDGFVTTIRGKGTFVKEQDSSILKEKQFFTIENLVKELVNEAQAIEMSLEELQDILTFIYEEESS

SEQ ID NO: 44219 - protein, 298 aa, Staphylococcus aureus
MNAIELSNVNYSSDQFNLKNISFKVPQGFVTGFIGRNGAGKTTIIRLIMDLYQPQTGVIRVLEEDMALNPIELKNSIGFVYSENYFNERWTTKQLEKMIAPFYRKWDHQVFEFYLEKFDLPINKSIKTFSTGMKMKLSLAVAFSHHAELYIFDEPTSGLDPLARNELLEIIQQELIDENKTIFMSTHIISDLEKIADYIIHLSDGEVILNGSKEQLLQRYQVVSGATEDLDDELASLLIYEEHKRTGFIGLTEHAQVFKEILGHKVNITTPSIENLMVYLEKRKPKYHENIKLMEEGF

SEQ ID NO: 44220 - protein, 366 aa, Staphylococcus aureus
MSDILKCIGCGAPLQSEDKNKPGFVPEHNMFRDDVICRRCFRLKNYNEVQDVGLESEDFLKLLSGLADKKGIVVNVVDVFDFEGSFINAVKRIVGNKKIILAANKLDLLPKQINKRRVKEWLKRTARKYGLEADDVVLISAEKGWGIDDLLSSIANIRENEDVYIVGTTNVGKSTLINKLIEASVGEKDVVTTSRFPGTTLDMIDIPLDESSFMYDTPGIIQDHQMTHLVSEKELKIIMPKKEIKQRVYQLNEAQTLFFGGLARIDYVSGGKRPLVCFFSNDLNIHRTKTEKANDLWRNQLGDLLTPPGNPQNFDLNELKAVRLETGKEKRDVMISGLGFITIGPGAKVIVRVPKNVDVVLRNSIL

SEQ ID NO: 44221 - protein, 35 aa, Staphylococcus aureus
MYKFFQNLGRSLMLPVAILPAAAIIAGIGNTLNAL

SEQ ID NO: 44222 - protein, 568 aa, Staphylococcus aureus
MKVEVYKGAQGKHNLKDYEETYNTFDWKDVEQAFSWSETGKMNMAYECIDRHVDQRLGDKIALNYKDEYRKESYTYKDMQRLSNKAANVLSEHAEVDKGDRVFIFMSRTPELYFALLGVLKIGAIVGPLFEAFMEKAVADRLENSEAKVLITNKALLPRVPVDKLPNLKKIVVVDEDVEDNYIDFISLMETASDEFDIEWLKSDDGLILHYTSGSTGQPKGVLHVQQAMLVHYISGKYVLDLQEDDVYWCTADPGWVTGTSYGIFAPWLNGATNCIAGGRFSPEQWYSMIEDFKVTIWYTAPTALRMLMSAGDDIVEKYDLSSLRSILSVGEPLNPEVIKWAKKVYGLTVLDTWWMTETGGHMIVNYPTMDVKLGSMGKPLPGIQAAIIDDAGNELPPNRMGNLAIKKGWPSMMYRIWKNPEKYKSYFIGDWYVSGDSAYKDEDGYFWFQGRVDDVIMTAGERVGPFEVESKLVEHEAVAEAGIIGKPDPVRGEIIKAFVALRKGYEPTDELKEEIRLFVKEGLSAHAAPREIEFKDKLPKTRSGKIMRRVLKAWELNLDAGDLSTME

SEQ ID NO: 44223 - protein, 132 aa, Staphylococcus aureus
MEKSIKIMTIIGIVIQGLATVFSLLLMVLAASGVMTTDVSTTVNGEVDPVDAETAAAIFTVLFLSLFIFGIISIILGAIGMFKASKNKKMSGILLIIGAVISGNIITFALWLVSGIKLLTNNKPKDEISDLS

SEQ ID NO: 44224 - protein, 33 aa, Staphylococcus aureus
MLIDTHVHLNDEQYDDDLSEVITRAREAGVDRM

SEQ ID NO: 44225 - protein, 801 aa, Staphylococcus aureus
MSLLHIAVILPLIFALIIPILYRFFKRIHLGWFVLPVPIVIFIYMLTLIKTTMSGNTVMKTLNWMPHFGMNFDLYLDGLGLLFSLLISGIGSLVVLYSIGYLSKSEQLGNFYCYLLLFMGAMLGVVLSDNVIILYLFWELTSFSSFLLISFWRERQASIYGAQKSLIITVFGGLSLLGGIILLAIPTQSFSIQYMIQHASEIQNSPFFIFAMILIMIGAFTKSAQFPFYIWLPDAMEAPTPVSAYLHSATMVKAGLYLIARMTPIFAASQGWVWTVTLVGLITLFWASLNATKQQDLKGILAFSTVSQLGMIMAMLGIGAISYHYQGDDSKIYAAAFTAAIFHLINHATFKGALFMITGAVDHSTGTRDVKKLGGLLTIMPISFTITVITALSMAGVPPFNGFLSKESFLETTFTASQANLFSVDTLGYLFPIIGIVGSVFTFVYSIKFIMHIFFGQYKPEQLPKKAHEVSILMLLSPAILATLVIVLGLFPGILTNSIIEPATSSINHTVIDDVEFHMFHGLTPAFLSTLVIYILGILLIVTFSYWVKLLQRQPGKLTFNYWYNRSANVIPNYSEKMTNSYVTDYSRNNLVIIFGALILLTFVTIFSVPFNINFKDVSPIRIFEVCIVILLLSAAFLILFAKSRLFSIIMLSAVGYAVSVLFIFFKAPDLALTQFVVESISTALFLLCFYHLPNLNRYNEKRSFQLTNALIAGGVGLSVIIIGLIAYGNRHFESISKFYQEHVYDLAHGKNMVNVILVDFRGMDTLFESSVLGIAGLAVYTMIKLRKKRQTQGNEVKNHE

SEQ ID NO: 44226 - protein, 142 aa, Staphylococcus aureus
MNRQQNDLILQFAAVIIFFMVMVFGFSLFLAGHYTPGGGFVGGLLFASSLVIITIAFDIETMRKIFPLDFKILIGIGLVFCIATPIASWFLGKNFFTHVTFDIPLFILEPVHMTTAVFFDFGVLCAVVGTVMTIIISIGENE

SEQ ID NO: 44227 - protein, 159 aa, Staphylococcus aureus
MTLSILVAHDLQRVIGFENQLPWHLPNDLKHVKKLSTGHTLVMGRKTFESIGKPLPNRRNVVLTSDTSFNVEGVDVIHSIEDIYQLPGHVFIFGGQTLFEEMIDKVDDMYITVIEGKFRGDTFFPPYTFEDWEVASSVEGKLDEKNTIPHTFLHLIRKK

SEQ ID NO: 44228 - protein, 220 aa, Staphylococcus aureus
MTKGILGRKIGMTQVFGENGELIPVTVVEAKENVVLQKKTVEVDGYNAIQVGFEDKKAYKKDAKSNKYANKPAEGHAKKADAAPKRFIREFRNVDVDAYEVGQEVSVDTFVAGDVIDVTGVSKGKGFQGAIKRHGQSRGPMSHGSHFHRAPGSVGMASDASRVFKGQKMPGRMGGNTVTVQNLEVVQVDTENKVILVKGNVPGPKKGLVEIRTSIKKGNK

SEQ ID NO: 44229 - protein, 424 aa, Staphylococcus aureus
MKLIKNGKVLQNGELQQADILIDGKVIKQIAPAIEPSNGVDIIDAKGHFVSPGFVDVHVHLREPGGEYKETIETGTKAAARGGFTTVCPMPNTRPVPDSVEHFEALQKLIDDNAQVRVLPYASITTRQLGKELVDFPALVKEGAFAFTDDGVGVQTASMMYEGMIEAAKVNKAIVAHCEDNSLIYGGAMHEGKRSKELGIPGIPNICESVQIARDVLLAEAAGCHYHVCHVSTKESVRVIRDAKRAGIHVTAEVTPHHLLLTEDDIPGNNAIYKMNPPLRSTEDREALLEGLLDGTIDCIATDHAPHARDEKAQPMEKAPFGIVGSETAFPLLYTHFVKNGDWTLQQLVDYLTIKPCETFNLEYGTLKENGYADLTIIDLDSEQEIKGEDFLSKADNTPFIGYKVYGNPILTMVEGEVKFEGDK

SEQ ID NO: 44230 - protein, 186 aa, Staphylococcus aureus
MNTIRNSICLTIITMVLCGFLFPLAITLIGQIFFYQQANGSLITYDNRIVGSKLIGQHWTETRYFHGRPSAVDYNMNPEKLYKNGVSSGGSNESNGNTELIARMKHHVKFGNSNVTIDAATSSGSGLDPHITVENALKQAPRIADARHVSTSRVADLIQHRKQRGVLTNDYVNVLELNIALDKMKD

SEQ ID NO: 44231 - protein, 419 aa, Staphylococcus aureus
MVVEKRNPIPVKEAIQRIVNQQSSMPAITVALEKSLNHILAEDIVATYDIPRFDKSPYDGFAIRSVDSQGASGQNRIEFKVIDHIGAGSVSDKLVGDHEAVRIMTGAQIPNGADAVVMFEQTIELEDTFTIRKPFSKNENISLKGEETKTGDVVLKKGQVINPGAIAVLATYGYAEVKVIKQPSVAVIATGSELLDVNDVLEDGKIRNSNGPMIRALAEKLGLEVGIYKTQKDDLDSGIQVVKEAMEKHDIVITTGGVSVGDFDYLPEIYKAVKAEVLFNKVAMRPGSVTTVAFADGKYLFGLSGNPSACFTGFELFVKPAVKHMCGALEVFPQIIKATLMEDFTKANPFTRFIRAKATLTSAGATVVPSGFNKSGAVVAIAHANCMVMLPGGSRGFKAGHTVDIILTESDAAEEELLL

SEQ ID NO: 44232 - protein, 425 aa, Staphylococcus aureus
MQSLDKNFRHLSRQQKLQQLVDKQWLSEDQFDILLNHPLIDEEVANSLIENVIAQGALPVGLLPNIIVDDKAYVVPMMVEEPSVVAAASYGAKLVNQTGGFKTVSSERIMIGQIVFDGVDDTEKLSADIKALEKQIHKIADEAYPSIKARGGGYQRIAIDTFPEQQLLSLKVFVDTKDAMGANMLNTILEAITAFLKNESPQSDILMSILSNHATASVVKVQGEIDVKDLARGERTGEEVAKRMERASVLAQVDIHRAATHNKGVMNGIHAVVLATGNDTRGAEASAHAYASRDGQYRGIATWRYDQKRQRLIGTIEVPMTLAIVGGGTKVLPIAKASLELLNVDSAQELGHVVAAVGLAQNFAACRALVSEGIQQGHMSLQYKSLAIVVGAKGDEIAQVAEALKQEPRANTQVAERILQEIRQQ

SEQ ID NO: 44233 - protein, 99 aa, Staphylococcus aureus
MWCITMVKIDLQFFASKKGVSSTKNGRDSESKRLGAKRADGQFVTGGSILYRQRGTKIYPGENVGRGGDDTLFAKIDGVVKFERKGRDKKQVSVYAVAE

SEQ ID NO: 44234 - protein, 267 aa, Staphylococcus aureus
MKVGIDAGGTLIKIVQEQDNQRTFKTELTKNIDQVVEWLNQQQIEKLCLTGGNAGVIAENINIPAQIFVEFDAASQGLGILLKEQGHDLADYIFANVGTGTSLHYFDGQSQRRVGGIGTGGGMIQGLGYLLSQITDYKQLTDMAQHGDRNTIDLKVRHIYKDTEPPIPGDLTAANFGHVLHHLDADFTPSNKLAAVIGVVGEVVTTMAITVAREFKTENIVYIGSSFHNNALLRKVVEDYTVLRGCKPYYVENGAFSGAIGALYLGK

SEQ ID NO: 44235 - protein, 374 aa, Staphylococcus aureus
MKVLVAMDEFHGIISSYQANRYVEEAVASQIETADVVQVPLFNGRHELLDSVFLWQSGQKYRIPVHDADMNEVEGVYGQTDTGMTVIEGNLFLKGKKPIVERTSYGLGEMIKHALDNDAKHVVISLGGIDSFDAGAGMLQALGAQFYDDEGRVVDMRQGAGVIKYIRRMDMSNLHPKMETARIQVMSDFSSRLYGKQSEIMQTYDAHQLHHNQAAEIDNLIWYFSELFKSELKIAIGPVERGGAGGGIAAVLNGLYQAEILTSHALVDQLTHLENLVEQADLIIFGEGLNENDQLLETTTLRIAELCHKHQKVAIAICATAEKFDLFESQGVTAMFNTFIDMPETYTDFKMGLQIRHYTVQSLKLLKTHFNVEV

SEQ ID NO: 44236 - protein, 100 aa, Staphylococcus aureus
MTKVTREEVEHIANLARLQISPEETEEMANTLESILDFAKQNDSADTEGVEPTYHVLDLQNVLREDKAIKGIPQELALKNAKETEDGQFKVPTIMNEEDA

SEQ ID NO: 44237 - protein, 443 aa, Staphylococcus aureus
MTHIQLDFSKTLEFFGEHELKQQQEIVKSIHKTIHEGTGAGSDFLGWVDLPVDYDKEEFSRIVEASKRIKENSDVLVVIGIGGSYLGARAAIEMLTSSFRNSNEYPEIVFVGNHLSSTYTKELVDYLADKDFSVNVISKSGTTTEPAVAFRLFKQLVEERYGKEEAQKRIFATTDKEKGALKQLATNEGYETFIVPDDVGGRYSVLTAVGLLPIATAGINIEAMMIGAAKAREELSSDKLEDNIAYQYATIRNILYAKGYTTEMLINYEPSMQYFNEWWKQLFGESEGKDFKGIYPSSANYTTDLHSLGQYVQEGRRFLFETVVKVNHPKYDITIEKDSDDLDGLNYLAGKTIDEVNTKAFEGTLLAHTDGGVPNMVVNIPQLDEETFGYVVYFFELACAMSGYQLGVNPFNQPGVEAYKQNMFALLGKPGFEDLKKELEERL

SEQ ID NO: 44238 - protein, 306 aa, Staphylococcus aureus
MIYTVTFNPSIDYVIFTNDFKIDGLNRATATYKFAGGKGINVSRVLKTLDVESTALGFAGGFPGKFIIDTLNNSAIQSNFIEVDEDTRINVKLKTGQETEINAPGPHITSTQFEQLLQQIKNTTSEDIVIVAGSVPSSIPSDAYAQIAQITAQTGAKLVVDAEKELAESVLPFHPLFIKPNKDELEVMFNTTVNSDTDVIKYGRLLVDKGAQSVIVSLGGDGAIYIDKEISIKAVNPQGKVVNTVGSGDSTVAGMVAGIASGLTIEKAFQQAVACGTATAFDEDLATRDAIEKIKSQVTISVLDGE

SEQ ID NO: 44239 - protein, 118 aa, Staphylococcus aureus
MPRVKGGTVTRARRKKTIKLAKGYFGSKHTLYKVAKQQVMKSGQYAFRDRRQRKRDFRKLWITRINAAARQHEMSYSRLMNGLKKAGIDINRKMLSEIAISDEKAFAQLVTKAKDALK

SEQ ID NO: 44240 - protein, 299 aa, Staphylococcus aureus
MTEHKSGFVSIIGRPNVGKSTFVNRVIGHKIAIMSDKAQTTRNKIQGVMTRDDAQIIFIDTPGIHKPKHKLGDYMMKVAKNTLSEIDAIMFMVNANEEIGRGDEYIIEMLKNVKTPVFLVLNKIDLVHPDELMPKIEEYQSYMDFTEIVPISALEGLNVDHFIDVLKTYLPEGPKYYPDDQISDHPEQFVVGEIIREKILHLTSEEIPHAIGVNVDRMVKESEDRVHIEATIYVERDSQKGIVIGKGGKKLKEVGKRARRDIEMLLGSKVYLELWVKVQRDWRNKVNFIRQIGYVEDQD

SEQ ID NO: 44241 - protein, 390 aa, Staphylococcus aureus
MKIATLNKGKETKYFNGYPLIEEEDIYSQDHLKEGDIFQIVTDKSQYVATAYVGRQHKGLGWVLTYDKAQEINTAFFVKLFNTALAERDYYFNIDGTNAFRLFNAEGDGVGGLTIDNYDGHLLIQWYSKGIYKFKYAILEAVRKVFDYKSIYEKVRFKDSEYSGGFVEGDAPEFPIVIEENFTFYNVDLEDGLMTGIFLDQKEVRKKLRGQYAKERHVLNLFSYTGAFSVIAASEASSTTSVDLANRSRSLTEENFGLNAIDPKSQYIYVMDTFDFYKYAARHGHSYDTIVIDPPSFARNKKRTFSVQKDYDKLINGALNILSSEGTLLLCTNASVYPLKQFKNTIKKTLEESGVDYELTEVMGLPKDFKTHPHYKPSKYLKAVFVNIRH

SEQ ID NO: 44242 - protein, 132 aa, Staphylococcus aureus
MKRVITYGTYDLLHYGHIELLRRAREMGDYLIVALSTDEFNQIKHKKSYYDYEQRKMMLESIRYVDLVIPEKGWGQKEDDVEKFDVDVFVMGHDWEGEFDFLKDKCEVIYLKRTEGISTTKIKQELYGKDAK

SEQ ID NO: 44243 - protein, 628 aa, Staphylococcus aureus
MSDRFIKFNDEQLDAKQVMMLQDLARLLLKNEQTQVKIQKFPYYNPVQNVLITSWFWSHRPSHIEMAGLKTDVMLAAYGYHMMDVQIVNEVVQDKTFKHPKFYQQLFKLLEDMRVLNSIKVERPSTAKLIDLRLDTRVSYTESQIKVYRTKTQYTDLLFLYLEHAFLSQDFFDIPSIHSDLDDILVNMFLYLPNFFQNQNSEDNMYLAQRIMYQVDDILKEDMLNEYYYLPKTLYNTLASPEFDDLKRTDASQVDGQDDTSEDDDNESEKADSKSADSESKGGAYLEMELHEGQNSETLGNDEAREGDATDDMTDMMTKKGKGSNDTLNREEGDAVGQSQAFQLDGVNKNVEIKWQIPEIEPQYVLEYQESKQDVQYEIKDLIQIIKKTIEREQRDARFNLTKGRLQKDLINWFIDDQYKLFYKKQDLSKSFDATFTLLIDASASMHDKMAETKKGVVLFHETLKALNIKHEILSFSEDAFDSDDHAQPNIINEIINYDYSTFEKDGPRIMALEPQDDNRDGVAIRVASERLMRRNQHQRFLIVFSDGEPSAFNYSQDGIIDTYEAVEMSRKFGIEVFNVFLSQDPITEDVEQTIHNIYGQYAIFVEGVAHLPGHLSPLLKKLLLKSL

SEQ ID NO: 44244 - protein, 335 aa, Staphylococcus aureus
MTHNIHDNISQWMKSNEETPIVMSSRIRLARNLENHVHPLMYATENDGFRVINEVQDALPNFELMRLDQMDQQSKMKMVAKHLISPELIKQPAAAVLVNDDESLSVMINEEDHIRIQAMGTDTTLQALYNQASSIDDELDRSLDISYDEQLGYLTTCPTNIGTGMRASVMLHLPGLSIMKRMTRIAQTINRFGYTIRGIYGEGSQVYGHTYQVSNQLTLGKSELEIIETLTEVVNQIIHDEKQIRQKLDTYNQLETQDRVFRSLGILQNCRMITMEEASYRLSEVKLGIDLNYIELQNFKFNELMVAIQSPFLLDEEDDKSVKEKRADILREHIK

SEQ ID NO: 44245 - protein, 188 aa, Staphylococcus aureus
MLCENCQLNEAELKVKVTSKNKTEEKMVCQTCAEGHHPWNQANEQPEYQEHQDNFEEAFVVKQILQHLATKHGINFQEVAFKEEKRCPSCHMTLKDIAHVGKFGCANCYATFKDDIIDIVRRVQGGQFEHVGKTPHSSHKKIALKRKIEEKNEYLKKLIEIQDFEEAAIVRDEIKALKAESEVQHDDA

SEQ ID NO: 44246 - protein, 118 aa, Staphylococcus aureus
MTHNIHDNISQWMKSNEETPIVMSSRIRLARNLENHVHPLMYATENDGFRVINEVQDALPNFELMRLDQMDQQSKMKMVAKHLISPELIKQPAAAVLVNDDESLSVMINEEDHIRIQA

SEQ ID NO: 44247 - protein, 730 aa, Staphylococcus aureus
MNALLNHMNTEQSEAVKTTEGPLLIMAGAGSGKTRVLTHRIAYLLDEKDVSPYNVLAITFTNKAAREMKERVQKLVGDQAEVIWMSTFHSMCVRILRRDADRIGIERNFTIIDPTDQKSVIKDVLKNENIDSKKFEPRMFIGAISNLKNELKTPADAQKEATDYHSQMVATVYSGYQRQLSRNEALDFDDLIMTTINLFERVPEVLEYYQNKFQYIHVDEYQDTNKAQYTLVKLLASKFKNLCVVGDSDQSIYGWRGADIQNILSFEKDYPEANTIFLEQNYRSTKTILNAANEVIKNNSERKPKGLWTANTNGEKIHYYEAMTERDEAEFVIREIMKHQRNGKKYQDMAILYRTNAQSRVLEETFMKSNMPYTMVGGQKFYDRKEIKDLLSYLRIIANSNDDISLQRIINVPKRGVGPSSVEKVQNYALQNNISMFDALGEADFIGLSKKVTQECLNFYELIQSLIKEQEFLEIHEIVDEVLQKSGYREMLERENTLESRSRLENIDEFMSVPKDYEENTPLEEQSLINFLTDLSLVADIDEADTENGVTLMTMHSAKGLEFPIVFIMGMEESLFPHIRAIKSEDDHEMQEERRICYVAITRAEEVLYITHATSRMLFGRPQSNMPSRFLKEIPESLLENHSSGKRQTIQPKAKPFAKRGFSQRTTSTKKQVSSSDWNVGDKVMHKAWGEGMVSNVNEKNGSIELDIIFKSQGPKRLLAQFAPIEKKED

SEQ ID NO: 44248 - protein, 355 aa, Staphylococcus aureus
MWNKNRLTQMLSIEYPIIQAGMAGSTTPKLVASVSNSGGLGTIGAGYFNTQQLEDEIDYVRQLTSNSFGVNVFVPSQQSYTSSQIENMNAWLKPYRRALHLEEPVVKIIEEQQFKCHIDTIIKKQVPVCCFTFGIQNESIIERLKEANIKLIGTATSVDEAIANEKAGMDAIVAQGSEAGGHRGSFLKPKNQLPMVGTISLVPQIVDVVSIPVIAAGGIMDGRGVLASIVLGAEGVQMGTAFLTSQDSNASELLRDAIINSKETDTVVTKAFSGKLARGINNRFIEEMSQYEGDIPDYPIQNELTSSIRKAAANIGDKELTHMWSGQSPRLATTHPANTIMSNIINQINQIMQYK

SEQ ID NO: 44249 - protein, 242 aa, Staphylococcus aureus
MDHKSPLVSWNLFGFDIVFNLSSILMILVTAFLVFLLAIICTRNLKKRPTGKQNFVEWIFDFVRGIIEGNMAWKKGGQFHFLAVTLILYIFIANMLGLPFSIVTKDHTLWWKSPTADATVTLTLSTTIILLTHFYGIKMRGTKQYLKGYVQPFWPLAIINVFEEFTSTLTLGLRLYGNIFAGEILLTLLAGLFFNEPAWGWIISIPGLIVWQAFSIFVGTIQAYIFIMLSMVYMSHKVADEH

SEQ ID NO: 44250 - protein, 88 aa, Staphylococcus aureus
MEQNSYVIIDETGIHARPATMLVQTASKFDSDIQLEYNGKKVNLKSIMGVMSLGVGKDAEITIYADGSDESDAIQAISDVLSKEGLTK

SEQ ID NO: 44251 - protein, 518 aa, Staphylococcus aureus
MSITEKQRQQQAELHKKLWSIANDLRGNMDASEFRNYILGLIFYRFLSEKAEQEYADALSGEDITYQEAWADEEYREDLKAELIDQVGYFIEPQDLFSAMIREIETQDFDIEHLATAIRKVETSTLGEESENDFIGLFSDMDLSSTRLGNNVKERTALISKVMVNLDDLPFVHSDMEIDMLGDAYEFLIGRFAATAGKKAGEFYTPQQVSKILAKIVTDGKDKLRHVYDPTCGSGSLLLRVGKETQVYRYFGQERNNTTYNLARMNMLLHDVRYENFDIRNDDTLENPAFLGNTFDAVIANPPYSAKWTADSKFENDERFSGYGKLAPKSKADFAFIQHMVHYLDDEGTMAVVLPHGVLFRGAAEGVIRRYLIEEKNYLEAVIGLPVNIFYGTSIPTCILVFKKCCQQDDNVLFIDASNDFEKGKNQNHLSDAQVERIIDTYKRKETIDKYSYSATLQEIADNDYNLNIPRYVDTFEEEAPIDLDQVQQDLKNIDKEIAEIEQEINAYLKELGVLKDE

SEQ ID NO: 44252 - protein, 518 aa, Staphylococcus aureus
MSITEKQRQQQAELHKKLWSIANDLRGNMDASEFRNYILGLIFYRFLSEKAEQEYADALSGEDITYQEAWADEEYREDLKAELIDQVGYFIEPQDLFSAMIREIETQDFDIEHLATAIRKVETSTLGEESENDFIGLFSDMDLSSTRLGNNVKERTALISKVMVNLDDLPFVHSDMEIDMLGDAYEFLIGRFAATAGKKAGEFYTPQQVSKILAKIVTDGKDKLRHVYDPTCGSGSLLLRVGKETQVYRYFGQERNNTTYNLARMNMLLHDVRYENFDIRNDDTLENPAFLGHTFDAVIANPPYSAKWTADSKFENDERFSGYGKLAPKSKADFAFIQHMVHYLDDEGTMVVVLPHGVLFRGAAEGIIRRYLIEEKNYLEAVIGLPANIFYGTSIPTCILVFKKCRQQDDNVLFIDASNDFEKGKNQNHLSDAQVERIIATYKRKETIDKYSYSATLQEIADNDYNLNIPRYVDTFEEEAPIDLDQVQQDLKNIDKEIAEIEQEINAYLKELGVLKDE

SEQ ID NO: 44253 - protein, 518 aa, Staphylococcus aureus
MSITEKQRQQQAELHKKLWSIANDLRGNMDASEFRNYILGLIFYRFLSEKAEQEYADALAGEDITYQEAWADEEYREDLKAELIDQVGYFIEPQDLFSAMIREIETQDFDIEHLATAIRKVETSTLGEESENDFIGLFSDMDLSSTRLGNNVKERTALISKVMVNLDDLPFVHSDMEIDMLGDAYEFLIGRFAATAGKKAGEFYTPQQVSKILAKIVTDGKDKLRHVYDPTCGSGSLLLRVGKETQVYRYFGQERNNTTYNLARMNMLLHDVRYENFDIRNDDTLENPAFLGHTFDAVIANPPYSAKWTADSKFENDERFSGYGKLAPKSKADFAFIQHMVHYLDDEGTMAVVLPHGVLFRGAAEGVIRRYLIEEKNYLEAVIGLPANIFYGTSIPTCILVFKKCRQQDDNVLFIDASNDFEKGKNQNHLSDAQVERIINTYKRKETIDKYSYSATLQEITDNDYNLNIPRYVDTFEEEARIDLDQVQQDLKNIDKEIAEIEQEINAYLKELGVLKDE

SEQ ID NO: 44254 - protein, 339 aa, Staphylococcus aureus
MSITEKQRQQQAELHKKLWSIANDLRGNMDASEFRNYILGLIFYRFLSEKAEQEYADALSGEDITYQEAWADEEYREDLKAELIDQVGYFIEPEDLFSAMIREIETQDFDIEHLATAIRKVETSTLGEESENDFIGLFSDMDLISTRLGNNVKERTALISKVMVNLDDLPFVHSDMEIDMLGDAYEFLIGRFAATAGKKAGEFYTPQQVSKILAKIVTDGKDKLRHVYDPTCGSGSLLLRVGKETQVYRYFGQERNNTTYNLARMNMLLHDVRYENFDIRNDDTLENPAFLGNTFDAVIANPPYSAKWTADSKFENDERFSGYGKLAPKSKADFAFIQH

SEQ ID NO: 44255 - protein, 518 aa, Staphylococcus aureus
MSITEKQRQQQAELHKKLWSIANDLRGNMDASEFRNYILGLIFYCFLSEKAEQEYADALSGEDITYQEAWADEEYREDLKVELIDQVGYFIEPQDLFSAMIHEIETQDFDIEHLATAIRKVETSTLGEESENDFIGLFSDMDLSSTRLGNNVKERTALISKVMVNLDDLPFVHSDMEIDMLGDAYEFLIGRFAATAGKKAGEFYTPQQVSKILAKIVTDGKDKLRHVYDPTCGSGSLLLRVGKETQVYRYFGQERNNTTYNLARMNMLLHDVRYENFDIRNDDTLENPAFLGNTFDAVIANPPYSAKWTADSKFENDERFSGYGKLAPKSKADFAFIQHMVHYLDDEGTMAVVLPHGVLFRGAAEGIIRRYLIEEKNYLEAVIGLPANIFYGTSIPTCILVFKKCRQQDDNVLFIDASNDFEKGKNQNHLSDAQVERIIDTYKRKKTIDKYSYSATLQEIADNDYNLNIPRYVDTFEEEAPIDLDQVQQDLKNIDKEIAEIEQEINAYLKELGVLKDE

SEQ ID NO: 44256 - protein, 310 aa, Staphylococcus aureus
MLTTEKLVETLKLDLIAGEEGLSKPIKNADISRPGLEMAGYFSHYASDRIQLLGTTELSFYNLLPDKDRAGRMRKLCRPETPAIIVTRGLQPPEELVEAAKELNTPLIVAKDATTSLMSRLTTFLEHALAKTTSLHGVLVDVYGVGVLITGDSGIGKSETALELVKRGHRLVADDNVEIRQINKDELIGKPPKLIEHLLEIRGLGIINVMTLFGAGSILTEKRIRLNINLENWNKQKLYDRVGLNEETLSILDTEITKKTIPVRPGRNVAVIIEVAAMNYRLNIMGINTAEEFSERLNEEIIKNSHKSEE

SEQ ID NO: 44257 - protein, 321 aa, Staphylococcus aureus
MIFVYALLALVITFVLVPVLIPTLKRMKFGQSIREEGPQSHMKKTGTPTMGGLTFLLSIVITSLVAIIFVDQANPIILLLFVTIGFGLIGFIDDYIIVVKKNNQGLTSKQKFLAQIGIAIIFFVLSNVFHLVNFSTSIHIPFTNVAIPLSFAYVIFIVFWQVGFSNAVNLTDGLDGLATGLSIIGFTMYAIMSFVLGETAIGIFCIIMLFALLGFLPYNINPAKVFMGDTGSLALGGIFATISIMLNQELSLIFIGLVFVIETLSVMLQVASFKLTGKRIFKMSPIHHHFELIGWSEWKVVTVFWAVGLISGLIGLWIGVH

SEQ ID NO: 44258 - protein, 405 aa, Staphylococcus aureus
MEPQTLKLFKVCKMRGIPIFTFINKLDRVGKEPFELLDEIEETLNIETYPMNWPIGMGQSFFGIIDRKSKTIEPFRDEENILHLNDDFELEEDHAITNDSAFEQAIEELMLVEEAGEAFDNDALLSGDLTPVFFGSALANFGVQNFLNAYVDFAPMPNARQTKEDVEVSPFDDSFSGFIFKIQANMDPKHRDRIAFMRVVSGAFERGMDVTLQRTNKKQKITRSTSFMADDKETVNHAVAGDIIGLYDTGNYQIGDTLVGGKQTYSFQDLPQFTPEIFMKVSAKNVMKQKHFHKGIEQLVQEGAIQYYKTLHTNQIILGAVGQLQFEVFEHRMKNEYNVDVVMEPVGRKIARWIENEDQITDKMNTSRSILVKDRYDDLVFLFENEFATRWFEEKFLEIKLYSLL

SEQ ID NO: 44259 - protein, 83 aa, Staphylococcus aureus
MINKRFIDEGKTIDVYLFEALNNQIIIAIPDWFWSYQMAMTLDEETCFEAILMQLFVFKEEEEAESIASQLTDWIETYKKEKD

SEQ ID NO: 44260 - protein, 58 aa, Staphylococcus aureus
MISHPDAGKTTLTEKLLYFSGAIREAGTVKGKKTGKFGDQVTGNESLNQRGVGYFLYT

SEQ ID NO: 44261 - protein, 351 aa, Staphylococcus aureus
MKALVKTREGHGNLELLDKEVATPLDDKVKIKVHYAGICGTDIHTYEGHYKVNFPVTLGHEFSGEIVEVGADVKDFKVGDRVTSETTFYVCNECEYCKSKDYNLCNHRKGIGTQVDGVFTNYVIAREESLHHIPDEVSYQSAAMTEPLACAHHGVSKIQVNSGDVAVVMGPGPIGLLVAQVLKSKGATVVVTGLDNDKVRLDKAEALHMDYVVNLQQTDLKTYINGITDGYGADVVVECSGAVPAARQGLDIIRKKGFYSQIGIFKDAEIPFDMEKVIQKEITVVGSRSQKPADWEPSLQLMADGLVNAEALVTKIYDISKWDEAYQHLKSGEGIKALLKPLDLDENEGEN

SEQ ID NO: 44262 - protein, 347 aa, Staphylococcus aureus
MKALKLYGVEDLRYEDNEKPVIESANDVIVKVRATGICGSDTSRYKKMGPYIKGMPFGHEFSGVVDAIGSDVTHVNVGDKVTGCPAIPCYQCEYCLKGEYARCEKLFVIGSYEPGSFAEYVKLPAQNVLKVPDNVDYIEAAMVEPSAVVAHGFYKSNIQPGMTVAVMGCGSIGLLAIQWARIFGAAHIIAIDIDAHKLDIATSLGAHQTINSKEENLEKFIENHYANQIDLAIESSGAKVTIGQILTLPKKGGEVVLLGIPYDDIEIDRVHFEKILRNELTVCGSWNCLSSNFPGKEWTATLHYMKTKDINVKPIISHFLPLEKGPETFDKLVNKKERFDKVMFTIY

SEQ ID NO: 44263 - protein, 48 aa, Staphylococcus aureus
MVESMLTFMLGPLRQITDFYMEHLLVSNSIVIAGYFATGIFKKKKVVN

SEQ ID NO: 44264 - protein, 363 aa, Staphylococcus aureus
MKFLKDTSIAEISSILYLIFPIAGIFFNEVYGPKWLYIISVIVFSLSYLILVIVNNRLNTLMFYILLIIHYFIICYFVFSVHPMLSLFFFYSAFAVPFTFKNNVKKTATNLFILTMIICTIITYLLYNNYFVAMMVYYVVISLIMLDNFKKMKNREYQKEIAEKNRHINTLIAEQERHRIGQDLHDTLGHVFASLSLKSELAYKLIDTDVEKVKAELLAINKLSRESLNKVREIIDDVKLPSFIEEIDSIRKVLKDADIDFTFENKELAQVLSPTKQSMLVMITREAINNVIKHANASKVHGKLKTVNNHKLLLMIEDDGKGIDSDCEVKSISQRVQHLNGTLAVDSTNGTKIIIEISTGGIA

SEQ ID NO: 44265 - protein, 200 aa, Staphylococcus aureus
MTSLIIAEDQNMLRQAMVQLIKLHGDFEILADTDNGLDAMKLIEEYNPNVVILDIEMPGMTGLEVLAEIRKKHLNIKVIIVTTFKRPGYFEKAVVNDVDAYVLKERSIEELVETINKVNNGEKEYSATLMTSFFVDKNPLTPKEQIVLREIGNGLSSKEISEKLFLTDGTVRNYTSVIIDKLFADNRFDAWKKANEKGWI

SEQ ID NO: 44266 - protein, 323 aa, Staphylococcus aureus
MKYLLKGNILLLLLILLTIISLFIGVSELSIKDLLHLTESQRNILFSSRIPRTMSILIAGSSLALAGLIMQQMMQNKFVSPTTAGTMEWAKLGILIALLFFPTGHILLKLVFAVICSICGTFLFVKIIDFIKVKDVIFVPLLGIMMGGIVASFTTFISLRTNAVQSIGNWLNGNFAIITSGRYEILYLSIPLLALTYLFANHFTIVGMGKDFTNNLGLSYEKLINIALFITATITALVVVTVGTLPFLGLVIPNIISIYRGDHLKNAIPHTMMLGAIFVLFSDIVGRIVVYPYEINIGLTIGVFGTIIFLILLMKGRKNYAQQ

SEQ ID NO: 44267 - protein, 34 aa, Staphylococcus aureus
MYNAIYIGSSWRGPNTEAGGKSANNIVQVGGAPT

SEQ ID NO: 44268 - protein, 72 aa, Staphylococcus aureus
LGHDDPTMIRMLQDLSGIDPKTIPVDDKEVMQIFSTPESLGVTEDEILCKTGTFGVPEFGTGFVRQMLEDTK

SEQ ID NO: 44269 - protein, 338 aa, Staphylococcus aureus
MIKQLYKNITICSLAISTALTVFPATSYAKINSEIKAVSEKNLDGDTKMYTRTATTSDSQKNITQSLQFNFLTEPNYDKETVFIKAKGTIGSGLRILDPNGYWNSTLRWPGSYSVSIQNVDDNNNTNVTDFAPKNQDESREVKYTYGYKTGGDFSINRGGLTGNITKESNYSETISYQQPSYRTLLDQSTSHKGVGWKVEAHLINNMGHDHTRQLTNDSDNRTKSEIFSLTRNGNLWAKDNFTPKDKMPVTVSEGFNPEFLAVMSHDKKDKGKSQFVVHYKRSMDEFKIDWNRHGFWGYWSGENHVDKKEEKLSALYEVDWKTHDVKFVKVLNDNEKK

SEQ ID NO: 44270 - protein, 395 aa, Staphylococcus aureus
MLDKNQLAKYKQDHLCEYEKIMSNNEKEALEEKVASLDLDFIAKLYNDLYINKKTIDDVSAVSEVKYDIKSQMSDDEIKRLEEQGLQAIKEGQFAVLLMAGGQGTRLGYKGPKGSFEIEGVSLFELQANQLKTLNHQSGHTIQWYIMTSDINHEETLAYFEAHSYFGYDQEAIHFFKQDNIVALSEEGKLILNQQGRIMETPNGNGGVFKSLDKAGYLEEMSNNGVKYIFLNNIDNVLVKVLDPLFAGFTVEHDYDITSKTIQPKPGESVGRLVNVDCKDTVLEYSELDPEVANQFNNANIGIHAFKLGFILNAVNRELPYHLAIKNLKQLDENFGVIEQPTLKFELFYFDIFTYGTSFVTLQVPREEEFSPLKNKEGKDSVATATEDLRRMGLI

SEQ ID NO: 44271 - protein, 228 aa, Staphylococcus aureus
MMSKSTKKSNDTIVETFKDIIPLSFGEEIGNAASHGVAALLTLLVLPYAAVHSYIAHGTLASVSMSIYVISIFMMFISSTIYHSMQNETPHKYILRIIDHSMIYVAISGTYTPILLTVVGGWIGWTVFILLWGTTLWGILYKSIAVKVNQKLSLIVYLVMGWVGIILLPIIFIRTSWIFILFIFLGGVSYTIGAWFYAQKNRPYFHMIWHIFIVIASLLHLIAILYFM

SEQ ID NO: 44272 - protein, 468 aa, Staphylococcus aureus
MVVGDFPIETDTIVIGAGPGGYVAAIRAAQLGQKVTIVEKGNLGGVCLNVGCIPSKALLHASHRFVEAQHSENLGVIAESVSLNFQKVQEFKSSVVNKLTGGVEGLLKGNKVNIVKGEAYFVDNNSLRVMDEKSAQTYNFKNAIIATGSRPIEIPNFKFGKRVIDSTGALNLQEVPGKLVVVGGGYIGSELGTAFANFGSEVTILEGAKDILGGFEKQMTQPVKKGMKEKGVEIVTEAMAKSAEETDNGVKVTYEAKGEEKTIEADYVLVTVGRRPNTDELGLEELGVKFADRGLLEVDKQSRTSISNIYAIGDIVPGLPLAHKASYEAKVAAEAIDGQAAEVDYIGMPAVCFTEPELATVGYSEAQAKEEGLAIKASKFPYAANGRALSLDDTNGFVKLITLKEDDTLIGAQVVGTGASDIISELGLAIEAGMNAEDIALTIHAHPTLGEMTMEAAEKAIGYPIHTM

SEQ ID NO: 44273 - protein, 127 aa, Staphylococcus aureus
DIDLNFSGEYQPNAHNYTKVLFGEDKVFRAGTIGTVAEKTAFGYVKGYLNDQGIHKRGAEIDRLVKGCTGVKRTTGQHPGGIIVVPDYMDIYDFTPIQYPADDQNSAWMTTHFDFHSIHDNVLKLDI

SEQ ID NO: 44274 - protein, 285 aa, Staphylococcus aureus
MFKDFFNRTKKKKYLTVQDSKNNDVPAGIMTKCPKCKKIMYTKELAENLNVCFNCDHHIALTAYKRIEAISDEGSFTEFDKGMTSANPLDFPSYLEKIEKDQQKTGLKEAVVTGTAQLDGMKFGVAVMDSRFRMGSMGSVIGEKICRIIDYCTENRLPFILFSASGGARMQEGIISLMQMGKTSVSLKRHSDAGLLYISYLTHPTTGGVSASFASVGDINLSEPKALIGFAGRRVIEQTINEKLPDDFQTAEFLLEHGQLDKVVHRNDMRQTLSEILKIHQEVTK

SEQ ID NO: 44275 - protein, 314 aa, Staphylococcus aureus
MLDFEKPLFEIRNKIESLKESQDKNDVDLQEEIDMLEASLERETKKIYTNLKPWDRVQIARLQERPTTLDYIPYIFDSFMELHGDRNFRDDPAMIGGIGFLNGRAVTVIGQQRGKDTKDNIYRNFGMAHPEGYRKALRLMKQAEKFNRPIFTFIDTKGAYPGKAAEERGQSESIATNLIEMASLKVPVIAIVIGEGGSGGALGIGIANKVLMLENSTYSVISPEGAAALLWKDSNLAKIAAETMKITAHDIKQLGIIDDVISEPLGGAHKDVEQQALAIKSAFVAQLDSLESLSRDEIANDRFEKFRNIGSYIE

SEQ ID NO: 44276 - protein, 533 aa, Staphylococcus aureus
MLQVTDVSLRFGDRKLFEDVNIKFTEGNCYGLIGANGAGKSTFLKILSGELDSQTGHVSLGKNERLAVLKQDHYAYEDERVLDVVIKGHERLYEVMKEKDEIYMKPDFSDEDGIRAAELEGEFAEMNGWNAEADAANLLSGLGIDPTLHDKKMAELENNQKIKVLLAQSLFGEPDVLLLDEPTNGLDIPAISWLEDFLINFDNTVIVVSHDRHFLNNVCTHIADLDFGKIKVYVGNYDFWYQSSQLAQKMAQEQNKKKEEKMKELQDFIARFSANASKSKQATSRKKQLEKIELDDIQPSSRRYPFVKFTPEREIGNDLLIVQNLSKTIDGEKVLDNVSFTMNPNDKAILIGDSEIAKTTLLKILAGEMEPDEGSFKWGVTTSLSYFPKDNSEFFEGVNMNLVDWLRQYAPEDEQTETFLRGFLGRMLFSGEEVKKKASVLSGGEKVRCMLSKMMLSSANVLLLDEPTNHLDLESITAVNDGLKSFKGSIIFTSYDFEFINTIANRVIDLNKQGGVSKEIPYEEYLQEIGVLK

SEQ ID NO: 44277 - protein, 235 aa, Staphylococcus aureus
MQMARKVVVVDDEKPIADILEFNLKKEGYDVYCAYDGNDAVDLIYEEEPDIVLLDIMLPGRDGMEVCREVRKKYEMPIIMLTAKDSEIDKVLGLELGADDYVTKPFSTRELIARVKANLRRHYSQPAQDTGNVTNEITIKDIVIYPDAYSIKKRGEDIELTHREFELFHYLSKHMGQVMTREHLLQTVWGYDYFGDVRTVDVTIRRLREKIEDDPSHPEYIVTRRGVGYFLQQHE

SEQ ID NO: 44278 - protein, 818 aa, Staphylococcus aureus
MLFGRLTERAQRVLAHAQEEAIRLNHSNIGTEHLLLGLMKEPEGIAAKVLESFNITEDKVIEEVEKLIGHGQDHVGTLHYTPRAKKVIELSMDEARKLHHNFVGTEHILLGLIRENEGVAARVFANLDLNITKARAQVVKALGNPEMSNKNAQASKSNNTPTLDSLARDLTVIAKDGTLDPVIGRDKEITRVIEVLSRRTKNNPVLIGEPGVGKTAIAEGLAQAIVNNEVPETLKDKRVMSLDMGTVVAGTKYRGEFEERLKKVMEEIQQAGNVILFIDELHTLVGAGGAEGAIDASNILKPALARGELQCIGATTLDEYRKNIEKDAALERRFQPVQVDEPSVVDTVAILKGLRDRYEAHHRINISDEAIEAAVKLSNRYVSDRFLPDKAIDLIDEASSKVRLKSHTTPNNLKEIEQEIEKVKNEKDAAVHAQEFENAANLRDKQTKLEKQYEEAKNEWKNAQNGMSTSLSEEDIAEVIAGWTGIPLTKINETESEKLLSLEDTLHERVIGQKDAVNSISKAVRRARAGLKDPKRPIGSFIFLGPTGVGKTELARALAESMFGDDDAMIRVDMSEFMEKHAVSRLVGAPPGYVGHDDGGQLTEKVRRKPYSVILFDEIEKAHPDVFNILLQVLDDGHLTDTKGRTVDFRNTIIIMTSNVGAQELQDQRFAGFGGSSDGQDYETIRKTMLKELKNSFRPEFLNRVDDIIVFHKLTKEELKEIVTMMVNKLTNRLSEQNINIIVTDKAKDKIAEEGYDPEYGARPLIRAIQKTIEDNLSELILDGNQIEGKKVTVDHDGKEFKYDIAEQTSETKTPSQA

SEQ ID NO: 44279 - protein, 67 aa, Staphylococcus aureus
MDKESVVASLARNKKIAVETMAGQRYIIERILHTNDEKHIHILKPKDVVLDVDSIKEIDENHLNDAT

SEQ ID NO: 44280 - protein, 416 aa, Staphylococcus aureus
MSFFKRLKDKFATNKENEEVKSLREEQGQDKLEDTHSEGSTQDVNDLAENAEVKKKPRKLSEADFDDDGLISIEDFEEIEAQKMGAKFKAGLEKSRQNFQEQLNNLIARYRKVDEDFFEALEEMLITADVGFNTVMTLTEELRMEAQRRNIQDTEDLREVIVEKIVEIYHQEDDNSEAMNIEDGRLNVILMVGVNGVGKTTTIGKLAYRYKMEGKKVMLAAGDTFRAGAIDQLKVWGERVGVDVISQSEGSDPAAVMYDAINAAKNKGVDILICDTAGRLQNKTNLMQELEKVKRVINRAVPDAPHEALLCLDATTGQNALSQARNFKEVTNVTGIVLTKLDGTAKGGIVLAIRNELHIPVKYVGLGEQLDDLQPFNPESYVYGLFADMIEQNDEITTVENDQIVTEEKDDNHGAK

SEQ ID NO: 44281 - protein, 110 aa, Staphylococcus aureus
MGQNDLVKTLRMNYLFDFYQSLLTNKQRNYLELFYLEDYSLSEIADTFNVSRQAVYDNIRRTGDLVEDYEKKLELYQKFEQRREIYDEMKQHLSNPEQIQRYIQQLEDLE

SEQ ID NO: 44282 - protein, 399 aa, Staphylococcus aureus
MYRYKPLLQSIHLPNGIKISNRFVLSPMTVNASTKEGYITKADLAYAARRSNSAGMQVTGAAYIEPYGKLFEYGFNIDHDACIPGLTNMASTMKQHGSLAIIQLAHAGRFSNQAILNFGKVYGPSPMTLHSPIEHVVIAMSHEKINSIIQQYRDATLRAIKAGFDGVEISIAQRLLIQTFFSTFSNRRTDHYGADSLKNRARLCLEVMRAVQEVIDKEAPDNFILGFRATPEETRGSDLGYTIDEFNQLIDWVMDVSNIQYLAIASWGRHIYQNTSRTPGDHFGRPVNQIVYEHLAGRIPLIASGGINSPESALDALQHADMVGMSSPFVTEPDFVHKLAEQRPHDINLEFSMADLEDLAIPHAAFKDIVKMMDYGEGLKKHTRDALRQLEQNYHDSSS

SEQ ID NO: 44283 - protein, 103 aa, Staphylococcus aureus
MNREEVQLLGFEIVAFAGDARSKFLEALTAAQAGDFAKADALIEEGNNCIAEAHRAQTSLLAKEAQGDDIAYSVTMMHGQDHLMTTILLKDLMKHLLEFYKRG

SEQ ID NO: 44284 - protein, 570 aa, Staphylococcus aureus
MMQKLIAQIEKGKPFFEKLSRNIYLRAIRDGFISAMPVILFSSIFLLIAYVPNIFGFKWDKGMEAILMKPYNYTMGLVAFLVAGTTAKSLTDSFNRKLESTNQINFISTMLAAMCGFLFLASDPAKDGGFLSAFMGTKGLLTAFLSAFVTVIVYNFCVKRNITIKMPKEVPPNISQVFKDLIPFSAVIIILYALDLVIRNSFKSNVAEGILKLFEPLFTAADGWIGVTIIFGAFALFWFVGIHGPSIVEPAIAAITYANIEANFKLLQAGEHADKIITSGTQMFIVTFGGTGATLVVPFMFMWMTKSKRNKAIGRASVVPTFFGVNEPILFGAPLVLNPVFFIPFVLAPIVNVWIFKLFVEVLGMNSFSVNLPWTTPGPLGIIMGTGFGLWSFVLAITLIVVDIIIYYPFLKVYDSEILDEEEGRKESNSDLKEKVAANFDTKKADSILAASGVSDDAAKASNITEQTNVLVLCAGGGTSGLLANALNKAAEEYHVPVKAAAGGYGAHMDIMKEYQLIILAPQVASNYEDIKQDTDRLGIKLAKTQGAEYIKLTRDGQAALDFVQQQFEN

SEQ ID NO: 44285 - protein, 253 aa, Staphylococcus aureus
MASTLEIKDLHVSIEDKEILKGVNLTINTDEIHAIMGPNGTGKSTLSSAIMGHPSYEVTKGEVLLDGVNILELEVDERAKAGLFLAMQYPSEITGVTNADFMRSAINAKREEGQEINLMQFIKKLDKNMDFLDIDKDMAQRYLNEGFSGGEKKRNEILQLMMLEPKFAILDEIDSGLDIDALKVVSKGINQMRGENFGALMITHYQRLLNYITPDKVHVMYAGKVVKSGGPELAKRLEEEGYEWVKEEFGSAE

SEQ ID NO: 44286 - protein, 290 aa, Staphylococcus aureus
MKKKALLPLFLGIMVFLAGCDYSKPEKRSGFFYNTFVDPMKNVLDWLGNNLLNDNYGLAIIILVLVIRIILLPFMLSNYKNSHMMRQKMKVAKPEVEKIQEKVKRARTQEEKMAANQELMQVYKKYDMNPIKSMLGCLPMLIQLPIIMGLYFVLKDQLVDGLFKYPHFLWFDLGRPDIWITIIAGVLYFIQAYVSSKTMPDEQRQMGYMMMVISPIMIIWISLSSASALGLYWSVSAAFLVVQTHFANIYYEKVAKKEVQPFIEAYEREHNGGSNKKGKNTQVVSKKKKK

SEQ ID NO: 44287 - protein, 154 aa, Staphylococcus aureus
MNFNNLDQLYRSVIMDHYKNPRNKGVLDNGSMTVDMNNPTCGDRIRLTFDIEDGIIKDAKFEGEGCSISMASASMMTQAVKGHSLGEAMQMSQEFTKMMLGEDYVITEEMGDIEALQGVSQFPARIKCATLAWKALEKGTVAKEGKAEGTTEEE

SEQ ID NO: 44288 - protein, 419 aa, Staphylococcus aureus
MAQEVIKIRGGRTLNGEVNISGAKNSAVAIIPATLLAQGHVKLEGLPQISDVKTLVSLLEDLNIKASLNGTELEVDTTEIQNAALPNNKVESLRASYYMMGAMLGRFKKCVIGLPGGCPLGPRPIDQHIKGFKALGAEIDESSTTSMKIEAKELKGAHIFLDMVSVGATINIMLAAVYATGQTVIENAAKEPEVVDVANFLTSMGANIKGAGTSTIKINGVKELHGSEYQVIPDRIEAGTYMCIAAACGENVILNNIVPKHVETLTAKFSELGVNVDVRDERIRINNNAPYQFVDIKTLVYPGFATDLQQPITPLLFMANGPSFVTDTIYPERFKHVEELKRMGANIEVDEGTATIKPSTLHGAEVYASDLRAGACLIIAGLIAEGVTTIYNVKHIYRGYTDIVEHLKALGADIWTETV

SEQ ID NO: 44289 - protein, 38 aa, Staphylococcus aureus
MNDALLINRMCKGKILTIKIKYFTNKVKLIYNANNAKN

SEQ ID NO: 44290 - protein, 237 aa, Staphylococcus aureus
MAKLNVEVFADGADIEEMKAAYKNKQVDGFTTNPSLMAKAGVTDYKAFAEEAVKEIPDASISFEVFADDLETMEKEAAILKQYGENVFVKIPIVNTKGESTIPLIKKLSADNVRLNVTAVYTIEQVKEITEAVTEGVPTYVSVFAGRIADTGVDPLPLMKEAVKVTHSKDGVKLLWASCRELFNVIQADEIGADIITRPADVVKKVNTNLGRDINELSVDTVKGFAKDIQSSGLSIL

SEQ ID NO: 44291 - protein, 335 aa, Staphylococcus aureus
MKMIGFEKPFKLEEGNLFKVYEQRKPTPENDDILVKVNSISVNPVDTKQRQMKVTQAPRVLGFDAIGTVEAIGPDVTLFSPGDVVFYAGSPNRQGSNATYQLVSEAIVAKAPHNISANEAVSLPLTGITAYETFFDTFKISHNPSENVGKSVLIINGAGGVGSIATQIAKRYGLTVITTASRQETTEWCEKMGADIVLNHKEDLVRQFKEKEIPLVDYIFCTYNTDLYYNTMIELIKPLGHITTIVAFNEDQDLNALKLKSITFTHEFMFARPIHRTPDMIKQHEYLEDITKNIELGHYQPTTTQVFEGLSPENLYQAHQLLEKQSMIGKLVINI

SEQ ID NO: 44292 - protein, 419 aa, Staphylococcus aureus
MKNNKISGFQWAMTIFVFFVITMALSIMLRDFQSIIGVKHFIFEVTDLAPLIAAIICILVFKYKKVQLAGLKFSISLKVIERLLLALILPLIILIIGMYSFNTFADSFILLQSTGLSVPITHILIGHILMAFVVEFGFRSYLQNIVETKMNTFFASIVVGLMYSVFSANTTYGTEFAAYNFLYTFSFSMILGELIRATKGRTIYIATTFHASMTFGLIFLFSEEIGDLFSIKVIAISTAIVAVGYIGLSLIIRGIAYLTTRRNLEELEPNNYLDHVNDDEETNHTEAEKSSSNIKDAEKTGVATASTVGVAKNDTENTVADEPSIHEGTEKTEPQHHIGNQTESNHDEDHDITSESVESAESVKQAPQSDDLTNDSNEDEIEQSLKEPATYKEDRRSSVVIDAEKHIEKTEEQSSDKNK

SEQ ID NO: 44293 - protein, 310 aa, Staphylococcus aureus
MAQKPVDNITQIIGGTPVVKLRNVVDDNAADVYVKLEYQNPGGSVKDRIALAMIEKAEREGKIKPGDTIVEPTSGNTGIGLAFVCAAKGYKAVFTMPETMSQERRNLLKAYGAELVLTPGSEAMKGAIKKAKELKEEHGYFEPQQFENPANPEVHELTTGPELLQQFEGKTIDAFLAGVGTGGTLSGVGKVLKKEYPNIEIVAIEPEASPVLSGGEPGPHKLQGLGAGFIPGTLNTEIYDSIIKVGNDTAMEMSRRVAKEEGILAGISSGAAIYAAIQKAKELGKGKTVVTVLPSNGERYLSTPLYSFDD

SEQ ID NO: 44294 - protein, 116 aa, Staphylococcus aureus
MTNHKLIEAVTKSQLRTDLPSFRPGDTLRVHVRIIEGTRERIQVFEGIVIKRRGGGVSETFTVRKISSGVGVERTFPLHTPKIEKIEVKRRGKVRRAKLYYLRSLRGKAARIQEIR

SEQ ID NO: 44295 - protein, 210 aa, Staphylococcus aureus
MFTGIVEEIGVVKSVQIRQSVRTIEIEAHKITADMHIGDSISVNGACLTVIDFDQTSFTVQVIKSTENKTYLADVKRQSEVNLERAMSGNGRFGGHFVLGHVDELGTVSKINETANAKIITIQCSQHINNQLVKQGSITVDGVSLTVFDKHDNSFDIHLIPETRRSTILSSKKLGDKVHLETDVLFKYVENILNKDKDQLSVDKLRAFGF

SEQ ID NO: 44296 - protein, 393 aa, Staphylococcus aureus
MQFDNIDSALMALKNGETIIVVDDENRENEGDLVAVTEWMNDNTINFMAKEARGLICAPVSKDIAQRLDLVQMVDDNSDIFGTQFTVSIDHVDTTTGISAYERTLTAKKLIDPSSEAKDFNRPGHLFPLVAQDKGVLARNGHTEAAVDLAKLTGAKPAGVICEIMNDDGTMAKGQDLQNFKEKHQLKMITIDDLIEYRKKLEPEIEFKAKVKMPTDFGTFDMYGFKATYTDEEIVVLTKGAIRQHENVRLHSACLTGDIFHSQRCDCGAQLESSMKYINEHGGMIIYLPQEGRGIGLLNKLRAYELIEQGYDTVTANLALGFDEDLRDYHIAAQILKYFNIEHINLLSNNPSKFEGLKQYGIDIAERIEVIVPETVHNHDYMVTKKIKMGHLI

SEQ ID NO: 44297 - protein, 307 aa, Staphylococcus aureus
MINKDIYQALQQLIPNEKIKVDEPLKRYTYTKTGGNADFYITPTKNEEVQAVVKYAYQNEIPVTYLGNGSNIIIREGGIRGIVISLLSLDHIDVSDDAIIAGSGAAIIDVSRVARDYALTGLEFACGIPGSIGGAVYMNAGAYGGEVKDCIDYALCVNEQGSLIKLTTKELELDYRNSIIQKEHLVVLEAAFTLAPGKMTEIQAKMDDLTERRESKQPLEYPSCGSVFQRPPGHFAGKLIQDSNLQGHRIGGVEVSTKHAGFMVNVDNGTATDYENLIHYVQKTVKEKFGIELNREVRIIGEHPKES

SEQ ID NO: 44298 - protein, 104 aa, Staphylococcus aureus
MPKVYGSLIDTETRCRHYFTEEDIIAIKFKCCNKYYPCYKCHNEFEKHAIKRWSEPSFNEKAILCGVCKHELTINEYMMVERCPNCQSRFNNRCKYHYHIYFEI

SEQ ID NO: 44299 - protein, 293 aa, Staphylococcus aureus
MTHDYIVKALAFDGEIRAYAALTTETVQEAQTRHYTWPTASAAMGRTMTATAMMGAMLKGDQKLTVTVDGQGPIGRIIADANAKGEVRAYVDHPQTHFPLNEQGKLDVRRAVGTNGSIIVVKDVGMKDYFSGASPIVSGELGEDFTYYYATSEQTPSSVGLGVLVNPDNTIKAAGGFIIQVMPGAKDETISKLEKAISEMTPVSKLIEQGLTPEGLLNEILGEDHVQILEKMPVQFECNCSHEKFLNAIKGLGEAEIQNMIKEDHGAEAVCHFCGNKYKYTEEELNVLLESLA

SEQ ID NO: 44300 - protein, 60 aa, Staphylococcus aureus
MAKKESFFKGVKSEMEKTSWPTKEELFKYTVIVVSTVIFFLVFFYALDLGITALKNLLFG

SEQ ID NO: 44301 - protein, 554 aa, Staphylococcus aureus
MTDKKYTAADMVIDTLKNNGVEYVFGIPGAKIDYLFNALIDDGPELIVTRHEQNAAMMAQGIGRLTGKPGVVLVTSGPGVSNLTTGLLTATSEGDPVLALGGQVKRNDLLRLTHQSIDNAALLKYSSKYSEEVQDPESLSEVMTNAIRIATSGKNGASFISIPQDVISSPVESKAISLCQKPNLGVPSEQDINDVIEAIKNASFPVLLAGMRSSSAEETNAIRKLVERTNLPVVETFQGAGVISRELENHFFGRVGLFRNQVGDELLRKSDLVVTIGYDPIEYEASNWNKELETQIINIDEVQAEITNYMQPKKELIGNIAKTIEMISEKVDEPFINQQHLDELEQLRTHIDEETGIKATHEEGILHPVEIIESMQKVLTDDTTVTVDVGSHYIWMARNFRSYNPRHLLFSNGMQTLGVALPWAISAALVRPNTQVVSVAGDGGFLFSSQDLETAVRKNLNIIQLIWNDGKYNMVEFQEEMKYKRSSGVDFGPVDFVKYAESFGAKGLRVTNQEELEAAIKEGYETDGPVLIDIPVNYKDNIKLSTNMLPDVFN

SEQ ID NO: 44302 - protein, 234 aa, Staphylococcus aureus
MTNVLYQHGTLGTLMAGLLKGTASINELLQHGDLGIATLTGSNGEVIFLDGKAYHANEHKEFVELKGDELTPYATVTKFVADTSYETKDKSSEAVFAEIKEKMLSENLFSAVKISGLFKKMHVRMMPAQEPPYTRLIDSARRQPEQTETYVKGSVVGFFTPELFHGIGSAGFHVHFANDDRNFGGHVLDFEVEDVKVEIQNIETFEQHFPIQDKDFTKANIDYKDIADEIREAE

SEQ ID NO: 44303 - protein, 380 aa, Staphylococcus aureus
MKIGITCYPSMGGSGIIATELGIKLAERGHEVHFITSNIPFRIRKPLPNMIFHQVEVNQYAVFQYPPYDITLSTKIAEVIKEYDLDLLHMHYAVPHAICGILAREMSGKDIKIMTTLHGTDITVLGYDHSLQGAIKFGIEKSDIVTSVSKSLAQETHEIIETNKEIIPIYNFVRENEFPTKHNTALKSQFGIAPDEKVLIHVSNFRQVKRIDTIIETFAKVREKIPSKLILLGDGPELVPMRQLTKELNVEEDVLFLGKQDCVSEFYQLSDLVLLLSEKESFGLTLLEAMKTGVVPIGSNAGGIKEVIKHGETGFVVDVGDCDSASDYAIRLLEDKALYNKLQKNMLADIAERFGSELITDQYEYYYQKMLNEHNKSKGE

SEQ ID NO: 44304 - protein, 400 aa, Staphylococcus aureus
MDKSLFEQARPILEQIQDNGFEAYYVGGSVRDYVMGRNIHDIDITTSATPDEIESIFSHTIPVGKEHGTINVVFNDENYEVTTFRAEEDYVDHRRPSGVTFVRDLYEDLQRRDFTMNAIAMDTAYKLYDYFDGQQDINNRIIRTVGIAEERFQEDALRMIRCLRFQSQLSFDIAMETFEAMRTQMADIKFLSIERIVIELTKLMRGINVEESFNHLKSLKAFNYMPYFEQLDMNQINVTEPIDLELLIAIVSVKFDINYSLKPLKLSNRQVKDINQYIQIMNALPSIITKEQLKMFVYDYDTNLIKNVMVAADVLKANDIQGHEPLIVNLQTIDETLHRLPMHNRKDMMVNGGVLMAHLNAKSGPWLKDVLRQIEIAIVTGKVSNEETEILKWVDNHVKI

SEQ ID NO: 44305 - protein, 256 aa, Staphylococcus aureus
MFKKLINKKNTINNYNEELDSSNIPEHIAIIMDGNGRWAKKRKMPRIKGHYEGMQTIKKITRIASDIGVKYLTLYAFSTENWSRPESEVNYIMNLPVNFLKTFLPELIEKNVKVETIGFTDKLPKSTIEAINNAKEKTANNTGLKLIFAINYGGRAELVHSIKNMFDELHQQGLNSDIIDETYINNHLMTKDYPDPELLIRTSGEQRISNFLIWQVSYSEFIFNQKLWPDFDEDELIKCIKIYQSRQRRFGGLSEE

SEQ ID NO: 44306 - protein, 35 aa, Staphylococcus aureus
MKDSENLVFFGFEVLFVFYKMAYIYEALIKYGIVN

SEQ ID NO: 44307 - protein, 583 aa, Staphylococcus aureus
MFFYFWGVFLYNSLHKCKGFSFHVLLSLTEILKGCLATMDKELWIERANDSLVKHFYEQQSDIEQREGFESKLTFGTAGIRGKFGLGEGRLNKFTIEKLALGLARYLNAQTNSPTIVIHYDIRHLSTEFAQIIANVLANHQITVYLPDTYKTTPELSFAVRNLNTTAGIMITASHNPKDYNGIKVYGSDGAQLSTDASELASRYIEEVGDPLQIDIPISKQNTSYIKPFPKSVTDDYMKHIQNMIGYIPKSDLQVVFTSLHGTSVPIVPELLKSLNFNQFNLVDAQCKPDPNFSSVQSANPEDHRAFDQAVELANKSHADLLISTDPDADRLGIAERDAHGHITYFNGNQIGALLLNYRIQQTSQLRHRLMIQSIVSSELTKSLARYNNVKYKEVLTGFKFIAQEIRQLDDHQNMIFAFEESYGFLSEPFVRDKDAVQIVPLIIKYASELKLYGKTLKDELEQIYQTVGRHEDTLFSHTLEGLEGKKKIESIMTHFRSNPPQEIQGLKVKAIEDYLTSEVYHLDKDTTSQINSSKSNVIRVLFDEGFIALRPSGTEPKIKLYVSLKCPDFDDVAQKINAMIFS

SEQ ID NO: 44308 - protein, 268 aa, Staphylococcus aureus
MKFAVIGNPISHSLSPVMHRANFNSLGLDDTYEALNIPIEDFHLIKEIISKKELDGFNITIPHKERIIPYLDYVDEQAINAGAVNTVLIKDGKWIGYNTDGIGYVKGLHSVYPDLENAYILILGAGGASKGIAYELAKFVKPKLTVANRTMARFESWNLNINQISLADAEKYLAEFDIVINTTPAGMAGNNESIINLKHLSPNTLMSDIVYIPYKTPILEEAERKGNHIYNGLDMFVYQGAESFKIWTNKDADINSMKTAVLQQLKGE

SEQ ID NO: 44309 - protein, 272 aa, Staphylococcus aureus
MKTVSLLIDMKQKQTKISMVTAYDFPSAKQVEAAGIDMILVGDSLGMTVLGYESTVQVTLADMIHHGRAVRRGAPNTFVVVDMPIGAVGISMTQDLNHALKLYQETNANAIKAEGAHITPFIEKATAIGIPVVAHLGLTPQSVGVMGYKLQGATKEAAEQLILDAKNVEQAGAVALVLEAIPNDLAEEISKHLTIPVIGIGAGKGTDGQVLVYHDMLNYGVEHKAKFVKQFADFSVGVDGLKQYDQEVKSGAFPSEEYTYKKKIMNEVNNND

SEQ ID NO: 44310 - protein, 948 aa, Staphylococcus aureus
MKEPSIVVKGARAHNLKDIDIELPKNKLIVMTGLSGSGKSSLAFDTIYAEGQRRYVESLSAYARQFLGQMDKPDVDTIEGLSPAISIDQKTTSKNPRSTVATVTEIYDYIRLLYARVGKPYCPNHNIEIESQTVQQMVDRIMELEARTKIQLLAPVIAHRKGSHEKLIEDIGKKGYVRLRIDGEIVDVNDVPTLDKNKNHTIEVVVDRLVVKDGIETRLADSIETALELSEGQLTVDVIDGEDLKFSESHACPICGFSIGELEPRMFSFNSPFGACPTCDGLGQKLTVDVDLVVPDKDKTLNEGAIEPWIPTSSDFYPTLLKRVCEVYKINMDKPFKKLTERQRDILLYGSGDKEIEFTFTQRQGGTRKRTMVFEGVVPNISRRFHESPSEYTREMMSKYMTELPCETCHGKRLSREALSVYVGGLNIGEVVEYSISQALNYYKNIDLSEQDQAIANQILKEIISRLTFLNNVGLEYLTLNRASGTLSGGEAQRIRLATQIGSRLTGVLYVLDEPSIGLHQRDNDRLINTLKEMRDLGNTLIVVEHDDDTMRAADYLVDIGPGAGEHGGQIVSSGTPQKVMKDKKSLTGQYLSGKKRIDVPEYRRPASDRKISIRGARSNNLKGIDVDIPLSIMTVVTGVSGSGKSSLVNEVLYKSLAQKINKSKVKPGLYDKIEGIDQLDKIIDIDQSPIGRTPRSNPATYTGVFDDIRDVFAQTNEAKIRGYQKGRFSFNVKGGRCEACKGDGIIKIEMHFLPDVYVPCEVCDGKRYNRETLEVTYKGKNIADILEMTVEEATQFFENIPKIKRKLQTLVDVGLGYVTLGQQATTLSGGEAQRVKLASELHKRSTGKSIYILDELTTGLHVDDISRLLKVLNRLVENGDTVVIIEHNLDVIKTADYIIDLGPEGGSGGGTIVATGTPEDIAQTKSSYTGKYLKEVLERDKQNTEDK

SEQ ID NO: 44311 - protein, 398 aa, Staphylococcus aureus
MLNNKRLFTSESVTEGHPDKIADQVSDAILDAILKDDPNARVACETTVTTGMALIAGEISTTTYVDIPKVVRETIKEIGYTRAKYGYDYETMAILTAIDEQSPDIAQGVDKALEYRDKDSEEEIEATGAGDQGLMFGYATNETETYMPLAIYLSHQLAKRLSDVRKDGTLNYLRPDGKVQVTVEYDENDNPVRIDTIVVSTQHADDVTLEQIQEDIKAHVIYPTVPENLINEQTKFYINPTGRFVIGGPQGDAGLTGRKIIVDTYGGYARHGGGCFSGKDPTKVDRSAAYAARYVAKNIVAAGLADQCEVQLAYAIGVAEPVSIAIDTFGTGKVSEGQLVEAVRKHFDLRPAGIIKMLDLKQPIYKQTAAYGHFGRTDVLFPWEKLDKVEELKDAVKY

SEQ ID NO: 44312 - protein, 213 aa, Staphylococcus aureus
MLKRMRDDIKMVFEQDPAARSTLEVITTYAGLHAVWSHLIAHKLYNQKKYVAARAISQISRFFTGIEIHPGAKIGKRLFIDHGMGVVIGETCTIGDNVTIYQGVTLGGTGKERGKRHPDIGDNVLIAAGAKVLGNIKINSNVNIGANSVVLQSVPSYSTVVGIPGHIVKQDGVRVGKTFDHRHLPDPIYEQIKHLERQLEKTRNGEIQDDYII

SEQ ID NO: 44313 - protein, 691 aa, Staphylococcus aureus
MLKRLKEKSNDEIVQNTINKRINFIFGVIVFIFAVLVLRLGYLQIAQGSHYKQIIKNDENITVNESVPRGRILDRNGKVLVDNASKMAITYTRGRKTTQSEMLDTAEKLSKLIKMDTKKITERDKKDFWIQLHPKKAKAMMTKEQAMLADGSIKQDQYDKQLLSKIGKSQLDELSSKDLQVLAIFREMNAGTVLDPQMIKNEDVSEKEYAAVSQQLSKLPGVNTSMDWDRKYPYGDTLRGIFGDVSTPAEGIPKELTEHYLSKGYSRNDRVGKSYLEYQYEDVLRGKKKEMKYTTDKSGKVTSSEVLNPGARGQDLKLTIDIDLQKEVEALLDKQIKKLRSQGAKDMDNAMMVVQNPKNGDILALAGKQINKSGKMTDYDIGTFTSQFAVGSSVKGGTLLAGYQNKAIKVGETMVDEPLHFQGGLTKRSYFNKNGHVSINDKQALMHSSNVYMFKTALKLAGDPYYSGMALPSDISSPAQKLRRGLNQVGLGVKTGIDLPNETRGQIEPLTNNPGNYLDLSIGQYDTYTPLQLSQYVSTIANDGYRIQPHIGLTIHESTNKDEVGPLKKKINGTVLNKVNNTEKEIKQIQEGFKMAFNDKDGTGYVSFKDTVVPTAGKTGTAEVFQNGEPRVNSTYIGYAPIDDPKLAFSIVYTNQPVPPPWLTGGDLGRDVINYYFKQLGKDDKNKDKDK

SEQ ID NO: 44314 - protein, 564 aa, Staphylococcus aureus
MTKTKQAIHIDNIYWERVQLYIEGHSEGVDLTSGQFVLRNLTETKTLEANEMKIDGNTFICRFNVAILDDGYYLPMDKYLFVYHDQLEYIGQLNPNIIDQAYAALNEEQIEEYNELTTQNGKVNYLLAYDAKVFRKGGVSQHTVYTITPEIASDVNEFVFDIEITLPQEKSGVIATSAHWLHKQGHKASFESRSFLFKAIFNITKLLHIKRSKTILFTSDSRPNLSGNFKYVYDELLRQKVDFDYDIKTVFKANITDRRKWRDKFRLPYLLGKADYIFVDDFHPLIYTVRFRPSQEIIQVWHAVGAFKTVGFSRTGKKGGPFIDSLNHRSYTKAYVSSETDIPFYAEAFGIREENVVPTGVPRTDVLFDEAYATQIKQEMEDELPIIKGKKVILFAPTFRGNGHGTAHYPFFKIDFERLARYCEKHNAVVLFKMHPFVKNRLNISREHRQYFIDVSDHREVNDILFVTDLLISDYSSLIYEYAVFKKPMIFYAFDLEDYITTRDFYEPYESFVPGKIVQSFDALMDALDTEDYEVEKVVPFLDKHFKYQDGRSSERLVKDLFRR

SEQ ID NO: 44315 - protein, 90 aa, Staphylococcus aureus
MNKTDLINAVAEQADLTKKEAGSAVDAVFESIQNSLAKGEKVQLIGFGNFEVRERAARKGRNPQTGKEIDIPASKVPAFKAGKALKDAVK

SEQ ID NO: 44316 - protein, 603 aa, Staphylococcus aureus
MDTKDFKRLEKMYSPRYLPGLDGLRAFAVIGIIIYHLNAQWLSGGFLGVDTFFVISGYLITSLLISEYYRTQKIDLLEFWKRRLKRLIPAVLFLICVVLTFTLIFKPELIIQMKRDAIAAIFYVSNWWYISQNVDYFNQFAIEPLKHLWSLAIEEQFYLLFPLVITFLLHRFKPRNIIQTLFIVSLISLGLMIVIHFITGDNSRVYFGTDTRLQTLLLGCILAFIWPPFALKKDISKKIVVSLDIIGISGFAVLMTLFFIVGDQDQWIYNGGFYIISFATLFIIAIAVHPSSLFAKFLSMKPLLIIGKRSYSLYLWHYPIIVFVNSYYVQGQIPVYVYIIEILLTALMAEISYRFIETPIRKKGFKAFAFLPKKKGQFARTVLVILLLVPSIVVLSGQFDALGKQHEAEKKEKKTEFKTTKKKVVKKDKQEDKQTANSKEDIKKSSPLLIGDSVMVDIGNVFTKKIPNAQIDGKVGRQLVDATPIVKSQYKDYAKKGQKVVVELGTNGAFTKDQLNELLDSFGKADIYLVSIRVPRDYEGRINKLIYEAAEKRSNVHLVDWYKASAGHPEYFAYDGIHLEYAGSKALTDLIVKTMETHATNKK

SEQ ID NO: 44317 - protein, 395 aa, Staphylococcus aureus
MSIMRLFTFILSIFIVGMVEMMVAGIMNLMSQDLHVSEAVVGQLVTMYALTFAICGPILVKLTNRFSSRPVLLWTLLIFIIGNGIIAVAPNFSILVVGRIISSAAAALIIVKVLAITAMLSAPKNRGKMIGLVYTGFSGANVFGVPIGTVIGDLVGWRYTFLFLIIVSIIVGFLMMIYLPKDQEIQRGPVNHEAPSHENHVTSKILRPAEVAKYLIITFLVLIANSVTFVFINPLILSNGHDMSFVSLALLVNGIAGVIGTSLGGIFSDKITSKRWLMISVSIFIVMMLLMNLILPGSGLLLAGLFIWNIMQWSTNPAVQSGVIQHVEGDTSQVMSWNMSSLNAGIGVGGIIGGLVMTHVSVQAITYTSAIIGALGLIVVFTLKNNHYAKTFKSS

SEQ ID NO: 44318 - protein, 378 aa, Staphylococcus aureus
MKEPSIVVKGARAHNLKDIDIELPKNKLIVMTGLSGSGKSSLAFDTIYAEGQRRYVESLSAYARQFLGQMDKPDVDTIEGLSPAISIDQKTTSKNPRSTVATVTEIYDYIRLLYARVGKPYCPNHNIEIESQTVQQMVDRIMELEARTKIQLLAPVIAHRKGSHEKLIEDIGKKGYVRLRIDGEIVDVNDVPTLDKNKNHTIEVVVDRLVVKDGIETRLADSIETALELSEGQLTVDVIDGEDLKFSESHACPICGFSIGELEPRMFSFNSPFGACPTCDGLGQKLTVDVDLVVPDKDKTLNEGAIEPWIPTSSDFYPTLLKRVCEVYKINMDKPFKKLTERQRDILLYGSGDKEIEFTFTQRQGGTRKRTMVFEGVV

SEQ ID NO: 44319 - protein, 434 aa, Staphylococcus aureus [sequence omitted]

SEQ ID NO: 44320 - protein, 152 aa, Staphylococcus aureus
MADRTNKEIKTGRFIATASIVFSILLIIHYFVSLDNATAKALLNLTNQNTSDKAIDYILNSFRFTGIMYILAYLAGFITFWNRHTYVWWFMFAVYVSNSLFTLINLSITIQAIKAAHGAYLTLPILIVIIGSVALAIYMLVVSIKRKSTFNR

SEQ ID NO: 44321 - protein, 474 aa, Staphylococcus aureus
MLSVKKATKFAVANLIIVSTVFSSVTPAIAQSDKSSKDESFAVGNTKNPKNVIFLVGDGMGPSFNTAYRYYKNDSHAKEMTPTAFDSYLKGTNRTYSNDPKQNITDSAAGGTAFSSGHKTYNGAIGVDSNKQKVKTVLERAKEKGKSTGLVSTAELTDATPAAYAAHVTSRDDKNEIAKQFYKDKINGKHKVDVLLGGGAKYFGKSNGNLDKKFKKDGYDLATNSKDLSKSDKDKVLGLFADKNMPLAIDASKDEPSLADMQQSALSKLERNKKGFFLMVEGASIDKSAHSNDITGVMSEMEGFEKAFDDAIQYAKKHKDTLVVATADHSTGGLTIGKDKGYEWNPQPIKSMKHSGSYMTEKMAKGEDPEKVINEGYGFEFSQDDMKKVKKENKKLQKLLKKEKDEKSADVEKQTKALQHAIQKPVNDKSYTGWTSDGHTGEDVNTYAYGPRSESFSGNIENTESAKIIFDIFK

SEQ ID NO: 44322 - protein, 184 aa, Staphylococcus aureus
MTDVIIVHSMHGNSRNHWYQWLEHNLTLEGYDVTLFNFESPEAKTVDQWIEAMTKQINVRKKDTYFVTHGLGSITALKYIEMIDQPIEGFFSIAGFKEDAENIDLDIDLSNVTIDYDNIKKKVDNFYGLSSKNDKYVSYKETQRLMNALEGNLRIVEDGGHFLEEDGFETFTALQDRMQDYMTR

SEQ ID NO: 44323 - protein, 157 aa, Staphylococcus aureus
MAERISSKIRRLEKSEEQIKLESLNEVTEAIAANKDSILKAIKLIKTLDDAKLLDALNGAIRGRQVIINKFAVELNKDIYTGLLSNMASMVFLLGELNVSDLSDFLNKVNKGLHVANQASPNAKTTIRSLLGVLKDDDMNRSLTYMLNMLKGMSREE

SEQ ID NO: 44324 - protein, 1385 aa, Staphylococcus aureus
MLNRENKTAITRKGMVSNRLNKFSIRKYTVGTASILVGTTLIFGLGNQEAKAAESTNKELNEATTSASDNQSSDKVDMQQLNQEDNTKNDNQKEMVSSQGNETTSNGNKSIEKESVQSTTGNKVEVSTAKSDEQASPKSTNEDLNTKQTISNQEGLQPDLLENKSVVNVQPTNEENKKVDAKTESTTLNVKSDAIKSNAETLVDNNSNSNNENNADIILPKSTAPKSLNTRMRMAAIQPNSTDSKNVNDLITSNTTLTVVDADNSKTIVPAQDYLSLKSQITVDDKVKSGDYFTIKYSDTVQVYGLNPEDIKNIGDIKDPNNGETIATAKHDTANNLITYTFTDYVDRFNSVKMGINYSIYMDADTIPVDKKDVPFSVTIGNQITTTTADITYPAYKEADNNSIGSAFTETVSHVGNVEDPGYYNQVVYVNPMDKDLKGAKLKVEAYHPKYPTNIGQINQNVTNIKIYRVPEGYTLNKGYDVNTNDLVDVTDEFKNKMTYGSNQSVNLDFGDITSAYVVMVNTKFQYTNSESPTLVQMATLSSTGNKSVSTGNALGFTNNQSGGAGQEVYKIGNYVWEDTNKNGVQELGEKGVGNVTVTVFDNNTNTKVGEAVTKEDGSYLIPNLPNGDYRVEFSNLPKGYEVTPSKQGNNEELDSNGLSSVITVNGKDNLSADLGIYKPKYNLGDYVWEDTNKNGIQDQDEKGISGVTVTLKDENGNVLKTVTTDADGKYKFTDLDNGNYKVEFTTPEGYTPTTVTSGSDIEKDSNGLTTTGVINGADNMTLDSGFYKTPKYNLGNYVWEDTNKDGKQDSTEKGISGVTVTLKNENGEVLQTTKTDKDGKYQFTGLENGTYKVEFETPSGYTPTQVGSGTDEGIDSNGTSTTGVIKDKDNDTIDSGFYKPTYNLGDYVWEDTNKNGVQDKDEKGISGVTVTLKDENDKVLKTVTTDENGKYQFTDLNNGTYKVEFETPSGYTPTSVTSGNDTEKDSNGLTTTGVIKDADNMTLDSGFYKTPKYSLGDYVWYDSNKDGKQDSTEKGIKDVKVILLNEKGEVIGTTKTDENGKYRFDNLDSGKYKVIFEKPTGLTQTGTNTTEDDKDADGGEVDVTITDHDDFTLDNGYYEEETSDSDSDSDSDSDSDSDSDSDSDSDSDSDSDSDSDSDSDSDSDSDSDSDSDSDSDSDSDSDSDSDSDSDSDSDSDSDSDSDSDSDSDSDSDSDSDSDSDSDSDSDSDSDSDSDSDSDSDSDSDSDSDSDSDSDSDSDSDSDSDSDSDSDSDSDSDSDSDSDSDSDSDSDSDSDSDSDSDSDSDSDSDSDSDSDSDSDSDSDSDAGKHTPVKPMSTTKDHHNKAKALPETGNENSGSNNATLFGGLFAALGSLLLFGRRKKQNK

SEQ ID NO: 44325 - protein, 234 aa, Staphylococcus aureus
MTNVLYQHGTLGTLMAGLLEGTATINELLEHGNLGIATLTGSDGEVIFLDGKAYHANEHKEFIELKGDEKVPYASITNFKASKTFPLQQLSQDDVFAQIKNEMLSENLFSAVKIYGTFKHMHVRMMPAQQPPYTRLIDSARRQPEEKRQDIRGAIVGFFTPELFHGVGSAGFHIHFADDERAYGGHVLDFEVDDVVVEIQNFETFQQHFPVNNETFVKAKIDYKDVAEEIREAE

SEQ ID NO: 44326 - protein, 935 aa, Staphylococcus aureus
MNMKKKEKHAIRKKSIGVASVLVGTLIGFGLLSSKEADASENSVTQSDSASNESKSNDSSSVSAAPKTDDTNVSDTKTSSNTNNGETSVAQNPAQQETTQSSSTNATTEETPVTGEATTTTTNQANTPATTQSSNTNAEELVNQTSNETTSNDTNTVSSVNSPQNSTNAENVSTTQDTSTEATPSNNESAPQNTDASNKDVVSQAVNPSTPRMRAFSLAAVAADAPAAGTDITNQLTDVKVTIDSGTTVYPHQAGYVKLNYGFSVPNSAVKGDTFKITVPKELNLNGVTSTAKVPPIMAGDQVLANGVIDSDGNVIYTFTDYVDNKENVTANITMPAYIDPENVTKTGNVTLTTGIGTNTASKTVLIDYEKYGQFHNLSIKGTIDQIDKTNNTYRQTIYVNPSGDNVVLPALTGNLIPNTKSNALIDAKNTDIKVYRVDNANDLSESYYVNPSDFEDVTNQVRISFPNANQYKVEFPTDDDQITTPYIVVVNGHIDPASTGDLALRSTFYGYDSNFIWRSMSWDNEVAFNNGSGSGDGIDKPVVPEQPDEPGEIEPIPEDSDSDPGSDSGSDSNSDSGSDSGSDSTSDSGSDSASDSDSASDSDSASDSDSASDSDSASDSDSASDSDSASDSDSASDSDSASDSDSASDSDSASDSDSASDSDSASDSDSDSDSDSDSDSDSDSDSDSDSDSDSDSDSDSDSDSDSDSDSDSDSDSDSDSDSDSDSDSDSDSDSDSDSDSDSDSDSDSDSDSDSDSDSDSDSDSDSASDSDSDSDSESDSDSDSDSDSDSDSDSDSDSDSESDSDSDSDSDSESDSDSDSDSDSDSASDSDSGSDSDSSSDSDSDSTSDTGSDNDSDSDSNSDSESGSNNNVVPPNSPKNGTNASNKNEAKDSKEPLPDTGSEDEANTSLIWGLLASLGSLLLFRRKKENKDKK

SEQ ID NO: 44327 - protein, 273 aa, Staphylococcus aureus
MSKLQDVIVQEMKVKKRIDSAEEIMELKQFIKNYVQSHSFIKSLVLGISGGQDSTLVGKLVQMSVNELREEGIDCTFIAVKLPYGVQKDADEVDQALRFIEPDEIVTVNIKPAVDQSVQSLKEAGIVLTDFQKGNEKARERMKVQFSIASNRQGIVVGTDHSAENITGFYTKYGDGAADIAPIFGLNKRQGRQLLAYLGAPKELYEKTPTADLEDDKPQLPDEDALGVTYEAIDNYLEGKPVTPEEQKVIENHYIRNAHKRELAYTRYTWPKS

SEQ ID NO: 44328 - protein, 273 aa, Staphylococcus aureus
MDSIIDLRLPRILIALMVGAMLAVSGALLQAALQNPLAEANIIGVSSGALIMRALCMLFIPQLYFYLPLLSFIGGLIPFLIIILLHSKFRFNAVSMILVGVALFVLLNGVLEILTQNPLMKIPQGLTMKIWSDVYILAVSALLGLILTLLLSPKLNLLNLDDIQARSIGFNIDRYRWLTGLLAVFLASATVAIVGQLAFLGIIVPHVVRKLVGGNYRVLIPFSTVIGAWLLLVADLLGRVIQPPLEIPANAILMIVGGPMLIYLICQSQRNRI

SEQ ID NO: 44329 - protein, 244 aa, Staphylococcus aureus
MRMKRFLTIVQILLVVIIIIFGYKIVQTYIEDKQERANYEKLQQKFQMLMSKHQEHVRPQFESLEKINKDIVGWIKLSGTSLNYPVLQGKTNHDYLNLDFEREHRRKGSIFMDFRNELKNLNHNTILYGHHVGDNTMFDVLEDYLKQSFYEKHKIIEFDNKYGKYQLQVFSAYKTTTKDNYIRTDFENDQDYQQFLDETKRKSVINSDVNVTVKDKIMTLSTCEDAYSETTKRIVVVAKIIKVS

SEQ ID NO: 44330 - protein, 494 aa, Staphylococcus aureus
MSTKNKHIPCLITIFGATGDLSHRKLFPSIFHLYQQDNLDEHIAIIGIGRRDITNDDFRNQVKSSIQKHVKDTNKIDAFMEHVFYHRHDVSNEESYQELLDFSNELDSQFELKGNRLFYLAMAPQFFGVISDYLKSSGLTDTKGFKRLVIEKPFGSDLKSAEALNNQIRKSFKEEEIYRIDHYLGKDMVQNIEVLRFANAMFEPLWNNKYISNIQVTSSEILGVEDRGGYYESSGALKDMVQNHMLQMVALLAMEAPISLNSEDIRAEKVKVLKSLRHFQSEDVKKNFVRGQYGEGYIDGKQVKAYRDEDRVADDSNTPTFVSGKLTIDNFRWAGVPFYIRTGKRMKSKTIQVVVEFKEVPMNLYYETDKLLDSNLLVINIQPNEGVSLHLNAKKNTQGIETEPVQLSYSMSAQDKMNTVDAYENLLFDCLKGDATNFTHWEELKSTWKFVDAIQDEWNMVDPEFPNYESGTNGPLESDLLLARDGNHWWDDIQ

SEQ ID NO: 44331 - protein, 129 aa, Staphylococcus aureus
  MISC_FEATURE (17)..(17): X=any amino acid
  MISC_FEATURE (102)..(102): X=any amino acid
  MISC_FEATURE (122)..(122): X=any amino acid
TCYPSPTPVGLSLGPDXPRADEPSSGNLSQSVDGILTRLFATHTGILTSKRSTCPYDHASTPLERSPTIVKGQSTASVICLAPVHFRRSVTRLVSYYALFKXWLLLSQHPSCLGNATSFSTXHIFWDLS

SEQ ID NO: 44332 - protein, 129 aa, Staphylococcus aureus
  MISC_FEATURE (17)..(17): X=any amino acid
  MISC_FEATURE (102)..(102): X=any amino acid
  MISC_FEATURE (122)..(122): X=any amino acid
TCYPSPTPVGLSLGPDXPRADEPSSGNLSQSVDGILSRLFATHTGILTSKRSTCPYDHASTPLERSPTIVKGQSTASVICLAPVHFRRSVTRLVSYYALFKXWLLLSQHPSCLGNATSFSTXHIFWDLS

SEQ ID NO: 44333 - protein, 511 aa, Staphylococcus aureus
MSYFSNVPLFILKRGTVFVMTTQHSKTDVILIGGGIMSATLGTLLKELSPEKNIKVFEKLAQPGEESSNVWNNAGTGHSALCELNYTKEGKDGTVDCSKAIKINEQYQISKQFWAYLVKTGQLDNPDRFIQAVPHMSFVIGEDNVAFIKSRVATLKKSVLFEKMKLSQDEEEMKSWVPLMIEGRKSDEPIALTYDETGTDVNFGALTAKLFENLEQRGVGIQYKQNVLDIKKQKSGAWLVKVKDLETNETTTYESDFVFIGAGGASLPLLQKTGIKQSKHIGGFPVSGLFLRCTNQEVIDRHHAKVYGKAAVGAPPMSVPHLDTRFVDGKRSLLFGPFAGFSPKFLKTGSHMDLIKSVKPNNIVTMLSAGIKEMSLTKYLVSQLMLSNDERMDDLRVFFPNAKNEDWEVITAGQRVQVIKDTEDSKGNLQFGTEVITSDDGTLAALLGASPGASTAVDIMFDVLQRCYRDEFKGWEPKIKEMVPSFGYRLTDHEDLYHKINEEVTKYLQVK

SEQ ID NO: 44334 - protein, 228 aa, Staphylococcus aureus
MIGIIGAMEEEVTILKNKLTQLSEISVAHVKFYTGILKDREVVITQSGIGKVNAAISTTLLINKFKPDVIINTGSAGALDESLNVGDVLISDDVKYHDADATAFGYEYGQIPQMPVAFQSSKPLIEKVSQVVQQQQLTAKVGLIVSGDSFIGSVEQRQKIKKAFPNAMAVEMEATAIAQTCYQFNVPFVVVRAVSDLANGEAEMSFEAFLEKAAVSSSQTVEALVSQL

SEQ ID NO: 44335 - protein, 431 aa, Staphylococcus aureus
MIERYSREEMSNIWTDQNRYEAWLEVEILACEAWSELGHIPKADVQKIRQNAKVNVERAQEIEQETRHDVVAFTRQVSETLGEERKWVHYGLTSTDVVDTALSFVIKQANDIIEKDLERFIDVLAEKAKNYKYTLMMGRTHGVHAEPTTFGVKMALWYTEMQRNLQRFKQVREEIEVGKMSGAVGTFANIPPEIESYVCKHLGIGTAPVSTQTLQRDRHAYYIATLALIATSLEKFAVEIRNLQKTETREVEEAFAKGQKGSSAMPHKRNPIGSENITGISRVIRGYITTAYENVPLWHERDISHSSAERIMLPDVTIALDYALNRFTNIVDRLTVFEDNMRNNIDKTFGLIFSQRVLLALINKGMVREEAYDKVQPKAMISWETKTPFRELIEQDESITSVLTKEELDECFDPKHHLNQVDTIFERAGLA

SEQ ID NO: 44336 - protein, 285 aa, Staphylococcus aureus
MDNVKAIFLDMDGTILHENNQASTYTKDVINQLREKGYKVFLATGRSHSEIHQLVPQDFAVNGIISSNGTIGEVDGEIIFKHGLSLAQVQQITNLAKRQQIYYEVFPFEGNRVSLKEDETWMRDMIRSQDPINGVSHSEWSSRQDALAGKIDWVTKFPEGEYSKIYLFSSNLEKITAFRDELKQNHVQLQISVSNSSRFNAETMAYQTDKGTGIKEMIAHFGIHQEETLVIGDSDNDRAMFEFGHYTVAMKNARPEIQALTSDVTAYTNEEDGAAKYLAKHFLAD

SEQ ID NO: 44337 - protein, 307 aa, Staphylococcus aureus
MANLQKYIEYSREVQQARENNQPIVALESTIISHGMPYPQNVEMATTVEQIIRNNGAIPATIAIIDGKIKIGLESEDLEILATSKDVAKVSRRDLAEVVAMKCVGATTVATTMICAAMAGIQFFVTGGIGGVHKGAEHTMDISADLEELSKTNVTVICAGAKSILDLPKTMEYLETKGVPVIGYQTNELPAFFTRESGVKLTSSVETPERLADIHLTKQQLNLEGGIVVANPIPYEHALSKAYIEAIINEAVVEAENQGIKGKDATPFLLGKIVEKTNGKSLAANIKLVENNAALGAKIAVAVNKLL

SEQ ID NO: 44338 - protein, 209 aa, Staphylococcus aureus
MSKVHVFDHPLIQHKLSYIRDVNTGTKEFRELVDEVGMLMAYEVTRDLELQDVDIETPVTKMTAKRLAGKKLAIVPILRAGLGMTDGILSLVPAARVGHIGLYRDPETLKAVEYFAKLPQDITERQIIVVDPMLATGASAIEAITSLKKRGAKNIRFMCLIAAPEGVEKMHEAHPDVDIYIAALDEKLNDKAYITPGLGDAGDRLFGTK

SEQ ID NO: 44339 - protein, 376 aa, Staphylococcus aureus
MMKKIMTIFGTRPEAIKMAPLVKALEQEKMLEPIVVVTAQHREMLDSVLSTFEIKPKYDLNIMKSGQTLSEITSKSITQLEQVIQLEKPDMVLVHGDTMTTFAGGLAAFYNQVPIGHVEAGLRSYDKYSPFPEEVNRQLVGVLADLHFAPTKNAASHLLSEGKYSESVVVTGNTAIDAMKYTVDDNYKSNIMDKYHDKKFILMTAHRRENIGKPMENIFKAVRRLIDEYTDLALVYPMHKNPKVREVAQKILGSHDRIELIEPLDVVDFHNFAKKSYFILTDSGGIQEEAPSFNKPVLVLRSVTERPEGVEAGTLKVIGTNKQNVYQAAKELIDDERLYHQMSEASNPYGDGFASERIVNHIKYYLNLITEKPSDF

SEQ ID NO: 44340 - protein, 179 aa, Staphylococcus aureus
MELQQAIANRRSVKKFKRDMHIDDALLYQAIEKAADAPNHGMREPWRVVHVPKDRLGDMSKDISKFAFPNELDKQQCHYDAVTKLGGMLLLILKTDPRQRQNDENYFAFGAYAQNLMLLLYEAGIGTCWKSPLYIYDPKVRKTLGIKKDEVLAGFLYLTDLEEDMPKAPRKNRNLITLY

SEQ ID NO: 44341 - protein, 238 aa, Staphylococcus aureus
MTHVEVVATIAPQLSIEETLIQKINHRIDAIDVLELRIDQIENVTVDQVAEMITKLKVMQDSFKLLVTYRTKLQGGYGQFINDLYLNLISDLANINGIDMIDIEWQADIDIEKHQRIIKHLQQYNKEVVISHHNFESTPPLDELQFIFFKMQKFNPEYVKLAVMPHNKNDVLNLLQAMSTFSDTMDCKVVGISMSKLGLISRTAQGVFGGALTYGCIGEPQAPGQIDVTDLKAQVTLY

SEQ ID NO: 44342 - protein, 705 aa, Staphylococcus aureus
MSKQRIYEYAKELNLKSKEIIDELKSMNIEVSNHMQALEDDQIKALDKKFKKEQKNDNKQSTQNNHQKSNNQNQNKGQQKDNKKNQQQNNKGNKGNKKNNRNNKKNNKNNKPQNQPAAPKEIPSKVTYQEGITVGEFADKLNVESSEIIKKLFLLGIVANINQSLNQETIELIADDYGVEVEEEVVINEEDLSIYFEDEKDDPEAIERPAVVTIMGHVDHGKTTLLDSIRHTKVTAGEAGGITQHIGAYQIENDGKKITFLDTPGHAAFTTMRARGAQVTDITILVVAADDGVMPQTIEAINHAKEAEVPIIVAVNKIDKPTSNPDRVMQELTEYGLIPEDWGGETIFVPLSALSGDGIDDLLEMIGLVAEVQELKANPKNRAVGTVIEAELDKSRGPSASLLVQNGTLNVGDAIVVGNTYGRIRAMVNDLGQRIKTAGPSTPVEITGINDVPQAGDRFVVFSDEKQARRIGESRHEASIVQQRQESKNVSLDNLFEQMKQGEMKDLNVIIKGDVQGSVEALAASLMKIDVEGVNVRIIHTAVGAINESDVTLANASNGIIIGFNVRPDSGAKRAAEAENVDMRLHRVIYNVIEEIESAMKGLLDPEFEEQVIGQAEVRQTFKVSKVGTIAGCYVTEGKITRNAGVRIIRDGIVQYEGELDTLKRFKDDAKEVAKGYECGITIENYNDLKEGDVIEAFEMVEIKR

SEQ ID NO: 44343 - protein, 1065 aa, Staphylococcus aureus
MVAYLNIHTAYDLLNSSLKIEDAVRLAVSENVDALAITDTNVLYGFPKFYDACIANNIKPIFGMTIYVTNGLNTVETVVLAKNNDGLKDLYQLSSEIKMNSMENVSFELLQQFSSNLIIIFKNVADEHRDIVQVFDSHEDTYLDHQSVLVQGIKHVWIQNVCYQTRQDADTISALAAIRDNAKLDLIHDQEDFGAHFLTEKEIKQLDINQEYLTQVDVIAQKCNAELKYHQSLLPQYQTPNDESAKKYLWRVLVTQLKKLELNYDVYLERLKYEYKVITNMGFEDYFLIVSDLIHYAKTNDVMVGPGRGSSAGSLVSYLLGITTIDPIKFNLLFERFLNPERVTMPDIDIDFEDTRRERVIQYVQEKYGELHVSGIVTFGHLLARAVARDVGRIMGFDEVTLNEISSLIPHKLGITLDEAYQIDDFKKFVHRNHRHERWFSICKKLEGLPRHTSTHAAGIIINDHPLYEYAPLTKGDTGLLTQWTMTEAERIGLLKIDFLGLRNLSIIHQILIQVKKDLGINIDIEKIPFDDQKVFELLSQGDTTGIFQLESDGVRSVLKKLKPEHFEDIVAVTSLYRPGPMEEIPTYITRRHDPSKVQYLHPHLEPILKNTYGVIIYQEQIMQIASTFANFSYGEADILRRAMSKKNRAVLESERQHFIEGAKQNGYHEDISKQIFDLILKFADYGFPRAHAVSYSKIAYIMSFLKVHYPNYFYANILSNVIGSEKKTAQMIEEAKKQGITILPPNINESHWFYKPSQEGIYLSIGTIKGVGYQSVKVIVDERYQNGKFKDFFDFARRIPKRVKTRKLLEALILVGAFDAFGKTRSTLLQAIDQVLDGDLNIEQDGFLFDILTPKQMYEDKEELPDALISQYEKEYLGFYVSQHPVDKKFVAKQYLTIFKLSNAQNYKPILVQFDKVKQIRTKNGQNMAFVTLNDGIETLDGVIFPNQFKKYEELLSHNDLFIVSGKFDHRKQQRQLIINEIQTLATFEEQKLAFAKQIIIRNKSQIDMFEEMIKATKENANDVVLSFYDETIKQMTTLGYINQKDSMFNNFIQSFNPSDIRLI

SEQ ID NO: 44344 - protein, 238 aa, Staphylococcus aureus
MKYAGILAGGIGSRMGNVPLPKQFLDLDNKPILIHTLEKFILINDFEKIIIATPQQWMTHTKDTLRKFKISDERIEVIQGGSDRNDTIMNIVKHIESTNGINDDDVIVTHDAVRPFLTHRIIKENIQAALEYGAVDTVIDAIDTIVTSKDNQTIDAIPVRNEMYQGQTPQSFNINLLKESYAQLSDEQKSILSDACKIIVETNKPVRLVKGELYNIKVTTPYDLKVANAIIRGGIADD

SEQ ID NO: 44345 - protein, 341 aa, Staphylococcus aureus
MINQVYQLVAPRQFEVTYNNVDIYSDYVIVRPLYMSICAADQRYYTGSRDENVLSQKLPMSLIHEGVGEVVFDSKGVFNKGTKVVMVPNTPTEKDDVIAENYLKSSYFRSSGHDGFMQDFVLLNHDRAVPLPDDIDLSIISYTELVTVSLHAIRRFEKKSISNKNTFGIWGDGNLGYITAILLRKLYPESKIYVFGKTDYKLSHFSFVDDVFFINKIPEGLTFDHAFECVGGRGSQSAINQMIDYISPEGSIALLGVSEFPVEVNTRLVLEKGLTLIGSSRSGSKDFQDVVDLYIQYPDIVDKLALLKGQEYEIATINDLTEAFEADLSTSWGKTVLKWIM

SEQ ID NO: 44346 - protein, 675 aa, Staphylococcus aureus
MHHVNKYFNQTMVIEALKMSFYKLNPKQLIKNPIMFVVEVGMVLTLILICFPDIFGTSYLSRGYLITIFIILLITILFANFSEAFAEGRGKAQADSLRQAQSNLTARLIEENGAYRIVNATELKAGQNIRVENGETIPADGVVINGLATVDESAITGESAPVIKESGGDFDGVIGGTLVTSDWLEIRVESEAGTSFLDKMIALVEGAERNKTPNEIALFTLLTTLTIIFLVVIVTLYPIASYLHLILPIAMLIALTVCLIPTTIGGLLSAIGIAGMDRVTQFNVLAKSGRAVEVCGDVDVMILDKTGTITYGNRIASEFLPVNQQMLEKLIVAAYMSSIYDDTPEGKSIVRLAKQMYINELPKDIDGTYKPFTAETRMSGIITNEISVFKGAPNSMINLVKQQQGNIPLNIESLCMDVSSKGGTPLIVIENNVMLGVIYLKDVIKDGLVERFTELRKMGIETVMCTGDNALTAATIAKEAGVDRFVAECKPEDKIKVIKDEQAKGHIVAMTGDGTNDAPALAQANIGLAMNSGTISAKEAANLIDLDSNPTKLIEVVKIGKQLLMTRGALTTFSLANDVAKYFAILPALMMSTIPEMTSLNIMHLSSPKSAIISALIFNALIIVALIPIAMKGVKVKGYSIDRIFINNMLIYGLGGLIVPFLGIKLIDMIVQFFV

SEQ ID NO: 44347 - protein, 452 aa, Staphylococcus aureus
MTQQQNDKRTLKNKHTYQNEPLPNRKDFVVSFITGALVGSALGLYFKNKVYQKADDLKVKEQELSQKFEERKTQLEETVAYTKERVEGFLNKSKNEQAALKAQQAAIKEEASANNLSDTSQEAQEIQEAKREAQAEADKSVAVSNEESKASALKVQQAAIKEEASANNLSDTSQEAQEIQEAKKEAQAETDKSAAVSNEEPKAVALKAQQAAIKEEASANNLSDTSQEAQEVQEAKKEAQAEKDSDTSTKDASAAKVEVSKPESQAERLANAAKQKQAKLTPGSKESQLTEALFAEKPVAKNDLKEIPQLVTKKNDVSETETVNIDNKDTVKQKEAKFENGVITRKADEKTTNNTAVDKKSGKQSKKTTPSNKRNASKASTNKTSGQKKQHNKKSSQGAKKQSSSSKLTQKNNQTSNKNSKTTNAKSSNASKTPNAKVEKANSKIEKRTFND

SEQ ID NO: 44348 - protein, 371 aa, Staphylococcus aureus
MWSFKSMFNTPEDPEKDAYEFYGKVQPGITTPTQKTCNFVALDLKSKDRDAIKAMFKKWTVMADRMMDGDTVGKTSNNPLMPPVDTGESIGLGASKLTITFGISKSLMKKIGLSSKIPDAFKDLPHFPNDQLIDDYSDGDIMIQACSNDSQVSFHAVHNLVRPFRDIVKVRWAQSGFISAKGKETPRNLMAFKDGTINPRKSNQLKDYVFIDDGWAKHGTYCVVRRIQIHIETWDRTALEEQEATFGRKRHSGAPLTGGKEFDEIDLKAKDSHGEYIIDKDAHTRLAKEANTSILRRAFNYVDGTDDRTGNFETGLLFIAFQKATKQFIDIQNNLGSNDKLNEYITHRGSASFLVLPGVSKGGYLGETLFD

SEQ ID NO: 44349 - protein, 199 aa, Staphylococcus aureus
MTEKEKMLAEKWYDANFDQDLINERARAKDICFELNHTKPSDTNKRKELIDQLFQTTTDNVSISIPFDTDYGWNVKLGKNVYVNTNCYFMDGGQITIGDNVFIGPNCGFYTATHPLNFYHRNEGYEKAGPIHIGSNTWFGGHVAVLPGVTIGEGSVIGAGSVVTKDIPPHSLAVGNPCKVVRKIDNDLPSETLNDETIK

SEQ ID NO: 44350 - protein, 445 aa, Staphylococcus aureus
MSDYLSVSALTKYIKYKFDQDPHLQSVLIKGELSNFKKHSSGHLYFNVKDKESVISAMMFKGSASKLNFEPKEGDEVLLEARVSVFERRGNYQIYVNKMQLDGIGNLYQKLEALKKKLTEEGCFDKANKKSIPKFPKKIAVLTASTGAAIRDIHSTINSRFPLAEQIQISTLVQGEKAKDDIIEKIEYADSLGVDTIIVGRGGGSIEDLWNFNEEAVVRAIYNCKTPIISAVGHETDFTLSDFAADIRAATPTQAAVIATPDQYELLQQIQQYQFTLTRFIKKHLEQQRKHVEHLSSYYKFKQPTLLYDQQIQRRDDLEKRLKQQIQATFEQQRHRLMLLQQRYNLKALLSSVNQEQQNNLQLTNQLVKLLNSKILSYKNDLKNKVENLNNLSPTNTMLRGYAIVNKKDEVITSTKDLTENDQLTLTMKDGLVDAKVTKVRCNND

SEQ ID NO: 44351 - protein, 495 aa, Staphylococcus aureus
MRENFKLRKMKVGLVSVAITMLYIMTNGQAEASETNQKVSTNQESKAVSQTEQNSKETKAAESSKNFVNLDPIKPGAQKVTGTTLPNHIILLNIDGKSADSVEGGYGDFITANDKGEFEYPLNNRKIVHNQEIEVSSSSPDLGDDEEDEEVEESSTEKAGAEEESTDAKATYTTPRYEKAYEIPKEQLKEKDGHHQVFIEPITEGSGIIKGHTSVKGKVALSINNKFINFEERAKGGISKEDTKASSDGVWMPINEKGYFDFDFKKNPFDNLELKKNDEISLTFAPDDEDEALKSLIFKTKVTSLEDIDKAETKYDHTKVEKVKVLKDVKEDIHVDEIYGSLYHTEKGKGILDKQGTKEITGKTKFANAVVKVYSDLGDAQLFPDIQVDENGKFSFDAEKAGFRLQNGETLNFAVVKPITGDLLHQGFVSKYIDVYESPEEKKEREFEEKLENTPAYHKLHGDKIVGYDVQGNPSTWFYPLGEKKVERTTPKLEK

SEQ ID NO: 44352 - protein, 208 aa, Staphylococcus aureus
MRIAIEKIIGLLKNQSSKESNVKIHRLAYITNSKFDGNNYIDRWCKIRNSHIGEYSYIGFGSDFNNVEVGRYCSISSDVKIGLGKHPTHFFSSSPIFYSNNNPFNIKQKFIDFNDQPSRTTIKNDVWIGANVIIMDGLTINTGAVIAAGSVVTKNVGAYEVVGGVPAKVIKKRFDNKTIEKLLESKWWEKTPDKLKGFSVEYLNKKDT

SEQ ID NO: 44353 - protein, 1047 aa, Staphylococcus aureus
  MISC_FEATURE (1035)..(1035): X=any amino acid
ASRAINRATKLDNAMGAVQQYIDEQHLGVISSTNYINADDNLKANYDNAIANAAHELDKVQGNAIAKAEAEQLKQNIIDAQNALNGDQNLANAKDKANAFVNSLNGLNQQQQDLAHNAINNADTVSDVTDIVNNQIDLNDAMETLKHLVDNEIPNAEQTVNYQNADDNAKTNFDDAKRLANTLLNSDNTNVNDINGAIQAVKDAIQNLNGEQRLQEAKDKAIQNVNKVLADKLKEIEASNATDQDKLIAKNKAEELANSIINNINKATSNQDVSQVQTAGNQAIEQVHANEIPKAKIDANKDVDKQVQALIDEIGRNPNLTDKEKQALKDRINQILQQGHNDINNALTKEAIEQAKERLAQALQDIKDLVKAKEDAKNKIKALANAKRDQINSNPDLTPEQKAKALKEIDEAEKRALQNVENAQTIDQLNRGLNLGLDDIRNTHVWEVDDQPAVNEISEATPEQLLVNGELIVHRDDIITEQDVLAHINLIDQLTAEVIDTPSTATISDSLTAKVEVTLLDGSKVIVNVPVKVVEKELSVVKQQAIESIENAVQQKINEINNSVTLTLEQKEAAIAEVNKLKQQAIDHINNAPDVHSVEEIQQQEQAHIEQFNPEQFTIEQAKSNAIKSIEDAIQHMIDEIKARTDLTDKEKQEAIAKLNQLKEQAIQLIQRAQSIDEITEQLEQFKAQMKAANPTAKELAKRKQEAISKIKDFSNEKMNSIRNSEIGTADEKQAAMNQINEIVLETIRDINNAHTLQQVEAALNNGIARISAVQIVTSDRAKQSSSTGNESNSHLTIGYGTANHPFNSSTIGHKKKLDEDDDIDPLHMRHFSNNFGNVIKNAIGVVGISGLLASFWFFIAKRRRKEDEEEELEIRDNNKDSIKETLDDTKHLPLLFAKRRRKEDEEDVTVEEKDSLNTGESLDKVKHTPFFLPKRRRKEDEEDVEVTNENTDEKVLKDNEHSPLLIAKRRKDKEEDVETTTSIESKDEDVPLLLAKKKNQKDNQSEDKKSASKNTSKKVAAKKKKKKSKKNKKXFVSLINRGAPID

SEQ ID NO: 44354 - protein, 240 aa, Staphylococcus aureus
MKILLIGYGAMNQRVARLAEEKGHEIVGVIENTPKATTPYQQYQHIADVKDADVAIDFSNPNLLFPLLDEEFHLPLVVATTGEKEKLLNKLDELSQNMPVFFSANMSYGVHALTKILAAAVPLLDDFDIELTEAHHNKKVDAPSGTLEKLYDVIVSLKENVTPVYDRHELNEKRQPQDIGIHSIRGGTIVGEHEVLFAGTDETIQITHRAQSKDIFANGAIQAAERLVNKPNGFYTFDNL

SEQ ID NO: 44355 - protein, 336 aa, Staphylococcus aureus
MNREMLYLNRSDIEQAGGNHSQVYVDALTEALTAHAHNDFVQPLKPYLRQDPENGHIADRIIAMPSHIGGEHAISGIKWIGSKHDNPSKRNMERASGVIILNDPETNYPIAVMEASLISSMRTAAVSVIAAKHLAKKGFKDLTIIGCGLIGDKQLQSMLEQFDHIKRVFVYDQFSEACARFVDRWQQQRPEINFIATENAKEAVSNGEVVITCTVTDQPYIEYDWLQKGAFISNISIMDVHKEVFIKADKVVVDDWSQCNREKKTINQLVLEGKFSKEALHAELGQLVTGDIPGREDDDEIILLNPMGMAIEDISSAYFIYQQAQQQNIGTTLNLY

SEQ ID NO: 44356 - protein, 326 aa, Staphylococcus aureus
MIEKSQACHDSLLDSVGQTPMVQLHQLFPKHEVFAKLEYMNPGGSMKDRPAKYIIEHGIKHGLITENTHLIESTSGNLGIALAMIAKIKGLKLTCVVDPKISPTNLKIIKSYGANVEMVEEPDAHGGYLMTRIAKVQELLATIDDAYWINQYANELNWQSHYHGAGTEIVETIKQPIDYFVAPVSTTGSIMGMSRKIKEVHPNAQIVAVDAKGSVIFGDKPINRELPGIGASRVPEILNRSEINQVIHVDDYQSALGCRKLIDYEGIFAGGSTGSIIAAIEQLITSIEEGATIVTILPDRGDRYLDLVYSDTWLEKMKSRQGVKSE

SEQ ID NO: 44357 - protein, 347 aa, Staphylococcus aureus
MSQFMDYAIQLANMVQGQTGVNPPVGAVVVNEGRIVGIGAHLRKGDKHAEVQALDMAQQNAEGATIYITLEPCSHFGSTPPCVNKIIDCKIAKVVYATKDNSLDTHGDETLRAHGIEVECVDDERASQLYQDFFKAKAKQLPQITVKVSASLDGKQANDNGQSQWITNKEVKQDVYKLRHRHDAVLTGRRTVELDDPQYTTRIQDGKNPIKVILSKSGNIHFNQQIYQDESTPIWIYTENPNLTSNQTHIEIIYLKSCDLTTILHNLYKRGVGTLLVEAGPTTTSEFLQSNYIDEFILYYAPKLIGGSGNYQFYQTNDVIEIPDANQFEIVHSELLNQNVKLTLRKK

SEQ ID NO: 44358 - protein, 496 aa, Staphylococcus aureus
MELLKHLSQRQYIDGEWVESTNKNTRDIINPYNQEVIFTVSEGTKEDAERAILAARRAFESGEWSQETAEKRGKKVRAIADKIKEHREALARLETLDTGKTLEESYADMDDIHNVFMYFAGLADKDGGEMIDSPIPDTESKIVKEPVGVVTQITPWNYPLLQASWKIAPALATGCSLVMKPSEITPLTTIRVFELMEEVGFPKGTINLILGAGSEVGDVMSGHKEVDLVSFTGGIETGKHIMKNAANNVTNIALELGGKNPNIIFDDADFELAVDQALNGGYFHAGQVCSAGSRILVQNSIKDKFEQALIDRVKKIKLGNGFDADTEMGPVISTEHRNKIESYMDVAKAEGATIAVGGKRPDRDDLKDGLFFEPTVITNCDTSMRIVQEEVFGPVVTVEGFETEQEAIQLANDSIYGLAGAVFSKDIGKAQRVANKLKLGTVWINDFHPYFAQAPWGGYKQSGIGRELGKEGLEEYLVSKHILTNTNPQLVNWFSK

SEQ ID NO: 44359 - protein, 279 aa, Staphylococcus aureus
MAVLYLVGTPIGNLADITYRAVDVLKRVDMIACEDTRVTSKLCNHYDIPTPLKSYHEHNKDKQTAFIIEQLELGLDVALVSDAGLPLISDPGYELVVAAREANIKVETVPGPNAGLTALMASGLPSYVYTFLGFLPRKEKEKSAVLEQRMHENSTLIIYESPHRVTDTLKTIAKIDATRQVSLGRELTKKFEQIVTDDVTQLQALIQQGDVPLKGEFVILIEGAKANNEISWFDDLSINEHVDHYIQTSQMKPKQAIKKVAEERQLKTNEVYNIYHQIS

SEQ ID NO: 44360 - protein, 318 aa, Staphylococcus aureus
MNYQVLLYYKYTTIDDPEQFAQDHLAFCKAHHLKGRILVSTEGINGTLSGTKEETEQYMAHMHADERFKDMVFKIDEAEGHAFKKMHVRPRKEIVALDLEDDVDPRHTTGQYLSPVEFRKALEDDDTVIIDARNDYEFDLGHFRGAIRPDITRFRDLPDWIKENKALFTDKKVVTYCTGGIRCEKFSGWLLKEGFEDVAQLHGGIATYGKDPETKGQYWDGKMYVFDDRISVDINQVEKTIIGKDWFDGKPCERYINCANPECNKQILVSEENETKYLGACSYECAKHERNRYVQANNISDNEWQQRLTNFDDLHQHA

SEQ ID NO: 44361 - protein, 428 aa, Staphylococcus aureus
MHMKNKYISKLLVGAATITLATMISNGEAKASENTQQTSTKHQTTQNNYVTDQQKAFYQVLHLKGITEEQRNQYIKTLREHPERAQEVFSESLKDSKNPDRRVAQQNAFYNVLKNDNLTEQEKNNYIAQIKENPDRSQQVWVESVQSSKAKERQNIENADKAIKDFQDNKAPHDKSAAYEANSKLPKDLRDKNNRFVEKVSIEKAIVRHDERVKSANDAISKLNEKDSIENRRLAQREVNKAPMDVKEHLQKQLDALVAQKDAEKKVAPKVEAPQIQSPQIEKPKAESPKVEVPQSKLLGYYQSLKDSFNYGYKYLTDTYKSYKEKYDTAKYYYNTYYKYKGAIDQTVLTVLGSGSKSYIQPLKVDDKNGYLAKSYAQVRNYVTESINTGKVLYTFYQNPTLVKTAIKAQETASSIKNTLSNLLSFWK

SEQ ID NO: 44362 - protein, 394 aa, Staphylococcus aureus
MSEKQQILDYIETNKYSYIEISHRIHERPELGNEEIFASRTLIDRLKEHDFEIETEIAGHATGFIATYDSGLDGPAIGFLAEYDALPGLGHACGHNIIGTASVLGAIGLKQVIDQIGGKVVVLGCPAEEGGENGSAKASYVKAGVIDQIDIALMIHPGNETYKTIDTLAVDVLDVKFYGKSAHASENADEALNALDAMISYFNGVAQLRQHIKKDQRVHGVILDGGKAANIIPDYTHARFYTRAMTRKELDILTEKVNQIARGAAIQTGCDYEFGPIQNGVNEFIKTPKLDDLFAKYAEEVGEAVIDDDFGYGSTDTGNVSHVVPTIHPHIKIGSRNLVGHTHRFREAAASVHGDEALIKGAKIMALMGLELITNQDVYQDIIEEHAHLKGNGK

SEQ ID NO: 44363 - protein, 293 aa, Staphylococcus aureus
MTNLPMNKLIDEVNNELSVAINKSVMDTQLEESMLYSLNAGGKRIRPVLLLLTLDSLNTEYELGVKSAIALEMIHTYSLIHDDLPAMDNDDYRRGKLTNHKVYGEWTAILAGDALLTKAFELISSDDRLTDEVKIKVLQRLSIASGHVGMVGGQMLDMQSEGQPIDLETLEMIHKTKTGALLTFAVMSAADIANVDDATKEHLESYSYHLGMMFQIKDDLLDCYGDEAKLGKKVGSDLENNKSTYVSLLGKDGAEDKLTYHRDAAVDELTQIDEQFNTKHLLEIVDLFYSRDH

SEQ ID NO: 44364 - protein, 294 aa, Staphylococcus aureus
MVIQWYPGHMAKAKREVSEQLKKVDVVFELVDARIPYSSRNPMIDEVINQKPRVVILNKKDMSNLNEMSKWEQFFIDKGYYPVSVDAKHGKNLKKVEAAAIKATAEKFEREKAKGLKPRAIRAMIVGIPNVGKSTLINKLAKRSIAQTGNKPGVTKQQQWIKVSNALQLLDTPGILWPKFEDEEVGKKLSLTGAIKDSIVHLDEVAIYGLNFLIQNDLARLKSHYNIEVPEDAEIIAWFDAIGKKRGLIRRGNEIDYEAVIELIIYDIRNAKIGNYCFDIFKDMTEELANDANN

SEQ ID NO: 44365 - protein, 453 aa, Staphylococcus aureus
MKSLKTVIGMNNKEHIKSVILALLVLMSVVLTYMVWNFSPDIANVDNTDSKKSETKPLTTPMTAKMDTTITPFQIIHSKNDHPEGTIATVSNVNKLTKPLKNKEVKSVEHVRRDHNLMIPDLSSDFTLFDFTYDLPLSTYLGQVLNMNAKVPNHFNFNRLVIDHDADDNIVLYAISKDRHDYVKLTTTTKNDHFLDALAAVKKDMQPYTDIITNKDTIDRTTHVFAPSKPEKLKTYRMVFNTISVEKMNAILFDDSTIVRSSKSGVTTYNNNTGVANYNDKNEKYHYKNLSEDEASSSKMEETIPGTFDFINGHGGFLNEDFRLFSTNNQSGELTYQRFLNGYPTFNKEGSNQIQVTWGEKGVFDYRRSLLRTDVVLNSEDNKTLPKLESVRSSLANNSDINFEKVTNIAIGYEMQDNSDHNHIEVQINSELVPRWYVEYDGEWYVYNDGRLE

SEQ ID NO: 44366 - protein, 221 aa, Staphylococcus aureus
MALVVKDIVKNFGEGLSETKVLKGINFEVEQGEFVILNGASGSGKTTLLTILGGLLSQTSGTVLYNDAPLFDKQHRPSDLRLEDIGFIFQSSHLVPYLKVIEQLTLVGQEAGMTKQQSSTRAIQLLKNIGLEDRLNVYPHQLSGGEKQRVAIMRAFMNNPKIILADEPTASLDADRATKVVEMIRQQIKEQQMIGIMITHDRRLFEYADRVIELEDGKITD

SEQ ID NO: 44367 - protein, 351 aa, Staphylococcus aureus [sequence omitted]

SEQ ID NO: 44368 - protein, 115 aa, Staphylococcus aureus
MLAITAIVLSAFFYVMTIQKISQIGILKAIGIKTRHLLSALVLQILTLTIIGVGIAVIIIVGLSFMMPVTMPFYLTTQNILLMVGIFILVAILGASLSFIKLFKVDPIEAIGGAE

SEQ ID NO: 44369 - protein, 691 aa, Staphylococcus aureus
MLRGQEERKYSIRKYSIGVVSVLAATMFVVSSHEAQASEKTPTSNAAAQKETLNQPGEQGNAITSHQMQSGKQLDDMHKENGKSGTVTEGKDTLQSSKHQSTQNSKTIRTQNDNQVKQDSERQGSKQSHQNNATNNTERQNDQVQNTHHAERNGSQSTTSQSNDVDKSQPSIPAQKVLPNHDKAAPTSTTPPSNDKTAPKSTKAQDATTDKHPNQQDTHQPAHQIIDAKQDDTVRQSEQKPQVGDLSKHIDGQNSPEKPTDKNTDNKQLIKDALQAPKTRSTTNAAADAKKVRPLKANQVQPLNKYPVVFVHGFLGLVGDNAPALYPNYWGGNKFKVIEELRKQGYNVHQASVSAFGSNYDRAVELYYYIKGGRVDYGAAHAAKYGHERYGKTYKGIMPNWEPGKKVHLVGHSMGGQTIRLMEEFLRNGNKEEIAYHKAHGGEISPLFTGGHNNMVASITTLATPHNGSQAADKFGNTEAVRKIMFALNRFMGNKYSNIDLGLTQWGFKQLPNESYIDYIKRVSKSKIWTSDDNAAYDLTLDGSAKLNNMTSMNPNITYTTYTGVSSHTGPLGYENPDLGTFFLMDTTSRIIGHDAREEWRKNDGVVPVISSLHPSNQPFINVTNDEPATRRGIWQVKPIIQGWDHVDFIGVDFLDFKRKGAELANFYTGIINDLLRVEATESKGTQLKAS

SEQ ID NO: 44370 - protein, 341 aa, Staphylococcus aureus
MSTNIAINGMGRIGRMVLRIALQNKNLNVVAINASYPPETIAHLINYDTTHGKYNLKVEPIENGLQVGDHKIKLVADRNPENLPWKELDIDIAIDATGKFNHGDKAIAHIKAGAKKVLLTGPSKGGHVQMVVKGVNDNQLDIEAFDIFSNASCTTNCIGPVAKVLNNQFGIVNGLMTTVHAITNDQKNIDNPHKDLRRARSCNESIIPTSTGAAKALKEVLPELEGKLHGMALRVPTKNVSLVDLVVDLEKEVTAEEVNQAFENAGLEGIIEVEHQPLVSVDFNTNPNSAIIDAKSTMVMSGNKVKVIAWYDNEWGYSNRVVDVAEQIGALLTSKETVSAS

SEQ ID NO: 44371 - protein, 220 aa, Staphylococcus aureus
MKFEKYIDHTLLKPESTRTQIDQIIDEAKAYNFKSVCVNPTHVKYAAERLADSEVLVCTVIGFPLGASTTATKAFETEDAIQNGADEIDMVINIGALKDGRFDDVQQDIEAVVKAAKGHTVKVIIETVLLDHDEIVKASELTKAAGADFVKTSTGFAGGGATAEDVKLMKDTVGADVEVKASGGVRNLEDFNKMVEAGATRIGASAGVQIMQGLEADSDY

SEQ ID NO: 44372 - protein, 220 aa, Staphylococcus aureus
MNSAKLIDHTLLKPESTRTQIDQIIDEAKAYHFKSVCVNPTHVKYAAERLADSEVLVCTVIGFPLGASTTATKAFETEDAIQNGADEIDMVINIGALKDGRFDDVQQDIEAVVKAAKGHTVKVIIETVLLDHDEIVKASELTKVAGADFVKTSTGFAGGGATAEDVKLMKDTVGADVEVKASGGVRNLEDFNKMVEAGATRIGASAGVQIMQGLEADSDY

SEQ ID NO: 44373 - protein, 669 aa, Staphylococcus aureus
MGKIKELQTSLANKIAAGEVVERPSSVVKELLENAIDAGATEISIEVEESGVQSIRVVDNGSGIEAEDLGLVFHRHATSKLDQDEDLFHIRTLGFRGEALASISSVAKVTLKTCTDNANGNEIYVENGEILNHKPAKAKKGTDILVESLFYNTPARLKYIKSLYTELGKITDIVNRMAMSHPDIRIALISDGKTMLSTNGSGRTNEVMAEIYGMKVARDLVHISGDTSDYHIEGFVAKPEHSRSNKHYISIFINGRYIKNFMLNKAILEGYHTLLTIGRFPICYINIEMDPILVDVNVHPTKLEVRLSKEEQLYQLIVSKIQEAFKDRILIPKNNLDYVPKKNKVLYSFEQQKIEFEQRQNTENNQEKTFSSEESNSKSFMAENQNDEIVIKEDSYNPFVTKTSESLITDDESSGYNNTREKDEDYFKKQQEILQEMDQTFDSNEDASVQNYENKASDDYYDVNDIKGTKSKDPKRRIPYMEIVGQVHGTYIIAQNEFGMYMIDQHAAQERIKYEYFRDKIGEVTNEVQDLLIPLTFHFSKDEQLVIDQYKNELQQVGIMLEHFGGHDYIVSSYPVWFPKDEVEEIIKDMIELILEEKKVDIKKLREDVAIMMSCKKSIKANHYLQKHEMSDLIDQLREAEDPFTCPHGRPIIINFSKYELEKLFKRVM

SEQ ID NO: 44374 - protein, 774 aa, Staphylococcus aureus
MVRREVVRIVTPGTVMEQGGVDDKQNNYILSFVMNQPEIALSYCDVSTGELKVTHFNDEATLLNEITTINPNEVVINDNISDNLKRQINMVTETITVRETLSSEIYSVNQTEHKLMYQATQLLLDYIHHTQKRDLSHIEDVVQYAAIDYMKMDFYAKRNLELTESIRLKSKKGTLLWLMDETKTPMGARRLKQWIDRPLISKEQIEARLDIVDEFSAHFIERDTLRTYLNQVYDIERLVGRVSYGNVNARDLIQLKHSISEIPNIKALLNSMNQNTLVQVNQLEPLDDLLDILEQSLVEEPPISVKDGGLFKVGFNTQLDEYLEASKNGKTWLAELQAKERQRTGIKSLKISFNKVFGYFIEITRANLQNFEPSEFGYMRKQTLSNAERFITDELKEKEDIILGAEDKAIELEYQLFVQLREEVKKYTERLQQQAKIISELDCLQSFAEIAQKYNYTRPSFSENKTLELVESRHPVVERVMDYNDYVPNNCRLDNETFIYLITGPNMSGKSTYMRQVAIISIMAQMGAYVPCKEAVLPIFDQIFTRIGAADDLVSGKSTFMVEMLEAQKALTYATEDSLIIFDEIGRGTSTYDGLALAQAMIEYVAETSHAKTLFSTHYHELTTLDQALPSLKNVHVAANEYKGELIFLHKVKDGAVDDSYGIQVAKLADLPEKVISRAQVILSEFEASAGKKSSISNLKMVENEPEINQENLNLSVEETTDTLSQKDFEQASFDLFENDQESEIELQIKNLNLSNMTPIEALVKLSELQNQLK

SEQ ID NO: 44375 - protein, 126 aa, Staphylococcus aureus
MHKVKDGAVDDSYGIQVAKLADLPEKVISRAQVILSEFEASAGKKSSISNLKMVENEPEINQENLNLSVEETTDTLSQKDFEQASFDLFENDQESEIELQIKNLNLSNMTPIEALVKLSELQNQLK

SEQ ID NO: 44376 - protein, 255 aa, Staphylococcus aureus
MIDIHNHILVDIDDGPKTIEKSIALLKQAKDEGVTSIVATPHHLHPRYDNTFQQVLVKLAELRTHPEVQALDIKLFPGQEIRITDSILKGLDNGSIQGINRSKYLLIEFPTGEVPHYTKQLFFEIQSRGYIPIIAHPERNRSIAKNPEILYELVANGALSQLTSSSLVGGFGKNIQKLSLQFIECNLAHFVASDAHSCDQRPFLMQELFHNHKLKKYSNDIEALLRNASSVINDNFVYLDRPTKPGKVKSFLKWF

SEQ ID NO: 44377 - protein, 271 aa, Staphylococcus aureus
MTLLTVKHLTITDTWTDQPLVSDVNFTLTKGETLGVIGESGSGKSITCKSIIGLNPERLGVTGEIIFDGTSMLSLSESQRKKYRGKDIAMVMQQGSRAFDPSTTVGKQMFETMKVHTSMSTQEIEKTLIEYMDYLSLKDPKRILKSYPYMLSGGMLQRLMIALALALKPKLIIADEPTTALDTITQYDVLEAFIDIKKHFDCAMIFISHDLTVINKIADRVVVMKNGQLIEHGTRESVLHHPEHVYTKYLLSTKKKINDHFKHVMRGDVHD

SEQ ID NO: 44378 - protein, 697 aa, Staphylococcus aureus
MQKAFRNVLVIVIIGVIIFGLFSYLNGNGNMPKQLTYNQFTEKLEKGDLKTLEIQPQQNVYMVSGKTKNDEDYSSTILYNNEKELQKITDAAKKQNGVKLTIKEEEKQSVFVSILSTLIPVVVIALLFIFFLSQAQGGGSGGRMMNFGKSKAKMYDNNKRRVRFSDVAGADEEKQELIEIVDFLKDNKKFKEMGSRIPKGVLLVGPPGTGKTLLARAVAGEAGAPFFSISGSDFVEMFVGVGASRVRDLFDNAKKNAPCIIFIDEIDAVGRQRGAGVGGGHDEREQTLNQLLVEMDGFGENEGIIMIAATNRPDILDPALLRPGRFDRQIQVGRPDVKGREAILHVHAKNKPLDETVDLKAISQRTPGFSGADLENLLNEASLIAVREGKKKIDMRDIEEATDRVIAGPAKKSRVISKKERNIVAHHEAGHTIIGMVLDEAEVVHKVTIVPRGQAGGYAMMLPKQDRFLMTEQELLDKICGLLGGRVSEDINFNEVSTGASNDFERATQIARSMVTQYGMSKKLGPLQFGHSNGQVFLGKDMQGEPNYSSQIAYEIDKEVQRIVKEQYERCKQILLEHKEQLILIAETLLTEETLVAEQIQSLFYEGKLPEIDYDAAKVVKDEDSEFNDGKFGKSYEEIRKEQLEDGQRDESEDRKEEKDIAEDKKEADKSDEKDEPAHRQAPNIEKPYDPNHPDNK

SEQ ID NO: 44379 - protein, 84 aa, Staphylococcus aureus
MKQGIHPEYHQVIFLDTTTNFKFLSGSTKTSSEMMEWEDGKEYPVIRLDISSDSHPFYTGRQKFAAADGRVERFNKKFGLKSNN

SEQ ID NO: 44380 - protein, 383 aa, Staphylococcus aureus
MNYLKENGLYNEIDTIEGANGPEIKINGKSYINLSSNNYLGLATNEDLKSAAKAAIDTHGVGAGAVRTINGTLDLHDELEETLAKFKGTEAAIAYQSGFNCNMAAISAVMNKNDAILSDELNHASIIDGCRLSKAKIIRVNHSDMDDLRAKAKEAVESGQYNKVMYITDGVFSMDGDVAKLPEIVEIAEEFGLLTYVDDAHGSGVMGKGAGTVKHFGLQDKIDFQIGTLSKAIGVVGGYVAGTKELIDWLKAQSRPFLFSTSLAPGDTKAITEAVKKLMDSTELHDKLWDNAQYLKNGLSKLGYDTGESETPITPVIIGDEKTTQEFSKRLKDEGVYVKSIVFPTVPRGTGRVRNMPTAAHTKDMLDEAIAAYEKVGKEMKLI

SEQ ID NO: 44381 - protein, 1499 aa, Staphylococcus aureus
MHNEKLIKGLYDYREEHDACGIGFYANMDNKRSHDIIDKSLEMLRRLDHRGGVGADGITGDGAGIMTEIPFAFFKQHVTDFDIPGEGEYAVGLFFSKERILGSEHEAVFKKYFEGEGLSILGYRNVPVNKDAIAKHVADTMPVIQQVFIDIRGIEDVEKRLFLARKQLEFYSTQCDLELYFTSLSRKTIVYKGWLRSDQIKKLYTDLSDDLYQSKLGLVHSRFSTNTFPSWKRAHPNRMLMHNGEINTIKGNVNWMRARQHKLIETLFGEDQHKVFQIVDEDGSDSAIVDNALEFLSLAMEPEKAAMLLIPEPWLYNEANDANVRAFYEFYSYLMEPWDGPTMISFCNGDKLGALTDRNGLRPGRYTITKDNFIVFSSEVGVVDVPESNVAFKGQLNPGKLLLVDFKQNKVIENNDLKGAIAGELPYKAWIDNHKVDFDFENIQYQDSQWKDETLFKLQRQFAYTKEEIHKYIQELVEGKKDPIGAMGYDAPIAVLNERPESLFNYFKQLFAQVTNPPIDAYREKIVTSELSYLGGEGNLLAPDETVLDRIQLKRPVLNESHLAAIDQEHFKLTYLSTVYEGDLEDALEALGREAVNAVKQGAQILVLDDSGLVDSNGFAMPMLLAISHVHQLLIKADLRMSTSLVAKSGETREVHHVACLLAYGANAIVPYLAQRTVEQLTLTEGLQGTVVDNVKTYTDVLSEGVIKVMAKMGISTVQSYQGAQIFEAIGLSHDVIDRYFTGTQSKLSGISIDQIDAENKARQQSDDNYLASGSTFQWRQQGQHHAFNPESIFLLQHACKENDYAQFKAYSEAVNKNRTDHIRHLLEFKACTPIDIDQVEPVSDIVKRFNTGAMSYGSISAEAHETLAQAMNQLGGKSNSGEGGEDAKRYEVQVDGSNKVSAIKQVASGRFGVTSDYLQHAKEIQIKVAQGAKPGEGGQLPGTKVYPWIAKTRGSTPGIGLISPPPHHDIYSIEDLAQLIHDLKNANKDADIAVKLVSKTGVGTIASGVAKAFADKIVISGYDGGTGASPKTSIQHAGVPWEIGLAETHQTLKLNDLRSRVKLETDGKLLTGKDVAYACALGAEEFGFATAPLVVLGCIMMRVCHKDTCPVGVATQNKDLRALYRGKAHHVVNFMHFIAQELREILASLGLKRVEDLVGRTDLLQRSSTLKANSKVASIDVEKLLCPFDGPNTKEIQQNHNLEHGFDLTNLYEVTKPYIAEGRRYTGSFTVNNEQRDVGVITGSEISKQYGEAGLPENTINVYTNGHAGQSLAAYAPKGLMIHHTGDANDYVGKGLSGGTVIVKAPFEERQNEIIAGNVSFYGATGGKAFINGSAGERFCIRNSGVDVVVEGIGDHGLEYMTGGHVINLGDVGKNFGQGMSGGIAYVIPSDVEAFVENNQLDTLSFTKIKHQEEKAFIKQMLEEHVSHTNSTRAIHVLKHFDRIEDVVVKVIPKDYQLMMQKIHLHKSLHDNEDEAMLAAFYDDSKTIDAKHKPAVVY

SEQ ID NO: 44382 - protein, 487 aa, Staphylococcus aureus
MGEFKGFMKYDKQYLGELSLVDRLKHHKAYQQRFTKEDASIQGARCMDCGTPFCQTGQQYGRETIGCPIGNYIPEWNDLVYHQDFKTAYERLSETNNFPDFTGRVCPAPCESACVMKINRESIAIKGIERTIIDEAFENGWVAPKVPSRRRDEKVAIVGSGPAGLTAAEELNLLGYQVTIYERARESGGLLMYGIPNMKLDKDVVRRRIKLMEEAGITFINGVEVGVDIDKATLESEYDAIILCTGAQKGRDLPLEGRMGDGIHFAMDYLTEQTQLLNGEIDDITITAKDKNVIIIGAGDTGADCVATALRENCKSIVQFNKYTKLPEAITFTENASWPLAMPVFKMDYAHQEYEAKFGKEPRAYGVQTMRYDVDDKGHIRGLYTQILEQGENGMVMKEGPERFWPADLVLLSIGFEGTEPTVPNAFNIKTDRNRIVADDTNYQTNNEKVFAAGDARRGQSLVVWAIKEGRGVAKAVDQYLASKVCV

SEQ ID NO: 44383 - protein, 266 aa, Staphylococcus aureus
MKFENRVQRYQHLFTKTDKRIVNYIRQNGYSDAFSTINSLAHAIGTSPATMTRFSHKLDYENFQDLKFNIQQEMTETVIENSPIIQRIHKYHQQIIQQTGEFIDNDIIQTFIDKLQSSRHILFAGLGSSGLSATEFYYRMIRMGLKGNVTTDSHLMKISASLLSHSDMFIAMSNSGNTSELISAAEVAKSHGAYVVAITNFEGSKLTDCADLVLLTTDQSRNTDHQFINTQIATLFLIDIVSYHLLENTNLSQTYQHTKSIILDNK

SEQ ID NO: 44384 - protein, 745 aa, Staphylococcus aureus
MQRDYLIRVETESMPDFKRLNGLMIGFVIKGEAHIYDENNMTQCNSGDIFIINHRDLYRFQLQQDGIICYIQFQMKYLADKFDDAHCLYFHLTDATTTKNIHQLRNIMARLVSTHIRHNELSKLTEQQLVIQLLMHMIHYVPRTYHSNQSILNDDKVNQVCDYIELHFHEDLSLSELSEYVGWSESHLSKKFTESLGVGFQHFLNTTRIEHAKLDLTYTDETITDIALQNGFSSAASFARTFKHFTHQTPKQYRGDRPAITENQQSAQHNYHDRELILLLNDYIEEMNHFIEDIEKMNYKEIAFKPTNQQLNQFNHIIQVGYLRNLLNTQYQSQLLTCHHDFQVNEVLAYDVMPYIMKKLNAPFTYDAEISNIFYDIDLCLDFLLDHNFSLTMHLNQYDSRDYIDAFKVFIHHVALHVSHRKDLKFNLYVTTLHTSLIEMIDYFKALFPNGGLYIHLDQATERHLPLLKRLEPHINHFVFDANSNDAVDFNKMNDDEFKTASQMIINKTNYLIDLMHRHNLKRPLILLNWNTLTGDTFITNGEYFRGGIIIEQLLKLSTKVEGIGYWLNYDLHVSHCRNERDYMNSIELFHQYNGKRPVYFTALLFNKLTSNILYSDDTCIVTGTDSNFQILLYDAKHFNPYLALDNQMNMRATEMIHLNINALEDGMYKIKHFTLDKENGALFNLWRKHHTIHGMDKDSIDYVNRMSFPKLEVYDIDITDTLALNIKMITNGIHLIEVKRYPSS

SEQ ID NO: 44385 - protein, 449 aa, Staphylococcus aureus
MKKKLTFKENMFIGSMLFGLFFGAGNLIFPIHLGQAAGSNVFIANLGFLITAIGLPFLGIIAIGISKTSGLFEIASRVNKTYAYIFTIALYLVIGPFFALPRLATTSFEIAFSPFLSPKQITLYLFIFSFVFFVIAWFFARKPSRILEYIGKFLNPVFLVLLAIILLFAFIHPLGGISDAPISKQYQSHALFNGFLDGYNTLDALASLAFGIIIVATIKKLGIENPTDIAKETIKSGTISIIMMGIIYTLLAIMGTLSIGHFKLSENGGIALAQITQYYLGNYGIVLLSLIVMVACLKTAIGLITAFSETFEHLFPKMNYLAIATVVSFISFLFANVGLTKIIMYSVPVLMFLYPLAIALIVLTLFSSKFHHSKIIYQCTIFFTMIAALVDGLKASPEFISSTSFSQTLINFSQKYLPLSDIGMGWVVLSLIGFIIGFIIYKIKHRKIP

SEQ ID NO: 44386 - protein, 727 aa, Staphylococcus aureus
MTENKGSSQPKKNGNNGGKSNSKKNRNVKRTIIKIIGFMIIAFFVVLLLGILLFAYYAWKAPAFTEAKLQDPIPAKIYDKNGELVKTLDNGQRHEHVNLKDVPKSMKDAVLATEDNRFYEHGALDYKRLFGAIGKNLTGGFGSEGASTLTQQVVKDAFLSQHKSIGRKAQEAYLSYRLEQEYSKDDIFQVYLNKIYCSDGVTGIKAAAKYYFNKDLKDLNLAEEAYLAGLPQVPNNYNIYDHPKAAEDRKNTVLYLMHYHKRITDKQWEDAKKIDLKANLVNRTPEERQNIDTNQDSEYNSYVNFVKSELMNNKAFKDENLGNVLQSGIKIYTNMDKDVQKTLQNDVDNGSFYKNKDQQVGATILDSKTGGLVAISGGRDFKDVVNRNQATDPHPTGSSLKPFLAYGPAIENMKWATNHAIQDESSYQVDGSTFRNYDTKSHGTVSIYDALRQSFNIPALKAWQSVKQNAGNDAPKKFAAKLGLNYEGDIGPSEVLGGSASEFSPTQLASAFAAIANGGTYNNAHSIQKVVTRDGETIEYDHTSHKAMSDYTAYMLAEMLKGTFKPYGSAYGHGVSGVNMGAKTGTGTYGAETYSQYNLPDNAAKDVWINGFTPQYTMSVWMGFSKVKQYGENSFVGHSQQEYPQFLYENVMSKISSRDGEDFKRPSSVSGSIPSINVSGSQDNNTTNRSTHGGSDTSANSSGTAQSNNNTRSQQSRNSGGLTGIFN

SEQ ID NO: 44387 - protein, 230 aa, Staphylococcus aureus
MAKKGKKYQEAASKVDRTQHYSVEEAIKLAKETSIANFDASVEVAFRLGIDTRKNDQQIRGAVVLPNGTGKSQSVLVFAKGDKIAEAEAAGADYVGEAEYVQKIQQGWFDFDVVVATPDMMGEVGKLGRVLGPKGLMPNPKTGTVTMDVKKAVEEIKAGKVEYRAEKAGIVHASIGKVSFTDEQLIENFNTLQDVLAKAKPSSAKGTYFKSVAVTTTMGPGVKIDTASFK

SEQ ID NO: 44388 - protein, 178 aa, Staphylococcus aureus
MITVLFGGSRPNGNTAQLTKFALQDLEYQWIDVTQHQFKPIRDVRHTAETITSYDDDYLPILDKILASDTIIFASPVYWYSISAPLKAFIEHWSETLQDKRYPNFKAQMAEKDFRVILVGGDCPKIKAKPAITQMKYSLDFLGATLNGYIIGTAEKPGDIMKDNYALARATEWNSILQ

SEQ ID NO: 44389 - protein, 504 aa, Staphylococcus aureus
MMEKNENINVEILTTSDMHSHFLNGDYGSNIYRAGTYVNQIRAQNHRVILLDSGGSLAGSLAAYYYAIVAPYKRHPMIKLMNRMHYDASGVSPSEFKFGLSFLTRSIALARFPWLSANIEYNVTKEPYFSTPYCIKHFGDLKIAIVGVTADGLMENEYSEMEQDVSIEKTLVASKRWIRYIHEVEEPDFLIVIYHGGLNKISNSTKNKKASSNEAEKLMEELGVIDLMITAHQHQTIVGQDHETYYVQAGQDAKELVHLSINFKKRTTTYDVESIDSKVIDLNEYEEDQELLDLTFYDRKAVAYWSQEIISDKGLMLSVNGLQDLVCQTHPFSQLLHDAIQLAFDNDITCVHVPLNGEKGLSGQIRNEDLYHAYPYPDKPMDMTISGQNIKDILEYSYSHLDFVNEQLSLTIIDETLCTMWQGFNYEIDMNQEPGQRVMLDQIDLTKSYRVTMTDYCYRNYKNYLKNAIIHESYDETMSTLIAEKLRDPNYRISCSDNFVVKNR

SEQ ID NO: 44390 - protein, 204 aa, Staphylococcus aureus
MKRLVTGLLALSLFLAACGQDSDQQKDSNKEKDDKAKTEQQDKKTNDSSKDKKDNKDDSKDVNKDNKDNSANDNQQQSNSNATNNDQNQTNNNQSSNNQKSSYVAPYYGQNAAPVARQIYPFNGNKTQALQQLPNFQTALNAANNEANKFGSNNKVYNDYSIEEHNGNYKYVFSFKDPNANGKYSIVTVDYTGQAMVTDPNYQQ

SEQ ID NO: 44391 - protein, 1150 aa, Staphylococcus aureus
MKQIKKLLVANRGEIAIRIFRAAAELDISTVAIYSNEDKSSLHRYKADESYLVGSDLGPAESYLNIERIIDVAKQANVDAIHPGYGFLSENEQFARRCAEEGIKFIGPHLEHLDMFGDKVKARTTAIKADLPVIPGTDGPIKSYELAKEFAEEAGFPLMIKATSGGGGKGMRIVREESELEDAFHRAKSEAEKSFGNSEVYIERYIDNPKHIEVQVIGDEHGNIVHLFERDCSVQRRHQKVVEVAPSVGLSPTLRQRICDAAIQLMENIKYVNAGTVEFLVSGDEFFFIEVNPRVQVEHTITEMVTGIDIVKTQILVAAGADLFGEEINMPQQKDITTLGYAIQCRITTEDPLNDFMPDTGTIIAYRSSGGFGVRLDAGDGFQGAEISPYYDSLLVKLSTHAISFKQAEEKMVRSLREMRIRGVKTNIPFLINVMKNKKFTSGDYTTKFIEETPELFDIQPSLDRGTKTLEYIGNVTINGFPNVEKRPKPDYELASIPTVSSSKIASFSGTKQLLDEVGPKGVAEWVKKQDDVLLTDTTFRDAHQSLLATRVRTKDMINIASKTADVFKDGFSLEMWGGATFDVAYNFLKENPWERLERLRKAIPNVLFQMLLRASNAVGYKNYPDNVIHKFVQESAKAGIDVFRIFDSLNWVDQMKVANEAVQEAGKISEGTICYTGDILNPERSNIYTLEYYVKLAKELEREGFHILAIKDMAGLLKPKAAYELIGELKSAVDLPIHLHTHDTSGNGLLTYKQAIDAGVDIIDTAVASMSGLTSQPSANSLYYALNGFPRHLRTDIEGMESLSHYWSTVRTYYSDFESDIKSPNTEIYQHEMPGGQYSNLSQQAKSLGLGERFDEVKDMYRRVNFLFGDIVKVTPSSKVVGDMALYMVQNDLDEQSVITDGYKLDFPESVVSFFKGEIGQPVNGFNKDLQAVILKGQEALTARPGEYLEPVDFEKVRELLEEEQQGPVTEQDIISYVLYPKVYEQYIQTRNQYGNLSLLDTPTFFFGMRNGETVEIEIDKGKRLIIKLETISEPDENGNRTIYYAMNGQARRIYIKDENVHTNANVKPKADKSNPSHIGAQMPGSVTEVKVSVGETVKANQPLLITEAMKMETTIQAPFDGVIKQVTVNNGDTIATGDLLIEIEKATD

SEQ ID NO: 44392 - protein, 801 aa, Staphylococcus aureus
MAKQKLVMIGNGMAGIRTIEEILERANDLYDITVIGKEPYPNYNRIMLSNILQNKMTVEETIMNPYEWYEEHGIELITNDPVIEVDRANQSVTTANGIEVSYDKLIFATGSKAFVIPVPGSTLPSVIGWRTIDDTEQMMNIAKTKKKAIVIGGGLLGLECARGLLDQGMEVTVLHLAEWLMEMQLDRKAGNMLKADLEKQGMKFEMQANTTEILGEDDVEGVKLADGREIPADLVVMAVGIRPYTEVAKESGLDVNRGIVVNDVMQTSDSNVYAVGECAEHNGKVYGLVAPLYEQGKVLADHLTNKETNGYKGSTTFTSLKVSGCDLYSAGQIVENAEIKGIEIFNSVDNNYKKIFLKDGNVVGAVLYGDIDDGSRFYNMMKKGESTEDYTLVSLLTKGGEEASLSIADMADDETICGCNGVDKGTIVNAITENGFTTVEEVTAKTKAGNSCGKCKPQIAQILQHTLGDDFVAAKPAAICGCTDLTRDQIVTQIRAKGLKTSKEVRHVLNFKNKGGCPKCRPAINYYLNMVYPHDHEDERESRFANERYHANIQNDGTFSVIPQMRGGVTDADQLIRLGEVAKKYHVPLVKVTGSQRVGLYGVKKEELPNIWEDLGMRSASAYGKKTRSVKSCVGKEFCRFGTQYTTRLGIRLEKTFEYIDTPHKFKMGVSGCPRSCVESGVKDFGIISVENGFQIYIGGNGGTEVEKAEFLTTVETEDEVIKLCGALMQYYRETGIYAERTAPWLRRLGFENVKEVLLDPERQNELFERIMDAKKAVEAEPWEAITSNAQARKIFEVEKV

SEQ ID NO: 44393 - protein, 489 aa, Staphylococcus aureus
MYQLEDDSLMLHNDLYQINMAESYWNDNIHEKMAVFDLYFRKMPFNSGYAVFNGLKRVIDFIEHFGFSESDLEYLKSIGYKDDFLSYLKDLKFTGSIRSMQEGELCFGNEPLLRVEAPLIQAQLIETILLNIVNFHTLITTKASRIRQIASNDKLMEFGTRRAQEIDAALWGARAAYIGGFDSTSNVRAGKLFGIPVSGTHAHAFVQTYGDEYVAFKKYAERHKNCVFLVDTFHTLKSGVPNAIKVAKELGDKINFVGIRLDSGDIAYLSKEARRMLDEAGFTETKIIASNDLDEETITSLKAQGAKVDSWGVGTKLITGYDQPALGAVYKLVAIENEEGSYSDRIKLSNNAEKVTTPGKKNVYRIINKKTGKAEGDYITLENENPYDEQPLKLFHPVHTYKMKFIKSFEAIDLHHNIYENGKLVYQMPTEDESREYLAQGLQSIWDENKRFLNPQEYPVDLSKACWDNKHKRIFEVAEHVKEMEEDNE

SEQ ID NO: 44394 - protein, 585 aa, Staphylococcus aureus
MRKTKIVCTIGPASESEEMIEKLINAGMNVARLNFSHGSHEEHKGRIDTIRKVAKRLDKIVAILLDTKGPEIRTHNMKDGIIELERGNEVIVSMNEVEGTPEKFSVTYENLINDVQVGSYILLDDGLIELQVKDIDHAKKEVKCDILNSGELKNKKGVNLPGVRVSLPGITEKDAEDIRFGIKENVDFIAASFVRRPSDVLEIREILEEQKANISVFPKIENQEGIDNIAEILEVSDGLMVARGDMGVEIPPEKVPMVQKDLIRQCNKLGKPVITATQMLDSMQRNPRATRAEASDVANAIYDGTDAVMLSGETAAGLYPEEAVKTMRNIAVSAEAAQDYKKLLSDRTKLVETSLVNAIGISVAHTALNLNVKAIVAATESGSTARTISKYRPHSDIIAVTPSEETARQCSIVWGVQPVVKKGRKSTDALLNNAVATAVETGRVSNGDLIIITAGVPTGETGTTNMMKIHLVGDEIANGQGIGRGSVVGTTLVAETVKDLEGKDLSDKVIVTNSIDETFVPYVEKALGLITEENGITSPSAIVGLEKGIPTVVGVEKAVKNISNNMLVTIDAAQGKIFEGYANVL

SEQ ID NO: 44395 - protein, 286 aa, Staphylococcus aureus
MTIRFDNVSYTYQKGTPYQHQAIHDVNTEFEQGKYYAIVGQTGSGKSTLIQNINALLKPTTGTVTVDDITITHKTKDKYIRPVRKRIGMVFQFPESQLFEDTVEREMIFGPKNFKMNLDEAKNYAHRLLMDLGFSRDVMSQSPFQMSGGQMRKIAIVSILAMNPDIIVVDEPTAGLDPQSKRQVMRLLKSLQTDENKAIILISHDMNEVARYADEVIVMKEGSIVSQTSPKELFKDKKKLADWHIGLPEIVQLQYDFEQKYQTKLKDIALTEEAFVSLYKEWQHEK

SEQ ID NO: 44396 - protein, 133 aa, Staphylococcus aureus
MVKVTYDIPTCEDYCALRINAGMSPKTREAAEKGLPNALFTVTLYDKDRLIGMGRVIGDGGTVFQIVDIAVSKSYQGQDYGSLIMEHIMKYIKNVSVESAYVSLIADYPADKLYAKFGFMPTEPDSGGMYIKY

SEQ ID NO: 44397 - protein, 331 aa, Staphylococcus aureus
MYASFYAGLRDMSVRLIDVQSELGGKMRIYPEKIIWDIGGIAPKPCHEILKDTIKQGLYFKPEVHLNERVVDIRKKAERHFEVETEAGEIYTSKAVIIAIGAGIINPKQLDVKGVERYQLTNLHYVVQSYRRFKDKDVLISGGGNTALDWAHDIAKIAKSVTVVYRKEDVSGHEAMKTLVTDLNVKLCPKTRIKYLVGNDDETHISEVVLEHVESGDRHTVKFDDVIISHGFDRCNTLLSETSSKLDMHDDCRVKGFGNTTTSIPGIYACGDIVYHDAKSHLIASAFSDGANAANLAKTYIQPDANAEGYVSSHHEVFKEANKTIVNKHLY

SEQ ID NO: 44398 - protein, 39 aa, Staphylococcus aureus
MHNKNENVTYVAIGFINWMLVAYWFIRRISNKIVYIIRR

SEQ ID NO: 44399 - protein, 757 aa, Staphylococcus aureus
MIKPKYKWKLTKPAEYISDELTSKLKLTPIVKKILESKSIIDEQAIESIISDTDVNHDALQLSDMTKAIERIKRAIANDEKILVYGDYDADGVTSTTILVTTLQLLGAQVGWHIPNRFTEGYGPNELAFRNAHDEGITLIITVDNGIQGHNEIKMVQDLGVDVIVTDHHEIGSTLPEAYAIVHPMHPSFNYPFQQLCGAGVAYKLAQALIENVPDYFKALVAIGTIADLVSLTDENRSLVKQGLKVLNDQCPTSVKALLKEAGYNDNIDEETIGFIIGPRLNAVGRLDDASLACELLMTDDEEEAAFLAEQVEHFNRERKDIVATITEEAMAMAETKVKKGDLFLLLAKENWHEGVLGIVASKIVETFALPTLILNIDREQNHAKGSARSIDQVSMFEILSAHQELIAKFGGHHMAAGMTMDIENIESLAEGLNKWMKELSKTTSLDPVKPVDVLLTENDITIKNIRDMNRLRPFGTDFSRPIFEMDDLSVSSVKAIGQQKNHLKLTLGESNIAALFWQNGHLEPELQDEQPINILGSVQINEWNGNQSPQLIIQDIAMNEQQILDYRSKRKSLPFTENDENIVVLIHPKSDKVNANEYYYGEEIKQQTDKVVLRDLPTSMEDLSNSLQQLQFSQLYIVLQHNHSIYFDGIPNMDIFKKCYKALITKQETNIQKEGMLLCQHLSVKPDTLKFMLKVFLDLKFVTQEDGLIRINQQPDKRSIDSSKVYQLRQQRMDVEKQLLYQDFSEIKNWIKSQLS

SEQ ID NO: 44400 - protein, 191 aa, Staphylococcus aureus
MSRITQVHRILEQKHLDAIIILSDYNRRYLSGFTGTSGALIISKDKQYLITDFRYIDQATKQAPNYEIINRKSTIIGEIKELLHQENFENIGFEGHHVSYDTYLELNKSRISLISISNTVDKIRDVKDVDEIALIQKAANIVDETYEYILTVVKAGMTEKELKAILESKMLELGADGPSFDTIVASGIEVH

SEQ ID NO: 44401 - protein, 103 aa, Staphylococcus aureus
MGAYYNGYCSDMTRTFAIGEPDPTAERIYPIVLESLMIAITEIRPGMTGAEADAISRNYLESKGYGKEFGHSLGHGIGLEIHEGPMLARYDTTINFKLTTVLQ

SEQ ID NO: 44402 - protein, 102 aa, Staphylococcus aureus
MAKQKIRIRLKAYDHRVIDQSAEKIVETAKRSGADVSGPIPLPTEKSVYTIIRAVHMYKDSREQFEQRTHKRLIDIVNPTPKTVDALMGLNLPSGVDIEIKL

SEQ ID NO: 44403 - protein, 82 aa, Staphylococcus aureus
MAKYTIVDMDTCIACGACGAAAPDIYDYDDEGIAFVILDDNQGTAEVPEELYEDMEDAIDGCPTDSIKIADESFDGDALKFE

SEQ ID NO: 44404 - protein, 272 aa, Staphylococcus aureus
MNNFNNEIKLILQQYLEKFEAHYERVLQDDQYIEALETLMDDYSEFILNPIYEQQFNAWRDVEEKAQLIKSLQYITAQCVKQVEVIRARRLLDGQASTTGYFDNIEHCIDEEFGQCSITSNDKLLLVGSGAYPMTLIQVAKETGASVIGIDIDPQAVDLGRRIVNVLAPNEDITITDQKVSELKDIKDVTHIIFSSTIPLKYSILEELYDLTNENVVVAMRFGDGIKAIFNYPSQETAEDKWQCVNKHMRPQQIFDIALYKKAAIKVGITDV

SEQ ID NO: 44405 - protein, 148 aa, Staphylococcus aureus
MKVIFTQDVKGKGKKGEVKEVPVGYANNFLLKKNYAVEATPGNLKQLELQKKRAKQERQQEIEDAKALKETLSNIEVEVSAKTGEGGKLFGSVSTKQIAEALKAQHDIKIDKRKMDLPNGIHSLGYTNVPVKLDKEVEGTIRVHTVEQ

SEQ ID NO: 44406 - protein, 363 aa, Staphylococcus aureus
MSSDLKQTPLYQNYVDRGAKIVEFGGWAMPVQFSSIKEEHNAVRYEIGLFDVSHMGEIEVTGKDASQFVQYLLSNDTDNLTTSKALYTALCNEEGGIIDDLVIYKLADDNYLLVVNAANTEKDFNWILKHKEKFDVEVQNVSNQYGQLAIQGPKARDLINQLVDEDVTEMKMFEFKQGVKLFGANVILSQSGYTGEDGFEIYCNIDDTEKIWDGLLEYNVMPCGLGARDTLRLEAGLPLHGQDLTESITPYEGGIAFASKPLIDADFIGKSVLKDQKENGAPRRTVGLELLEKGIARTGYEVMDLDGNIIGEVTSGTQSPSSGKSIALAMIKRDEFEMGRELLVQVRKRQLKAKIVKKNQIDK

SEQ ID NO: 44407 - protein, 227 aa, Staphylococcus aureus
MEWILFDKDGTLIEFDRSWEKIGVRFVQSLLETFPVHNKEAALRQLGVIKESIDPKSVMGSGSLQQIIQAFNDVTGQDTTDWSKSTSQKLVDERIPEINWVEGVKEALIDLKAKGYQLGIVTSDTKKGVEQFLAHTNAISLFDLIISTEADAYEKPNPKVLSPLFEQYNVDPQKVAIVGDTANDMKTASNANLGMAIGVLTGIATKEELHEADIILNSAADILEALN

SEQ ID NO: 44408 - protein, 264 aa, Staphylococcus aureus
MIHSKKLTLGICLVLLIILIVGYVIMTKTNGRNAQIKDTFNQTLKLYPTKNLDDFYDKEGFRDQEFKKGDKGTWIVNSEMVIEPKGKDMETRGMVLYINRNTRTTKGYYFISEMTDDSNGRPKDDEKRYPVKMEHNKIIPTKPLPNDKLRKEIENFKFFVQYGDFKDINDYKDGDISYNPNVPSYSAKYQLKNDDYNVKQLRKRYNIPTNKAPKLLIKGDGDLKGSSVGSKNLEFTFVENKEENIYFTDSVQYTSSEDTSYESN

SEQ ID NO: 44409 - protein, 373 aa, Staphylococcus aureus
MAELQRGLEGVIAAETKISSIIESQLTYAGYDIDDLAENAQFEEVIFLLWNYRLPNEEELAHLKGKLNQYMTLNPRVYTHFEEYVTDHVHPMTALRTSLSYIAHFDPDAENESDENRYERAMRIQAKVASLVTAFARVRQDKEPLKPNPDLSYAANFLYMLRGELPTDIEVEAFNKALILHADHELNASAFTARCAVSSLSDMYSGIVAAVGSLKGPLHGGANEQVMTMLSEIGSIENVDAYLDEKFANKDKVMGFGHRVYKDGDPRAKYLREMSRQITKDAGREELFEMSVKMEKRMAEEKGLIPNVDFYSASVYHCMEIPHDLFTPIFAVSRSAGWIAHILEQYKDNRIMRPRAKYIGETNRKYIPLEERK

SEQ ID NO: 44410 - protein, 412 aa, Staphylococcus aureus
MSYITKQDKVIAEAIEREFQRQNSNIELIASENFVSEAVMEAQGSVLTNKYAEGYPGRRYYGGCEFVDVTESIAIDRAKALFGAEHVNVQPHSGSQANMAVYLVALEMGDTVLGMNLSHGGHLTHGAPVNFSGKFYNFVEYGVDKDTERINYDEVRKLALEHKPKLIVAGASAYSRTIDFKKFKEIADEVNAKLMVDMAHIAGLVAAGLHPNPVEYADFVTTTTHKTLRGPRGGMILCKEEYKKDIDKTIFPGIQGGPLEHVIAAKAVAFGEALENNFKTYQQQVVKNAKVLAEALINEGFRIVSGGTDNHLVAVDVKGSIGLTGKEAEETLDSVGITCNKNTIPFDQEKPFVTSGIRLGTPAATTRGFDEKAFEEVAKIISLALKNSKDEEKLQQAKERVAKLTAEYPLYQ

SEQ ID NO: 44411 - protein, 204 aa, Staphylococcus aureus
MANPIKIGIGGPVGAGKTQLIEKVVKRLSKEMSIGVITNDIYTKEDEKILVNSGVLPESRIIGVETGGCPHTAIREDASMNFAAIDELLERHDDIELIFIESGGDNLAATFSPELVDFSIYIIDVAQGEKIPRKGGQGMIKSDFFVINKTDLAPYVGASLEQMAEDTKVFRGKRPFTFTNLKTDEGLDEVIDWIERDTLLKGLS

SEQ ID NO: 44412 - protein, 229 aa, Staphylococcus aureus
MIDHTHLRLFQFCDSQFPTGAFSHSFGLETYIQRNIIHDDHTFIAWLKMFLQEQLTYSDGLAMRLVYDALENDDTQKVLHIDKLMFVQNLPKETRVGAKQMGTRMVKLALELYNSPWIAWYHQQMQDKKAKLNPAICFTMLGHHLGVDIETIIDYYLYQNVSSLTQNAVRAIPLGQTAGQKIVTHMIPYIEETRKQIFELKEADFGMTAPGLELNQMAHENVNVRIFIS

SEQ ID NO: 44413 - protein, 698 aa, Staphylococcus aureus
MSQEKKVFKTEWAGRSLTIETGQLAKQANGAVLVRYGDTVVLSTATASKEPRDGDFFPLTVNYEEKMYAAGKIPGGFKKREGRPGDDATLTARLIDRPIRPLFPKGYKHDVQIMNMVLSADPDCSPQMAAMIGSSMALSVSDIPFQGPIAGVNVGYIDGKYIINPTVEEKEVSRLDLEVAGHKDAVNMVEAGASEITEQEMLEAIFFGHEEIQRLVDFQQQIVDHIQPVKQEFIPAERDEALVERVKSLTEEKGLKETVLTFDKQQRDENLDNLKEEIVNEFIDEEDPENELLIKEVYAILNELVKEEVRRLIADEKIRPDGRKPDEIRPLDSEVGILPRTHGSGLFTRGQTQALSVLTLGALGDYQLIDGLGPEEEKRFMHHYNFPNFSVGETGPVRAPGRREIGHGALGERALKYIIPDTADFPYTIRIVSEVLESNGSSSQASICGSTLALMDAGVPIKAPVAGIAMGLVTREDSYTILTDIQGMEDALGDMDFKVAGTKEGITAIQMDIKIDGLTREIIEEALEQARRGRLEIMNHMLQTIDQPRTELSAYAPKVVTMTIKPDKIRDVIGPGGKKINEIIDETGVKLDIEQDGTIFIGAVDQAMINRAREIIEEITREAEVGQTYQATVKRIEKYGAFVGLFPGKDALLHISQISKNRIEKVEDVLKIGDTIEVKITEIDKQGRVNASHRALEE

SEQ ID NO: 44414 - protein, 77 aa, Staphylococcus aureus
MENFDKVKDIIVDRLGVDADKVTEDASFKDDLGADSLDIAELVMELEDEFGTEIPDEEAEKINTVGDAVKFINSLEK

SEQ ID NO: 44415 - protein, 388 aa, Staphylococcus aureus
MRYLTSGESHGPQLTVIVEGIPANLEIKVEDINKEMFKRQGGYGRGRRMQIEKDTVEIVSGVRNGYTLGSPITMVVTNDDFTHWRKIMGAAPISEEERENMKRTITKPRPGHADLVGGMKYNHRDLRNVLERSSARETAARVAVGALCKVLLQQLDIDIYSRVVEIGGIKDKDFYDSETFKANLDRNDVRVIDDSIAQAMRDKIDEAKNEGDSIGGVVQVVVENMPVGVGSYVHYDRKLDGKIAQGVVSINAFKGVSFGEGFKAAEKPGSEIQDEILYNSEIGYYRGSNHLGGLEGGMSNGMPIIVNGVMKPIPTLYKPLNSVDINTKEDFKATIERSDSCAVPAASIVCEHVVAFEIAKALLEEFQSNHIEQLQQQIADRRQLNVEF

SEQ ID NO: 44416 - protein, 176 aa, Staphylococcus aureus
MRTLYYFLIGILLFYIDTAIGLLIPMHIGKFELVFVPHLTFMYILMMVVYRGFGVSLLLSIFLGVMTDVYFGSIYGVYLFGYILFLALIDRFFKIFYKDHSMLFIIILASTLLLEVYVALIYGMLGFIQFDIIHFVVFRLLPTLIMNFVLLIMLYPLIIKFLKKTNNDIDMKRRQW

SEQ ID NO: 44417 - protein, 303 aa, Staphylococcus aureus
MDNNEKEKSKSELLVVTGLSGAGKSLVIQCLEDMGYFCVDNLPPVLLPKFVELMEQGNPSLRKVAIAIDLRGKELFNSLVAVVDKVKSESDVIIDVMFLEASTEKLISRYKETRRAHPLMEQGKRSLINAINDEREHLSQIRSIANFVIDTTKLSPKELKERIRRYYEDEEFETFTINVTSFGFKHGIQMDADLVFDVRFLPNPYYVVDLRPLTGLDKDVYNYVMKWKETEIFFEKLTDLLDFMIPGYKKEGKSQLVIAIGCTGGQHRSVALAERLGNYLNEVFEYNVYVHHRDAHIESGEKK

SEQ ID NO: 44418 - protein, 331 aa, Staphylococcus aureus
MRQIKVVLIGGGTGLSVMARGLREFPIDITAIVTVADNGGSTGKIRDEMDIPAPGDIRNVIAALSDSESVLSQLFQYRFEENQISGHSLGNLLIAGMTNITNDFGHAIKALSKILNIKGRVIPSTNTSVQLNAVMEDGEIVFGETNIPKKHKKIDRVFLEPNDVQPMEEAIDALREADLIVLGPGSLYTSVISNLCVNGISDALIHSDAPKLYVSNVMTQPGETDGYSVKDHIDAIHRQAGQPFIDYVICSTQTFNAQVLKKYEEKHSKPVEVNKAELEKESINVKTSSNLVEISENHLVRHNTKVLSTMIYDIALELISTIPFVPSDKRK

SEQ ID NO: 44419 - protein, 304 aa, Staphylococcus aureus
MSNVLELTIPASTANLGVGFDSIGMALDKFLHLSVKETSGTKWEYIFHDDASKQLPTDETNFIYHVAQQVASKYSVDLPILCIEMRSDIPLARGLGSSASALVGAIYIANYFGDIQLSKHEVLQLATEIEGHPDNVAPTIYGGLIAGFYNDVSKETSVAHIDIPDVDVIVTIPTYELKTEASRRALPQKLTHSEAVKSSAISNTMICALAQHNYELAGKLMQQDGFHEPYRQHLIAEFDEVKTIASQHNAYATVISGAGPTILIFSRKENSGELVRSLNSQVVSCHSELVDINISGVKERIVYQ

SEQ ID NO: 44420 - protein, 267 aa, Staphylococcus aureus
MTNYKVVVLDMDDTLLNSDNVISEETANYLTAIQDEGYYVVLASGRPTEGMIPTARDLKLPEHHSYIISYNGSKTINMTNEEVEVSKSIGKQDFDEIVDYCRDRGFFVLTYHDGQIIYDSEHEYMNIEAELTGLPMKRVDDIKAYIQGDVPKVMGVDYVANITEARIDLNGVFNDNVDATTSKPFFLEFMAKDVSKGNAIKALCHKLGYSVDQVIAFGDSMNDKSMFEVAGLAIAMGNASDELKQYADEVTLDHNENGIPHALKKLL

SEQ ID NO: 44421 - protein, 422 aa, Staphylococcus aureus
MTAEKITQGTEGLNVPNEPIIPFIIGDGIGPDIWKAASRVIDAAVEKAYNGEKRIEWKEVLAGQKAFDTTGEWLPQETLDTIKEYLIAVKGPLTTPIGGGIRSLNVALRQELDLFTCLRPVRWFKGVPSPVKRPQDVDMVIFRENTEDIYAGIEFKEGTTEVKKVIDFLQNEMGATNIRFPETSGIGIKPVSKEGTERLVRAAIQYAIDNNRKSVTLVHKGNIMKFTEGSFKQWGYDLALSEFGDQVFTWQQYDEIVENEGRDAANAAQEKAEKEGKIIIKDSIADIFLQQILTRPAEHDVVATMNLNGDYISDALAAQVGGIGIAPGANINYETGHAIFEATHGTAPKYAGLNKVNPSSVILSSVLMLEHLGWQEAADKITDSIEDTIASKVVTYDFARLMDGAEEVSTSAFADELIKNLK

SEQ ID NO: 44422 - protein, 869 aa, Staphylococcus aureus
MDINKMTYAVQSALQQAVELSQQHKLQNIEIEAILSAALNESESLYKSILERANIEVDQLNKAYEDKLNTYASVEGDNIQYGQYISQQANQLITKAESYMKEYEDEYISMEHILRSAMDIDQTTKHYINNKVEVIKEIIKKVRGGNHVTSQNPEVNYEALAKYGRDLVEEVRQGKMDPVIGRDEEIRNTIRILSRKTKNNPVLIGEPGVGKTAIVEGLAQRIVKKDVPESLLDKTVFELDLSALVAGAKYRGEFEERLKAVLKEVKESDGRIILFIDEIHMLVGAGKTDGAMDAGNMLKPMLARGELHCIGATTLNEYREYIEKDSALERRFQKVAVSEPDVEDTISILRGLKERYEVYHGVRIQDRALVAAAELSDRYITDRFLPDKAIDLVDQACATIRTEMGSNPTELDQVNRRVMQLEIEESALKNESDNASKQRLQELQEELANEKEKQAALQSRVESEKEKIANLQEKRAQLDESRQALEDAQTNNNLEKAAELQYGTIPQLEKELRELEDNFQDEQGEDTDRMIREVVTDEEIGDIVSQWTGIPVSKLVETEREKLLHLSDILHKRVVGQDKAVDLVSDAVVRARAGIKDPNRPIGSFLFLGPTGVGKTELAKSLAASLFDSEKHMIRIDMSEYMEKHAVSRLIGAPPGYIGHDEGGQLTEAVRRNPYSVILLDEVEKAHTDVFNVLLQILDEGRLTDSKGRSVDFKNTIIIMTSNIGSQVLLENVKETGEITESTEKAVMTNLNAYFKPEILNRMDDIVLFKPLSIDDMSMIVDKILTQLNIRLLEQRISIEVSDDAKAWLGQEAYEPQYGARPLKRFVQRQIETPLARMMIKEGFPEGTTIKVNLNSDNNLTFNVEKIHE

SEQ ID NO: 44423 - protein, 300 aa, Staphylococcus aureus
MKFLSFKYNDKTSYGVKVKREDAVWDLTQVFADFAEGDFHPKTLLAGLQQNHTLDFQEQVRKAVVAAEDSGKAEDYKISFNDIEFLPPVTPPNNVIAFGRNYKDHANELNHEVEKLYVFTKAASSLTGDNATIPNHKDITDQLDYEGELGIVIGKSGEKIPKALALDYVYGYTIINDITDRKAQSEQDQAFLSKSLTGGCPMGPYIVTKDELPLPENVNIVTKVNNEIRQDGNTGEMILKIDELIEEISKYVALHPGDIIATGTPAGVGAGMQPPKFLQPGDEVKVTIDNIGTLTTYIAK

SEQ ID NO: 44424 - protein, 313 aa, Staphylococcus aureus
MRNIENLNPGDSVDHFFLVHKATQGVTAQGKDYMTLHLQDKSGEIEAKFWTATKNDMATIKPEEIVHVKGDIINYRGNKQMKVNQIRLATTEDQLKTEQFVDGAPLSPAEIQEEISHYLLDIENANLQRITRHLLKKYQERFYTYPAASSHHHNFASGLSYHVLTMLRIAKSICDIYPLLNKSLLYSGIILHDIGKVRELSGPVATSYTVEGNLLGHISIASDEVVEAARELNIEGEEIMLLRHMILSHHGKLEYGSPKLPYLKEAEILCYIDNIDARMNMFEKAYKKTDKGQFTDKIFGLENRRFYNPESLD

SEQ ID NO: 44425 - protein, 159 aa, Staphylococcus aureus
MKITILAVGKLKEKYWKQAIAEYEKRLGPYTKIDIIEVPDEKAPENMSDKEIEQVKEKEGQRILAKIKPQSTVITLEIQGKMLSSEGLAQELNQRMTQGQSDFVFVIGGSNGLHKDVLQRSNYALSFSKMTFPHQMMRVVLIEQVYRAFKIMRGEAYHK

SEQ ID NO: 44426 - protein, 133 aa, Staphylococcus aureus
MSGLVNADQTVIDALDIRLEPKFTSDIVPVGLNKDGSLSKRGSQVADEATIYKFIQHNKENFIETASNIMDGHTEVAPLKYKQKLPCAFCSYQSVCHVDGMIDSKRYRTVDETINPIEAIQNININDEFGGEQ

SEQ ID NO: 44427 - protein, 299 aa, Staphylococcus aureus
MGLVIEHVTKRFGKMTAVNDISLELESGKMLGFLGRNGAGKTTTFRMFLGLSEPTEGHITYNGKKLDKTMYNRIGYLPEERGLHGKLTVEEELKYLATLKGMSKTEIQQQISYWLERFDITENRKKRIDSLSKGNQQKIQLLASMLHKPELLILDEPFSGLDPVNVELLKEAVKDLNDWGSTIVYSSHRMEHVEELCDDVCILDKGQLVVSGDINHVRASNGNKKVVIESETTLPDLTNIRGIIHSENMKQGLQLTIENEDVAKDIYQVVAHQGYVKRFQVVEPSLQDIFIEKVGGKDA

SEQ ID NO: 44428 - protein, 511 aa, Staphylococcus aureus
MNKGVTYMTLYLDGETLTIEDIKSFLQQQSKIEIIDDALERVKKSRAVVERIIENEETVYGITTGFGLFSDVRIDPTQYNELQVNLIRSHACGLGEPFSKEVALVMMILRLNTLLKGHSGATLELVRQLQFFINERIIPIIPQQGSLGASGDLAPLSHLALALIGEGKVLYRGEEKDSDDVLRELNRQPLNLQAKEGLALINGTQAMTAQGVISYIEAEDLGYQSEWIAALTHQSLNGIIDAYRHDVHSVRNFQEQINVAARMRDWLEGSTLTTRQAEIRVQDAYTLRCIPQIHGASFQVFNYVKQQLEFEMNAANDNPLIFEEANETFVISGGNFHGQPIAFALDHLKLGVSELANVSERRLERLVNPQLNGDLPAFLSPEPGLQSGAMIMQYAAASLVSENKTLAHPASVDSITSSANQEDHVSMGTTAARHGYQIIENARRVLAIECVIALQAAELKGVEGLSPKTRRKYEEFRSIVPSITHDRQFHKDIEAVAQYLKQSIYQTTACH

SEQ ID NO: 44429 - protein, 351 aa, Staphylococcus aureus
MTGFSVYLGQPLDEAYIKRMIKQGYQMIFTSVQIPEEDDETKYHYFTKLLNLLKYEQVTYLIDANPSILTPSFYEHLRQYDAQFMIRIDHSTSIEAIEAIMAQGLKCCLNASIISRELLTSLHQQLNDFTLLSFCHNYYPRPDTGLSVDLVNKKNELIYQFNPKAQIYGFIVGSGLRGPLHKGLPTIEATRHSHPVVAAKLLQETGVSEVLVGDSLIEMRQAKQLIDFCKHRHFTLCIEEVFDTTVTYLFDMCHKVRPDNPENVIRSETSRQICPHSIQPQFTTQRRIGSVTVDNLNNGRYQGEMQIVRQTLSAHDNVNVVAQIIKEDLPLLSCIEPNDTFDFQKTRECKK

SEQ ID NO: 44430 - protein, 286 aa, Staphylococcus aureus
MYYIAIDIGGTQIKSAVIDKQLNMFDYQQISTPDNKSELITDKVYEIVTGYMKQYQLIQPVIGISSAGVVDEQKGEIGYAGPTIPNYKGTNFKRLLKSLSPYVKVKNDVNAALLGELKLHQYQAERIFCMTLGTGIGGAYKNNQGHIDNGELHKANEVGYLLYRPTENTTFEQRAATSALKKRMIDGGFTRSTHVPVLFEAAEEGDDIAKQILNEWAEDVAEGIAQIQVMYDPGLILIGGGISEQGDNLIKYIEPKVAHYLPKDYVYAPIQTTKSKNDAALYGCLQ

SEQ ID NO: 44431 - protein, 197 aa, Staphylococcus aureus
MEHIFREGQKGAPTLILLHGTGGDEFDLLPLGEALNENYHLLSIRGQVSENGMNRYFKRLGEGVYDEEDLEFRGQELLAFIKEAAERYEFDIEKAVLVGFSNGSNIAINLMLRSEAPFKKALLYAPLYPVEVTSTKDLSDVSVLLSMGKHDPIVPLAASEQVINLFKTRGAVVEEVWVNGHEITETGLTAGQQILGK

SEQ ID NO: 44432 - protein, 97 aa, Staphylococcus aureus
MTEQDNAHHSEQIKTNLKSRLNRIEGQVRAINRMIEEDVYCDDVLTQIRATRSALNSVAIKLLEQHMKSCIMNKVNQGAQEEAMEELLVTFQKLIKD

SEQ ID NO: 44433 - protein, 264 aa, Staphylococcus aureus
MNVSVNIKNVTKEYRIYRTNKERMKDALIPKHKNKTFFALDDISLKAYEGDVIGLVGINGSGKSTLSNIIGGSLSPTVGKVDRNGEVSVIAISAGLSGQLTGIENIEFKMLCMGFKRKEIKAMTPKIIEFSELGEFIYQPVKKYSSGMRAKLGFSINITVNPDILVIDEALSVGDQTFAQKCLDKIYEFKEQNKTIFFVSHNLGQVRQFCTKIAWIEGGKLKDYGELDDVLPKYEAFLNDFKKKSKAEQKEFRNKLDEARFVIK

SEQ ID NO: 44434 - protein, 152 aa, Staphylococcus aureus
MYKSKILLKYIFSEESEVKDLTEEKYNQDYEALTFSFKEETYQSRLAKKTPTKAGYFVTCWTKDENNCNQPYSKEAFADYLMIIVIDEELSGYFLFPRELLVEKGILTTFEHKGKMAFRVYPKWCNQLNKTAGQTQKWQCKYFLNTNKKSYG

SEQ ID NO: 44435 - protein, 329 aa, Staphylococcus aureus
MTKLAVVGATGLVGTKMLETLNRKNIPFDELVLFSSARSAGQEVEFQEKTYTVQELTDARASEHFDYVLMSAGGGTSEHFAPLFEKAGAIVIDNSSQWRMAEDIDLIVPEVNEPTFTRGIIANPNCSTIQSVVPLKVLQDAYGLKRVAYTTYQAVSGSGMKGKKDLAEGVNGKAPEAYPHPIYNNVLPHIDVFLENGYTKEEQKMIDETRKILNAPDLKVTATCARVPVQDSHSVEIDVTLDKETTAEDIKALFDQDDRVVLVDNPENNEYPMAINSTNKDEVFVGRIRRDDSLENTFHVWCTSDNLLKGAALNAVQVLEQVMRLKGAN

SEQ ID NO: 44436 - protein, 420 aa, Staphylococcus aureus
MTNVLIEDLKWRGLIYQQTDEQGIEDLLNKEQVTLYCGADPTADSLHIGHLLPFLTLRRFQEHGHRPIVLIGGGTGMIGDPSGKSEERVLQTEEQVDKNIEGISKQMHNIFEFGTDHGAVLVNNRDWLGQISLISFLRDYGKHVGVNYMLGKDSIQSRLEHGISYTEFTYTILQAIDFGHLNRELNCKIQVGGSDQWGNITSGIELMRRMYGQTDAYGLTIPLVTKSDGKKFGKSESGAVWLDAEKTSPYEFYQFWINQSDEDVIKFLKYFTFLGKEEIDRLEQSKNEAPHLREAQKTLAEEVTKFIHGEDALNDAIRISQALFSGDLKSLSAKELKDGFKDVPQVTLSNDTTNIVEVLIETGISPSKRQAREDVNNGAIYINGERQQDVNYALAPEDKIDGEFTIIRRGKKKYFMVNYQ

SEQ ID NO: 44437 - protein, 332 aa, Staphylococcus aureus
MKMKKLVKSSVASSIALLLLSNTVDAAQHITPVSEKKVDDKITLYKTTATSDNDKLNISQILTFNFIKDKSYDKDTLVLKAAGNINSGYKKPNPKDYNYSQFYWGGKYNVSVSSESNDAVNVVDYAPKNQNEEFQVQQTLGYSYGGDINISNGLSGGLNGSKSFSETINYKQESYRTTIDRKTNHKSIGWGVEAHKIMNNGWGPYGRDSYDPTYGNELFLGGRQSSSNAGQNFLPTHQMPLLARGNFNPEFISVLSHKQNDTKKSKIKVTYQREMDRYTNQWNRLHWIGNNYKNQNTVTFTSTYEVDWQNHTVKLIGTDLKKLILEYRIVYD

SEQ ID NO: 44438 - protein, 121 aa, Staphylococcus aureus
MTTTPYDIIGKEALYDMIDYFYTLVEKDERLNHLFPGDFAETSRKQKQFLTQFLGGPNIYTEEHGHPMLRKRHMDFTITEFERDAWLENMQTAINRAAFPQGVGDYLFERLRLTANHMVNS

SEQ ID NO: 44439 - protein, 184 aa, Staphylococcus aureus
MKQLSYKVVSKTEKIYTYTCYNEIIPKRDIITESMICDCIQNAGIDLEVFKDDLQKSKLTESLKIDLHIAREMEIEQAPSLVFFSEDVHEEGLKVEGLYPYHIYTYIINELMGKPIEKNLPPKLETYIQQQQLVTMEELLTIYEWPEKLLNKELKKLAIQQKIEKLKYPDGDFWKSKMPKIKSK

SEQ ID NO: 44440 - protein, 108 aa, Staphylococcus aureus
MNMAGELRIMENKSREDINLSPVSKIEIYSFFDPFSSDCFKLSAILSKLRIEYNQYIRIRHILNPSLKVLTKCQAQSTSNFDNIALAYKAAELQGRVEDRKDLYIHML

SEQ ID NO: 44441 - protein, 334 aa, Staphylococcus aureus
MTTVYYDQDVKTDALQGKKIAVVGYGSQGHAHAQNLKDNGYDVVIGIRPGRSFDKAKEDGFDVFPVAEAVKQADVIMVLLPDEIQGDVYKNEIEPNLEKHNALAFAHGFNIHFGVIQPPADVDVFLVAPKGPGHLVRRTFVEGSAVPSLFGIQQDASGQARNIALSYAKGIGATRAGVIETTFKEETETDLFGEQAVLCGGVSKLIQSGFETLVEAGYQPELAYFEVLHEMKLIVDLMYEGGMENVRYSISNTAEFGDYVSGPRVITPDVKENMKAVLTDIQNGNFSNRFIEDNKNGFKEFYKLREEQHGHQIEKVGRELREMMPFIKSKSIEK

SEQ ID NO: 44442 - protein, 100 aa, Staphylococcus aureus
MHFTQREQDKLMIVVAAEVARRRKARGLKLNHPEALALISDELLEGARDGKTVAELMSYGRQILNKEDVMDGVEHMITDIEIEATFPDGTKLITVHHPIV

SEQ ID NO: 44443 - protein, 571 aa, Staphylococcus aureus
MSFKMTQNQYTSLYGPTVGDSIRLGDTNLFAQIEKDYAVYGEEATFGGGKSIRDGMAQNPRVTRDDVNVADLVISNAVIIDYDKVVKADIGIKNGYIFAIGNAGNPDIMDNVDIIIGSTTDIIAAEGKIVTAGGIDTHVHFINPEQAEVALESGITTHIGGGTGASEGSKATTVTPGPWHIHRMLEAAEGLPINVGFTGKGQATNPTALIEQINAGAIGLKVHEDWGATPSALSHALDVADEFDVQIALHADTLNEAGFMEDTMAAVKDRVLHMYHTEGAGGGHAPDLIKSAAFSNILPSSTNPTLPYTHNTVDEHLDMVMITHHLNAAIPEDIAFADSRIRKETIAAEDVLQDMGVFSMISSDSQAMGRVGEVITRTWQVAHRMKEQRGPLDGDFEHNDNNRIKRYIAKYTINPAITHGISEYVGSIEPGKLADIVLWDPIFFGVKPELVVKGGLINSAVNGDANGSIPTSEPMKYRKMYGQYGGNLTSTSMTFVSKTAYENGINRALNLKRMVRPVKNIRQLSKADMKNNSATPKLDVDPQTYEVYVDGEKITSNAATELPLTQRYFLF

SEQ ID NO: 44444 - protein, 466 aa, Staphylococcus aureus
MDTSKQFRGDNRLLLGIVLGVITFWLFAQSLVNLVVPLQSTYSSDVGTINIAVSLSALFAGLFIVGAGDVADKFGRVKITYVGLILNVVGSLLIIITPLPAFLIIGRIIQGLSAACIMPSTLAIINEYYIGTRRQRALSYWSIGSWGGSGICTLFGGLMATYIGWRSIFVVSILLTLLAMYLIKHAPETKAEPIKGMKAEAKKFDVIGLVILVVTMLSLNVIITQTSHFGLVSPLILGLIVVFICSLVGFVYYENKIKHPLVDFSIFKNRGYSGATISNFLLNGVAGGALIVINTYYQQQLGFNSSQTGYISLTYLIAVLSMIRVGEKILSQHGPKRPLLLGSGFTVIGLILLSLTFLPEVWYIISSIVGYLLFGTGLGLYATPSTDTAVASAPDDKSGVASGVYKMASSLGNAFGVAVSGTVYTVLAANLNLNLGGFTGMMFNALLAIVAFLVILLLVPKNQTNL

SEQ ID NO: 44445 - protein, 389 aa, Staphylococcus aureus
MIKNTIKKLIEHSIYTTFKLLSKLPNKNLIYFESFHGKQYSDNPKALYEYLTEHSDAQLIWGVKKGYEHIFQQYNVPYVTKFSMKWFLAMPRAKAWMINTRTPDWLYKSPRTTYLQTWHGTPLKKIGLDISNVKMLGTNTQNYQDGFKKESQRWDYLVSPNPYSTSIFQHAFHVSRDKILETGYPRNDKLSHKRNDTEYINGIKTRLNIPLDKKVIMYAPTWRDDEAIREGSYQFNVNFDIEALRQALDDDYVILLRMHYLVVTRIDEHDDFVKDVSDYEDISDLYLISDALVTDYSSVMFDFGVLKRPQIFYAYDLDKYGDELRGFYMDYKKELPGPIVENQTALIDALKQIDETANEYIEARTVFYQKFCSLEDGQASQRICQTIFK

SEQ ID NO: 44446 - protein, 720 aa, Staphylococcus aureus
MNKINDRDLTELSSYWVYQDINKDNDFTVNGKRFKQVDEYNDNGNKNKKGASDLKIYELLDEKGKPTGEQTMIYQGTSNEAINPNNPLKSLDIGDDWLQNAKLMDNSNKSTDYLKQSDEFADLYRDKLNDANKLSKYNFTQKYGVSPNNYKNKTIVADGGNSEGGAGAKYQGAKHPNEKVVATDPAMVPYAAWQKFARPRFDNMISFNSTNDLLTWLQDPFIKDMPGKRVNISDGVPRLDALIDSHVGYKRKLNRKDNTYDTVPLIKIKSVKDTEIKNGKKVKKTINITLDMDGRIPINVWTGDSIARSGRGTLIKLNLENLDALSKLITGETSGMLAECVIFLNESFNISENENKNFADRKQQLSEGFKDKINLFQLEEMERTLISKINSLEEVADETIESISAVKHLLPDFALDALKERINELFKGIKSFIEKVYDSIDNEILEIFKNIDHDFRDGVSEEMMKHLKVVKQNIERIKNQNDIYGRQIAEIRSIMKQQDATILDGNFQINCSGENMVQGLVIPSNYLGRKMKILKDHIDDGIKKIADYVQSIYDEYASKIVDVIKYLINTIPKIRKNLRHAIEMLNVKKKEFLSLIPNVTCNYIKTKLEELDNTLGKWEPFLNDLKAVSPILDNHLDDIVKNMKPLIVQMLFEPSHYDDMFILNTQAHARLDQMAQQFEVVCNGLNENEGQAIQTMDQSASLIRSNLIQVKEQLEKLAVY

SEQ ID NO: 44447 - protein, 532 aa, Staphylococcus aureus
MRKLTKMSAMLLASGLILTGCGGNKGLEEKKENKQLTYTTVKDIGDMNPHVYGGSMSAESMIYEPLVRNTKDGIKPLLAKKWDVSEDGKTYTFHLRDDVKFHDGTTFDADAVKKNIDAVQQNKKLHSWLKISTLIDNVKVKDKYTVELNLKEAYQPALAELAMPRPYVFVSPKDFKNGTTKDGVKKFDGTGPFKLGEHKKDESADFNKNDQYWGEKSKLNKVQAKVMPAGETAFLSMKKGETNFAFTDDRGTDSLDKDSLKQLKDTGDYQVKRSQPMNTKMLVVNSGKKDNAVSDKTVRQAIGHMVNRDKIAKEILDGQEKPATQLFAKNVTDINFDMPTRKYDLKKAESLLDEAGWKKGKDSDVRQKDGKNLEMAMYYDKGSSSQKEQAEYLQAEFKKMGIKLNINGETSDKIAERRTSGDYDLMFNQTWGLLYDPQSTIAAFKAKNGYESATSGIENKDKIYNSIDDAFKIQNGKERSDAYKNILKQIDDEGIFIPISHGSMTVVAPKDLEKVSFTQSQYELPFNEMQYK

SEQ ID NO: 44448 - protein, 347 aa, Staphylococcus aureus
MNHYNRTIGSMLILVYSMLAAFLFIDKVFVNIIYFQGMFYTQIFGIPVFLFLNLIIILLCIIVGSVLAYKINQQNDWIKTQIERSMEGETVGINDQNIEIYSETLDLYHTLVPLNQELHKLRLKTQNLTNENYNINDVKVKKIIEDERQRLARELHDSVSQQLFAASMMLSAIKETKLEPPLDQQIPILEKMVQDSQLEMRALLLHLRPLGLKDKSLGEGIKDLVIDLQKKVPMKVVHEIQDFKVPKGIEDHLFRITQEAISNTLRHSNGTKVTVELFNKDDYLLLRIQDNGKGFNVDEKLEQSYGLKNMRERALEIGATFHIVSLPDSGTRIEVKAPLNKEDSYDD

SEQ ID NO: 44449 - protein, 157 aa, Staphylococcus aureus
MKGVIIMSTNKNDYEHMLFYFAYKTFITTADEIIEKYGMSRQHHRFLFFINKLPGITIKSLLEILEISKQGSHATLQKLKEQGLIIEKVLETDRRVKKLYSTDKGDQLIAELNKAQDELLQNIYQQVGSDWYDVMEALAKGRPGFDFIKHLKDEKES

SEQ ID NO: 44450 - protein, 268 aa, Staphylococcus aureus
MAFHDKTATQVTNIELNVRDLDLMTTFYKNILGLSVKSSDDNTTVLSVGTGGHTLTLHLLEDGRQTSPREAGLFHIAFLLPTTEDLANFLYFVAQKNMGIGAGDHLVSEALYFNDPEGNGIEVYRDRPSSSWEWQNGKVKMDTLEVDSQTLLTHRTDEGWQGMPAKGMIGHLHLKTHDLDAAYQCYIEQLGFQHVSDFPRALFMSTNHYHHHIAANTWQSNQARQNNAQSYGLTHVDIYQPDASTHTFTAPEGFDITVHSNTDLVPEK

SEQ ID NO: 44451 - protein, 446 aa, Staphylococcus aureus
MPKRTFTKEDIRKFAEEENVRYLRLQFTDILGTIKNVEVPVSQLEKVLDNEMMFDGSSIEGFVRIEESDMYLHPDLDTWVIFPWTAGQGKVARLICDVYKTDGTPFEGDPRANLKRVLKEMEDLGFTDFNLGPEPEFFLFKLDEKGEPTLELNDDGGYFDLAPTDLGENCRRDIVLELEDMGFDIEASHHEVAPGQHEIDFKYADAVTACDNIQTFKLVVKTIARKHNLHATFMPKPLFGVNGSGMHFNVSLFKGKENAFFDPNTEMGLTETAYQFTAGVLKNARGFTAVCNPLVNSYKRLVPGYEAPCYIAWSGKNRSPLIRVPSSRGLSTRIEVRSVDPAANPYMALAAILEAGLDGIKNKLKVPEPVNQNIYEMNREEREAVGIQDLPSTLYTALKAMRENEVIKKALGNHIYNQFINSKSIEWDYYRTQVSEWERDQYMKQY

SEQ ID NO: 44452 - protein, 333 aa, Staphylococcus aureus
MVKLSVLDYALIDEGKDAQKALQDSVTLAKLADRLGFKRIWFTEHHNVPAFACSSPELLMMHTLAQTNHIRVGSGGVMLPHYRPYKIAEHFRMMAALYPNRIDLGIGNNPGTTMVKQALDGINPTYDSYDESISLLRDYLTIKDKPSAHTLGVQPHIDHFPEMWLLSSSATSAKIAAELGIGLSVGTFLLPDINAIHAAKDNIDIYKKHFQASTIKMDAKVMASVFVIVADNEAEVAALQHALDVWLLGKLQFAEFEHFPSVDTAQKYKLNDRDKEMIQVHQARIIAGTQEQVKAQLDDFIATFEVDEVLVAPLIPGIEQRCKTLKLLAEIYL

SEQ ID NO: 44453 - protein, 496 aa, Staphylococcus aureus
MSSKKEAYDLADKLSSKGIKSVALTGDDSVNYRQIVIEKLKEGKINYIITVDLFNEGIDIPEVNQVVMLRPTESSIIFIQQLGRGLRKSANKEYVTVIDFIGNYKTNYLIPIALSGDQSQNKDNYKKFLTNNDSINGVSTINFEEVAKKQIYNSLDAVSLNQNKLILKAYEEVENRLGHMPLLMDFIQQHSIDPSVIFSKFSNYYEFLLRYKKIDALLTENESKNLVFFSRQIAPGLKRIDSLVLEELLKNELTYDELKNKMLNEVKDITEDDIDTSLRILDFSFYNAGIEKIYGSPIIECNERMIRLSDAFTNALSNQTFKIFLEDLIELSKYNNEKYQKGKNGLILYNKYSREDFSKIFNWNKNGSSVIMGYMIRSQEMPIFITYDKHEDISDSTKYEDEFLSQDELKWFTKSNRTLKSKEVQKILSHRAKGIKMYIFVQKKDDDGIYFYYLGTAGYIEGSEKQDKMPNGSNVVTMDLALDKAVRDDIYRYITN

SEQ ID NO: 44454 - protein, 169 aa, Staphylococcus aureus
MIRLGKMSDLDQILNLVEEAKELMKEHDNEQWDDQYPLLEHFEEDIAKDYLYVLEENDKIYGFIVVDQDQAEWYDDIDWPVNREGAFVIHRLTGSKEYKGAATELFNYVIDVVKARGAEVILTDTFALNKPAQGLFAKFGFHKVGEQLMEYPPYDKGEPFYAYYKNLKE

SEQ ID NO: 44455 - protein, 91 aa, Staphylococcus aureus
MAVKIRLTRLGSKRNPFYRIVVADARSPRDGRIIEQIGTYNPTSANAPEIKVDEALALKWLNDGAKPTDTVHNILSKEGIMKKFDEQKKAK

SEQ ID NO: 44456 - protein, 314 aa, Staphylococcus aureus
MAIECPVTNLEEAYMYQTIIIGGGPSGLMAAVAASEQSSSVLLIEKKKGLGRKLKISGGGRCNVTNRLPYAEIIKNIPGNGKFLYSPFSIFDNESIIDFFESRGVKLKEEDHGRMFPVSNKAQDVVDTLVTTIERQHVTIKEEEAVSRIEVNTDQTFTVHTQNNSYESHSLVIATGGTSVPQTGSTGDGYKFAQDLGHTITELFPTEVPITSAEPFIKSNRLKGLSLKDVELSVLKKNGKKRISHQMDMLFTHFGISGPAALRCSQFVYKEQKNQKTQHISMAIDAFPELNHEQLKQHITSLIKSTIERLSKYV

SEQ ID NO: 44457 - protein, 953 aa, Staphylococcus aureus
MNNKKTATNRKGMIPNRLNKFSIRKYSVGTASILVGTTLIFGLSGHEAKAAEHTNGELNQSKNETTAPSENKTTEKVDSRQLKDNTQTATADQPKVTMSDSATVKETSSNMQSPQNATASQSTTQTSNVTTNDKSSTTYSNETDKSNLTQAKNVSTTPKTTTIKQRALNRMAVNTVAAPQQGTNVNDKVHFTNIDIAIDKGHVNKTTGNTEFWATSSDVLKLKANYTIDDSVKEGDTFTFKYGQYFRPGSVRLPSQTQNLYNAQGNIIAKGIYDSKTNTTTYTFTNYVDQYTNVSGSFEQVAFAKRENATTDKTAYKMEVTLGNDTYSKDVIVDYGNQKGQQLISSTNYINNEDLSRNMTVYVNQPKKTYTKETFVTNLTGYKFNPDAKNFKIYEVTDQNQFVDSFTPDTSKLKDVTGQFDVIYSNDNKTATVDLLNGQSSSDKQYIIQQVAYPDNSSTDNGKIDYTLETQNGKSSWSNSYSNVNGSSTANGDQKKYNLGDYVWEDTNKDGKQDANEKGIKGVYVILKDSNGKELDRTTTDENGKYQFTGLSNGTYSVEFSTPAGYTPTTANAGTDDAVDSDGLTTTGVIKDADNMTLDSGFYKTPKYSLGDYVWYDSNKDGKQDSTEKGIKGVKVTLQNEKGEVIGTTETDENGKYRFDNLDSGKYKVIFEKPAGLTQTGTNTTEDDKDADGGEVDVTITDHDDFTLDNGYYEEETSDSDSDSDSDSDSDSDSDSDSDSDSDSDSDSDSDSDSDSDSDSDSDSDSDSDSDSESDSDSDSDSDSDSDSDSDSDSDSDSDSDSDSDSDSDSDSDSDSDSDSDSDNDSDSDSDSDSDSDSDSDSDSDSDSDSDSDSDSDSDSDSDSDSDSDSDSDSDSDSDSDSDSDSDSDSDSDAGKHTPTKPMSTVKDQHKTAKALPETGSENNNSNNGTLFGGLFAALGSLLLFGRRKKQNK

SEQ ID NO: 44458 - protein, 91 aa, Staphylococcus aureus
MTKETDNKKTVATSDNKDTQQQNQTEEDERQGLNGYRKTDLDLEIEQELREMMKTGENETKNDYKKFKVFSLISTLVIVILAIIRFVHKMI

SEQ ID NO: 44459 - protein, 419 aa, Staphylococcus aureus
MKFTELTVTEFDNFVQNPSLESHYFQVKENIVTRENDGFEVVLLGIKDDNNKVIAASLFSKIPTMGSYVYYSNRGPVMDFSDLGLVDYYLKELDKYLQQHQCLYVKLDPYWLYHLYDKDIVPFEGREKNDALVNLFKSHGYEHHGFTTEYDTSSQVRWMGVLNLEGKTPETLKKTFDSQRKRNINKAINYGVKVRFLERDEFNLFLDLYRETEERAGFVSKTDDYFYNFIDTYGDKVLVPLAYIDLDEYVLKLQQELNDKENRRDQMMAKENKSDKQMKKIAELDKQIDHDQHELLNASELSKTDGPILNLASGVYFANAYEVNYFSGGSSEKYNQFMGPYMMHWFMINYCFDNGYDRYNFYGLSGDFTENSEDYGVYRFKRGFNVQIEELIGDFYKPIHKVKYWLFTTLDKLRKKLKK

SEQ ID NO: 44460 - protein, 184 aa, Staphylococcus aureus
MSDIINETKSRMQKSIESLSRELANISAGRANSNLLNGVTVDYYGAPTPVQQLASINVPEARLLVISPYDKTSVADIEKAIIAANLGVNPTSDGEVIRIAVPALTEERRKERVKDVKKIGEEAKVSVRNIRRDMNDQLKKDEKNGDITEDELRSGTEDVQKATDNSIKEIDQMIADKEKDIMSV

SEQ ID NO: 44461 - protein, 119 aa, Staphylococcus aureus
MILRYATNLKLAKELYQASKPKLQEDKGMIELFEHTFGLQKELVKYVGIAEATTAALYSASFINKNISRLASLSTIGILSVAAYKHFEAGQGKKGAQHALDLLGLATLSLLDTFSCNKK

SEQ ID NO: 44462 - protein, 272 aa, Staphylococcus aureus
MKRLENKVAVVTGASTGIGQASAIALAQEGAYVLAVDIAEAVSETVDKIKSNGDNAKAYNVDISDEQQVVDFVSDIKEQFGRIDVLFNNAGVDNAAGRIHEYPIDVYDKIMNVDMRGTILMTKMMLPLMMNQGGSIVNTSSFSGQAEDLYRSGYNAAKGAVINFTKSIAIEYGRDGIRSNAIAPGTIETPLVDKLTGTSEDDAGKTFRENQKWMTPLGRLGKPEEVAKLVVFLASDDSSFITGETIRIDGGVMAYTWPGEMLSDDSWKRTLE

SEQ ID NO: 44463 - protein, 178 aa, Staphylococcus aureus
MKRLKNFILGLLIVVIVGFLLFMYIQDGRITEYQDYFLQFEWFQPLLISLAALLILIGLILVFSIFKPTHRKPGLYKDFDDGHVYVSRKAVEKTAFDTVAKYDQVRQPNVVAKLYNKKNKSYIDIKTDFFVPNNVQVQSLTEAIRSDIKKNVEYFTEMPVRKLEVNVRDQKTSGPRVL

SEQ ID NO: 44464 - protein, 79 aa, Staphylococcus aureus
MANNHNQNGQDSTQQVINFLKVFKWRIVGFLAFLLIAILFLTLGFWKTVLIIVLCLIGVGIGYMKDRKQDFMNFLNRWS

SEQ ID NO: 44465 - protein, 530 aa, Staphylococcus aureus
MSNLLEVNSLNVQFNYDETTVQAVKNVSFELRKKHILGIVGESGSGKSITAKSILGLLPDYPDHTLTGEIIFNGQSLNNLSTSALQQIRGKDISMIFQDPLSSLNPRLTIGKQITEVLFQHKRVSKSEAKSMTINILEKVGIKHATRQFDAYPHELSGGMRQRVMIAMALILKPQILIADEPTTALDASTQNQLLQLMKSLYEYTETSIIFITHDLGAVYQFCDDVIVMKDGSVVESGTVESIFKSPQHTYTKRLIDAIPDIHQTRPPRPLNNDILLKFDRVSVDYTSPSGSLYRAVNDINLAIRKGETLGIVGESGSGKSTLAKTVVGLKEVSEGFIWYNELPLSLFKDDELKSLRQEIQMIFQDPFASINPRFKVIDVIKRPLIIHGKVKDNDDIIKTVVSLLEKVGLDQSFLYRYPHELSGGQRQRVSIARALAVEPKVIVCDEAVSALDVSIQKDIIELLKQLQLDFGITYLFITHDMGVINEICDRVAVMKNGEIVELNNTEDIIKHPQSDYAKQLISEVAVIAK

SEQ ID NO: 44466 - protein, 231 aa, Staphylococcus aureus
MGKSFSEIINEMITMPNIQWPEVWTAIVETLYMTVVSTIFAFILGLILGVLLFLSAKGKSIGARLFYSIVSFIVNLFRAIPFIILILLLIPFTSLILGTISGPTGALPALIIGAAPFYARLVEIAFKEIDKGVIEAAWSMGANTWIVIRKVLLPEAMPALVSGITVTAIALVGSTAVAGVIGAGGLGNLAYLTGFTRNQNDVILVSTVFILIIVFIIQFIGDWLTNKLDKR

SEQ ID NO: 44467 - protein, 238 aa, Staphylococcus aureus
MIYAGILAGGIGSRMGNVPLPKQFLDIDNKPILIHTIEKFILVSEFNEIIIATPAQWISHTQDILKKYNITDQRVKVVAGGTDRNETIMNIIDHIRNVNGINNDDVIVTHDAVRPFLTQRIIKENIEVAAKYGAVDTVIEAIDTIVMSKDKQNIHSIPVRNEMYQGQTPQSFNIKLLQDSYRALSSEQKEILSDACKIIVESGHAVKLVRGELYNIKVTTPYDLKVANAIIQGDIADD

SEQ ID NO: 44468 - protein, 277 aa, Staphylococcus aureus
MEVKTFYNGNTMPQIGLGTFRVENDENCMESVKYAIEQGYRSIDTAKVYGNEEQVGAGIRAGLESTGIAREDLFITSKLYFEDFGRENVAAAYEASLSRLGLKYLDLYLVHWPGTNEAVMVDTWKGMEDLYKNNKAKNIGVSNFEPEHLEALLAQVSIKPVINQVEYHPYLTQHKLKLYLAAQHIVMESWSPLMNAQILNDETIKDIAQELGKSPAQVVLRWNVQHGVVIIPKSVTPNRISENFQIFDFELSDEQMTRIDGLNQDKRIGPDPKTFEG

SEQ ID NO: 44469 - protein, 591 aa, Staphylococcus aureus
MKKIISIAIIVLALVLSGCGVPTKSEVAQKSSKVEVKGERPTIHFLGQASYENDMNIVKDQLENAGFNVKMNIQPDYGSYRTQRQAGNYDIQIDDWMTVFGDPNYAMTALFSSTGSNSLLKDKHVDQLLNKASTQNEADVKQTYKQIEDEVVFDKGYMAPLYGSKKNLVYDNKVLDKNSVGLPNSRALIWQQFDYNNSRERDTRPLVMTQQDGEIPTLDPIRSIAPSVYSINMNMYTRLLLLDENDHLTTKGSLSRDYAVNKDNKAFYFLLRDDDYFAKVVNGQARNTGERVSAEDVKFSLDRARDKKSVPNNNTYNMHKHINDIKILKDEDIDQLRKEKDKDDKSIYDKLIKAYNVKSLTTDGQKVNNKDGIYQIVKITTDQSMPREVNYLTHSSAGILSKKFVNQVNQEYPKGYGDSSTIPANSDGKNALYASGAYIMTQKNAYQATFQRNPGFNETEKGSYGSPKIKNITLKFNGDPNNALSELRNHSIDMLADVNQKHFDLIKSDKNLSIIRKNGRKSVFLMLNIKKGIFKTHPNLRQAVVNAIDQDQFIKFYRGDKFKIASPITPLVDTGNEQRQDLEKVEKAINQ

SEQ ID NO: 44470 - protein, 194 aa, Staphylococcus aureus
PDSTYIGPDVTIGSDTVIEPGVRINGRTEIGEDVVIGQYSEINNSTIENGACIQQSVVNDASVGANTKVGPFAQLRPGAQLGADVKVGNFVEIKKADLKDGAKVSHLSYIGDAVIGERTNIGCGTITVNYDGENKFKTIVGKDSFVGCNVNLVAPVTIGDDVLVAAGSTITDDVPNDSLAVARARQTTKEGYRK

SEQ ID NO: 44471 - protein, 782 aa, Staphylococcus aureus
MRQKTLDVLEFEKIKSLVANETISDLGLEKVNQMMPATNFETVVFQMEETDEIAQIYNKHRLPSLSGLSKVSAFIHRADIGGVLNVSELNLIKRLIQVQNQFKTFYNQLVEEDEGVKYPILDDKMNQLPVLTDLFHQINETCDTYDLYDNASYELQGIRSKISSTNQRIRQNLDRIVKSQANQKKLSDAIVTVRNERNVIPVKAEYRQDFNGIVHDQSASGQTLYIEPSSVVEMNNQISRLRHDEAIEKERVLTQLTGYVAADKDALLVAEQVMGQLDFLIAKARYSRSIKGTKPIFKEERTVYLPKAYHPLLNRETVVANTIEFMEDIETVIITGPNTGGKTVTLKTLGLIIVMAQSGLLIPTLDGSQLSVFKNVYCDIGDEQSIEQSLSTFSSHMTNIVEILKHADKHSLVLFDELGAGTDPSEGAALAMSILDHVRKIGSLVMATTHYPELKAYSYNREGVMNASVEFDVDTLSPTYKLLMGVPGRSNAFDISKKLGLSLNIINKAKTMIGTDEKEINEMIESLERNYKRVETQRLELDRLVKEAEQVHDDLSKQYQQFQNYEKSLIEEAKEKANQKIKAATKEADDIIKDLRQLREQKGADVKEHELIDKKKRLDDHYEAKSIKQNVQKQKYDKIVAGDEVKVLSYGQKGEVLEIVNDEEAIVQMGIIKMKLPIEDLEKKQKEKVKPTKMVTRQNRQTIKTELDLRGYRYEDALIELDQYLDQAVLSNYEQVYIIHGKGTGALQKGVQQHLKKHKSVSDFRGGMPSEGGFGVTVATLK

SEQ ID NO: 44472 - protein, 122 aa, Staphylococcus aureus
MAKLSYLEAIRQAQDLALQQNKDVFILGEDVGGGVFGTTQGLQQKYGEDRVIDTPLAESNIVGTAIGAAMVGKRPIAEIQFADFILPATNQIISEAAKMRYRSNNDWQCPLTIRAPFGGVAH

SEQ ID NO: 44473 - protein, 105 aa, Staphylococcus aureus
MRGGGNMQQMMKQMQKMQKKMAQEQEKLKEERIVGTAGGGMVAVTVTGHKEVVDVEIKEEAVDPDDIEMLQDLVLAATNEAMNKADELTQERLGKHTQGLNIPGM

SEQ ID NO: 44474 - protein, 198 aa, Staphylococcus aureus
MHYPEPISKLIDSFMKLPGIGPKTAQRLAFHTLDMKEDDVVQFAKALVDVKRELTYCSVCGHITENDPCYICEDKQRDRSVICVVEDDKDVIAMEKMREYKGLYHVLHGSISPMDGIGPEDINIPSLIERLKSDEVSELILAMNPNLEGESTAMYISRLVKPIGIKVTRLAQGLSVGGDLEYADEVTLSKAITGRTEM

SEQ ID NO: 44475 - protein, 194 aa, Staphylococcus aureus
MNIEKAKRLAKEKLPEKRYNHSLRVAETAIKLAEIYDGDTSKVELAGVLHDFCKYDDLGKMYQIVRQYELGNDLLSYGSEILHGPVCAAIMEHEYGINDEEVLMAIKYHTTGRQQMTKTEKLIFIADYIEPGRTIPGVDDIRDMAYNQGSLDKTIYEISKRTVLFLIQKDITVYNKTIDCLNYYNYSDERIKDD

SEQ ID NO: 44476 - protein, 208 aa, Staphylococcus aureus
MKFKAIVAITLSFSLLTACGANQHKENNSKSNDTTKKTQETDNTTQSNTEKQMTPQEAEDIVRNDYKARGANENQTLNYKTNLERSNEHEYYVEHLVRDAVGTPLKRCAIVNRHNGTIINIFDDMSEKDKEEFEAFKKRSPKYNPGMSDHDKTDGESEDIQHHDNDNNKAIQNDTPDQKAVDKNDKNAVNKEEKHDNHAKNSAETKVK

SEQ ID NO: 44477 - protein, 349 aa, Staphylococcus aureus
MSDFQREQRKNEHVEIAMAQSDAMHSDFDKMRFVHHSIPSINVNDIDLTSQTPDLTMAYPIYINAMTGGSEWTKNINEKLAVVARETRLAMAVGSTHAALRNPRMAETFTIARKMNPEGMIFSNVGADVPVEKALEAVELLEAQALQIHVNSPQELVMPEGNREFVTWLDNIASIVSRVSVPVIIKEVGFGMSKELMHDLQQIGVKYVDVSGKGGTNFVDIENERRANKDMDYLSSWGQSTVESLLETTAYQSEISVFASGGLRTPLDAIKSLALGAKATGMSRPFLNQVENNGIAHTVAYVESFIEHMKSIMTMLDAKNIDDLTQKQIVFSPEIMSWIEQRSLNIHRG

SEQ ID NO: 44478 - protein, 615 aa, Staphylococcus aureus
MTNKREDVRNIAIIAHVDHGKTTLVDELLKQSGIFRENEHVDERAMDSNDIERERGITILAKNTAVDYKGTRINILDTPGHADFGGEVERIMKMVDGVVLVVDAYEGTMPQTRFVLKKALEQNLKPVVVVNKIDKPSARPEGVVDEVLDLFIELEANDEQLEFPVVYASAVNGTASLDPEKQDDNLQSLYETIIDYVPAPIDNSDEPLQFQVALLDYNDYVGRIGIGRVFRGKMRVGDNVSLIKLDGTVKNFRVTKIFGYFGLKRLEIEEAQAGDLIAVSGMEDINVGETVTPHDHQEALPVLRIDEPTLEMTFKVNNSPFAGREGDFVTARQIQERLNQQLETDVSLKVSNTDSPDTWVVAGRGELHLSILIENMRREGYELQVSKPQVIIKEIDGVMCEPFERVQCEVPQENAGAVIESLGARKGEMVDMTTTDNGLTRLIFNVPARGMIGYTTEFMSMTRGYGIINHTFEEFRPRIKAQIGGRRNGALISMDQGSASTYAILGLEDRGVNFMEPGTEVYEGMIVGEHNRENDLTVNITKTKHQTNVRSATKDQTQTMNRPRILTLEEALQFINDDELVEVTPESIRLRKKILNKNVREKEAKRIKQMMQENE

SEQ ID NO: 44479 - protein, 202 aa, Staphylococcus aureus
MMIIVMLLLSYLIGAFPSGFVIGKLFFKKDIRQFGSGNTGATNSFRVLGRPAGFLVTFLDIFKGFITVFFPLWLPVHADGPISTFFTNGLIVGLFAILGHVYPVYLKFQGGKAVATSAGVVLGVNPILLLILAIIFFIVLKIFKYVSLASIVAAICCVIGSLIIQDYILLVVSFLVSIILIIRHRSNIARIFRGEEPKIKWM

SEQ ID NO: 44480 - protein, 224 aa, Staphylococcus aureus
MIDKKLTSPKMTVPLFLIALIVFIGMFYGVVTNQEWLKNIDMGSLTWFTDYFGEPQRQYVNNLFNYYMTFSAEIGDVKGVVLISIIVTIILFIKQRHLAVWFVTYLVSGVIMNKLIKDTVLRPRPYNHLAVDTGFSFPSGHSNASTLLYFALMIIIISVAAKTITKVLSALVMGILWLSILFCRLYFHAHYFSDVIGGTSLAIIWVALFLMVYPYFINHRRQRV

SEQ ID NO: 44481 - protein, 254 aa, Staphylococcus aureus
MIDIHNHILPNIDDGPTNETEMMDLLKQATTQGVTEIIVTSHHLHPRYTTPIEKVKSCLNHIESLEEVQALNLKFYYGQEIRITDQILNDIDRKVITGINDSRYLLIEFPSNEVPHYTDQLFFELQSKGFVPIIAHPERNKAISQNLDILYDLINKGALSQVTTASLAGISGKKIRKLAIQMIENNLTHFIGSDAHNTEIRPFLMKDLFNDKKLRDYYEDMNGFISNAKLVVDDKKIPKRMPQQDYKQKRWFGL

SEQ ID NO: 44482 - protein, 173 aa, Staphylococcus aureus
MTETANLFVLGAAGGVEWGTVIVQVLTFIVLLALLKKFAWGPLKDVMDKRERDINRDIDDAEQAKLNAQKLEEENKQKLKETQEEVQKILEDAKVQARQQQEQIIHEANVRANGMIETAQSEINSQKERAIADINNQVSELSVLIASKVLRKEISEQDQKALVDKYLKEAGDK

SEQ ID NO: 44483 - protein, 579 aa, Staphylococcus aureus
  MISC_FEATURE (485)..(485): X=any amino acid
EYFTLNDKRLKKQQKENITVIIGNTPYSAGQSSVNNDNKKMEYEKLNAKIANTYANFSTANLKKSLYDSYIQAFRWATDRVGKKGIIGFVTNGSFIDSQSTDGFRKVLYDEFNYLYIINLRGDQRTQGEKSRKEGGKIFGSGSRAPIAISILVKDGSYNHDIYYNDIGEYLTREQKLDTLMKHQSIVNLKSLNVLPDKNNDWINQRDINYENYLPMYDSKDIENSIYLDQFNGVNSARDNWVTNFSNEKALVNAKLLVDNYNSEIDRLIDILDSRERINLVNKDETFISWTRGLTQKFSKGKNISINPERIVKFMHRPFTKKWIVYDKNIMEMPSRYYNIMENTGQVIYIQGQGMNKEFSAMITDILPNFQFIGNGKGFATYKGKDSLRLVDNISNSFKKKINLNSEEIVYYIYAILHHKYYVNKYSSDLSKGFPRIPILKDVYGFVEIGRELVELHLNYEKQLNWDGVEIIYNNMNPNYKVEKXKHPKKGVLDTVIYNTDITVTNIPNKVYNYIVNGKPAIEWIIDQYNVSIDKKSGILDDPNEFSEDPNYILNLLLSVITVSMKTLGLIDKLPDFEV

SEQ ID NO: 44484 - protein, 869 aa, Staphylococcus aureus
MLTIPEKENRGSKEQEVAIMIDALADKGKKALEALSKKSQEEIDHIVHQMSLAAVDQHMVLAKLAHEETGRGIYEDKAIKNLYASEYIWNSIKDNKTVGIIGEDKEKGLTYVAEPIGVICGVTPTTNPTSTTIFKAMIAIKTGNPIIFAFHPSAQESSKRAAEVVLEAAMKAGAPKDIIQWIEVPSIEATKQLMNHKGIALVLATGGSGMVKSAYSTGKPALGVGPGNVPSYIEKTAHIKRAVNDIIGSKTFDNGMICASEQVVVIDKEIYKDVTNEFKAHQAYFVKKDELQRLENAIMNEQKTGIKPDIVGKSAVEIAELAGIPVPENTKLIIAEISGVGSDYPLSREKLSPVLALVKAQSTKQAFQICEDTLHFGGLGHTAVIHTEDETLQKDFGLRMKACRVLVNTPSAVGGIGDMYNELIPSLTLGCGSYGRNSISHNVSATDLLNIKTIAKRRNNTQIFKVPAQIYFEENAIMSLTTMDKIEKVMIVCDPGMVEFGYTKTVENVLRQRTEQPQIKIFSEVEPNPSTNTVYKGLEMMVDFQPDTIIALGGGSAMDAAKAMWMFFEHPETSFFGAKQKFLDIGKRTYKIGMPENATFICIPTTSGTGSEVTPFAVITDSETNVKYPLADFALTPDVAIIDPQFVMSVPKSVTADTGMDVLTHAMESYVSVMASDYTRGLSLQAIKLTFEYLKSSVEKGDKVSREKMHNASTLAGMAFANAFLGIAHSIAHKIGGEYGIPHGRANAILLPHIIRYNAKDPQKHALFPKYEFFRADTDYADIAKFLGLKGNTTEALVESLAKAVYELGQSVGIEMNLKSQGVSEEELNESIDRMAELAFEDQCTTANPKEALISEIKDIIQTSYDYKQ

SEQ ID NO: 44485 - protein, 222 aa, Staphylococcus aureus
MKPVVVMTQTNDMQSDLVSIIHKPFIDIKPLNFDIHLLNQRYDWLIFSSKNAVKFFYKYLKGINVDNIAVIGSKTAQYCESLGIRVDFMPNDFSQEGFLKSFNQTNQKILLPSSELARPLLLAALSKDNEVVKIDLYTSVPNKQNIQDVKEMIEHQQIDALTFSSSSAVRYYFNEGFVPKFKSYFAIGEQTARTIKTYQQPVTIAEIQTLESLIEKILESRG

SEQ ID NO: 44486 - protein, 662 aa, Staphylococcus aureus
MNFPWDQLLVKGNWMITMAQIGAPFLVIGLIAVITYFKLWKYLYKEWFTSVDHKKIGIMYLICAVLMFVRGGIDALLIRAQLTVPDNKFLESNHYNEIFSTHGVIMIIFMAMPFIFGLWNIVVPLQIGARDVAFPVLNNVSFWLFFAGMILFNLSFIIGGSPAAGWTNYAPLAGEFSPGPGVNYYLIAIQISGLGTLATGINFFVTILRCKTPTMKFMQMPMFTVTTFITTLIVILAFPPLTVALALMTTDRIFDTAFFTVAHGGMPMLWANFFWVWGHPEVYIVILPAFGIYSEIIPTFARKRLFGHQSMVWATAGIAFLSFLVWVHHFFTMGNGALINSFFSISTMLIGIPTGVKLFNWLLTLYKGRITFESPMLFSLAFIPNFLLGGVTGVMLAMASADYQYHNTYFLVAHFHYTLVTGVVFACLAGLIFWYPKMMGYKLNETLNKWCFWFFMIGFNVCFLPQFILGLDGMPRRLYTYMPSDGWFLLNLISTIGALLMAIGFLFLVVSIVYSHFKSPREATGDNWDGLGRTLEWTTASAIPPKYNFAITPDWNDYDTFVDMKEHGRHYLDNHNYKDIHMPNNTPVGFWIGIFMTIGGFFLIFETVIPALICLFGIFGTMIYRSFQIDHGYHIPAAEVAETEARLREARIKEREAVSHES

SEQ ID NO: 44487 - protein, 228 aa, Staphylococcus aureus
MNNNFFNSDFDSILRRMMQDMQNSNQTSNKKYYINGKEVSPEELAQFTQQGGNHSAEQSAQAFQQAALRQQGQQSGNGNYLEQIGRNLTQEARDGLLDPVIGRDKEIQETAEVLSRRTKNNPILVGEAGVGKTAIVEGLAQAIVEGNVPAAIKDKEIISIDISSLEAGTQYRGAFEENIQKLVEGVKSSQNAVLFFDEIHQIIGSGATGSDSGSKGLSDILKPALSRG

SEQ ID NO: 44488 - protein, 309 aa, Staphylococcus aureus
MAKTYIFGHKNPDTDAISSAIIMAEFEQLRGNSGAKAYRLGDVSAETQFALDTFNVPAPELLTDDLDGQDVILVDHNEFQQSSDTIASATIKHVIDHHRIANFETAGPLCYRAEPVGCTATILYKMFRERGFEIKPEIAGLMLSAIISDSLLFKSPTCTQQDVKAAEELKDIAKVDIQKYGLDMLKAGASTTDKSVEFLLNMDAKSFTMGDYVTRIAQVNAVDLDEVLNRKEDLEKEMLAVSAQEKYDLFVLVVTDIINSDSKILVVGAEKDKVGEAFNVQLEDDMAFLSGVVSRKKQIVPQITEALTK

SEQ ID NO: 44489 - protein, 186 aa, Staphylococcus aureus
MKIGVLALQGAVREHIRHIELSGHEGIAVKKVEQLEEIEGLILPGGESTTLRRLMNLYGFKEALQNSTLPMFGTCAGLIVLAQDIVGEEGYLNKLNITVQRNSFGRQVDSFETELDIKGIATDIEGVFIRAPHIEKVGQGVDILCKVNEKIVAVQQGKYLGVSFHPELTDDYRVTDYFINHIVKKA

SEQ ID NO: 44490 - protein, 188 aa, Acinetobacter baumannii
VKYGVEILKLIEGRVSTEVDAALSSCTPHSAPFKHSTMNSCAALSKVHGHCISHVILHSKLHRTWAKVIPSGSKMLEAEGIACNTTLLFGLHQAQACADAKVTLISPFVGRILDWYKKAARCSILYPIAAKHPGVVIRLSKIYTIISHARRKYSNLKSMGASFRSIAQVLGLAGCDRLTILQACLTQL

SEQ ID NO: 44491 - protein, 68 aa, Acinetobacter baumannii
MLEILVGGGMDLFRALRMLVPPAWQNVETLDADLRAFYEFNSKHMEAWDGPAGLVIQDGRHAICMLDR

SEQ ID NO: 44492 - protein, 139 aa, Acinetobacter baumannii
MAKKPIYKSLYFQVIIAIIAGVLVGHFSPSTTQIVNGVEQHIPGLGEQLKPLGDAFIRLIKMIIAPVIFCTVVSGIAGMESMKSVGKTGGVALLYFEIVSTIALLIGLVVINIAKPGVGMNVDPATLDTSGIQKYVTSG

SEQ ID NO: 44493 - protein, 152 aa, Acinetobacter baumannii
ITLQIPTINAYGEPEVQRKTLQVKIPKGMKEGQQIRLSGQGQSGINGGANGDLYIEIQYKDTDRVHVEGSDVYLTVDVAPWEAALGQALEVKTPAGPLHVNLPKNAKQGQQLRLKDKGIPNKTPGHLYLILNIVFPPAHSEKEKEAYQQLAE

SEQ ID NO: 44494 - protein, 206 aa, Acinetobacter baumannii
  MISC_FEATURE (197)..(197): X=any amino acid
FGMAEDEAQVGRVNGLAWTSVGGELLTIEVAAVKGKGKFITTGSLGDVMKESITTAMTVVRTRADELGIEASRFEETDVHVHLPEGATPKDGLALTTALVSAFTGIAIRPDIAMTGETSLGGRAMRIGGLKEKLLAAHRGGIKLVFIPQDNVRDLAEIPDNVKEGLEIKAVKSIDEILPLALTSMPKPLTKTPIVKXVEGSKAARH

SEQ ID NO: 44495 - protein, 160 aa, Acinetobacter baumannii
MAPIDILFLFGFLGIWIPQAFWAWLSYQAWKYSKTAEKELQNLPIPERWPVLSVLIPAYNEGVVIEDTLHAIAQQDYPAKSYEVLLINDGSKDNTLEIAENLAKIYPCIKIVNVPKGMGGKGKSRTLNNGLPHAKGELIVVYDADSTPEPDCVRLLAQWR

SEQ ID NO: 44496 - protein, 180 aa, Acinetobacter baumannii
MCWKGSVIACESTFGVCAKCYGRDLARGHLVNPGESVGVMAAQSIGEPGTQLTMRTFHVGGAASRTSAANSVQVRNKGTVRFHNVKTVQHAKGHLVSVSRSGEIGIADELGRERERYKLPYGASILLKDGELVEAGGIVATWDPHTHPLVTEVAGKARFSQIADGVTATVAMISDLPVSL

SEQ ID NO: 44497 - protein, 123 aa, Acinetobacter baumannii
MATTNQVIRKGRTTLVEKSKVPALKARPQRRGVCTRVYTTTPKKPNSAMRKVSRVRLTSGFEVSSYIGGEGHNLQEHSVFLIRGGRVKDLPGVRYHTVRGSLDCAGVKDRNQSRSKYGAKRPK

SEQ ID NO: 44498 - protein, 156 aa, Acinetobacter baumannii
MPRRRVVAAREILPDPKFSSQTIAKFMNHVMQDGKKSIAESIVYGALERVQEKNKVDPVEFFETTLEKVRPMVEVKARRVGGATYQVPMEVRPSRRTALAMRWLVDAAAKRSEKTMALRLAGELLDAAEGKGAAIKKREDVHRMAEANKAFSHYRF

SEQ ID NO: 44499 - protein, 312 aa, Acinetobacter baumannii
LALYDSELGLRGQVLYSQIKLHAEYGGVVPELASRDHVRKLIPLMNQLLEQSGVKKQEIDAVAYTRGPGLMGALMTGALFGRTLAFSLNKPAIGVHHMEGHMLAPLLSSQPPEFPFVALLVSGGHTQLMAAHGIGQYELLGESIDDAAGEAFDKVAKMMNLPYPGGPNIAKLALSGDPLAFEFPRPMLHQGLDFSFSGLKTAVSVQLKKLNGENRDADIAASFQEAIVDTLVKKSVKALKQTGLKRLVIAGGVSANLRLREQLETSLAKIKAQVYYAEPALCTDNGAMIAFAGYQRLKAGQHDGLAVTTTPR

SEQ ID NO: 44500 - protein, 621 aa, Acinetobacter baumannii
  MISC_FEATURE (611)..(611): X=any amino acid
ITRYRNIGISAHIDAGKTTTTERILFYTGVSHKIGEVHDGAATMDWMEQEQERGITITSAATTCFWSGMGNQFPQHRINVIDTPGHVDFTIEVERSMRVLDGACMVYCAVGGVQPQSETVWRQANKYKVPRLAFVNKMDRTGANFFRVVEQMKTRLGANPVPIVVPIGAEDTFTGVVDLIEMKAIIWDEASQGMKFEYGEIPADLVDTAQEWRTNMVEAAAEASEELMDKYLEEGDLSKEDIIAGLRARTLASEIQVMLCGSAFKNKGVQRMLDAVIEFLPSPTEVKAIEGILDDKDETKASREASDEAPFSALAFKIMNDKFVGNLTFVRVYSGVLKQGDAVYNPVKSKRERIGRIVQMHANERQDIDEIRAGDIAACVGLKDVTTGDTLCDEKNIITLERMEFPDPVIQLAVEPKTKADQEKMSIALGRLAKEDPSFRVHTDEESGQTIIAGMGELHLDIIVDRMKREFGVEANIGKPMVAYRETIKKTVEQEGKFVRQTGGKGKFGHVYVRLEPLDVEAAGKEYEFAEEVVGGVVPKEFFGAVDKGIQERMKNGVLAGYPVVGVKAVLFDGSYHDVDSDELSFKMAGSYAFRDGFMKADPVLLEPIMXVEVETPEDYM

SEQ ID NO: 44501 - protein, 396 aa, Acinetobacter baumannii
MAKAKFERNKPHVNVGTIGHVDHGKTTLTAAIATICAKTYGGEAKDYSQIDSAPEEKARGITINTSHVEYDSPTRHYAHVDCPGHADYVKNMITGAAQMDGAILVCAATDGPMPQTREHILLSRQVGVPYIIVFLNKCDLVDDEELLELVEMEVRELLSTYDFPGDDTPVIRGSALAALNGEAGPYGEESVLALVAALDSYIPEPERAIDKAFLMPIEDVFSISGRGTVVTGRVEAGIIKVGEEVEIVGIKDTVKTTVTGVEMFRKLLDEGRAGENCGILLRGTKREEVQRGQVLAKPGTIKPHTKFDAEVYVLSKEEGGRHTPFLNGYRPQFYFRTTDVTGAIQLKEGVEMVMPGDNVEMSVELIHPIAMDPGLRFAIREGGRTVGAGVVAKVTA

SEQ ID NO: 44502 - protein, 181 aa, Acinetobacter baumannii
MKKFLGNSIFKAVGWTYDADPTILEKKQVIIGFEHTSNLDAILSIALFQILDLKIHTLIKKELFKGPMKPILEKLGGIPVDRKASKDIVSQMVEKFQSSDTFNLVIAPEATRAKDGSERKPIRTGFWHIAKAANVPIVLMYANARTKKGGILGKIYPTDLQKDLETIKELYAQYDIDVKIN

SEQ ID NO: 44503 - protein, 98 aa, Acinetobacter baumannii
SSKGKGFQGGVKRWNFRTQDATHGNSVSHRVLGSTGQNQTPGRVFKGKKMAGHLGDERVTVQGLEIVSVDTERSVLVVKGAIPGATGGDVIVRPTIKA

SEQ ID NO: 44504 - protein, 200 aa, Acinetobacter baumannii
MNLKTVSGSAVELSEVAFGREFNEALVHQVVTAYLAGGRQGTRAHKSRADVSGGGKKPFRQKGTGRARAGSIRSPIWVGGGKTFAARPQDWSQKVNRKMYRGAMQCILAELVRQDRLVLVEEFAVAAPKTKELLAKLNDLNAARALIVTDAVDENLYLAARNLPHVDVVDATAIDPVSLIAFDKVVMSVAAAKKIEVELG

SEQ ID NO: 44505 - protein, 106 aa, Acinetobacter baumannii
MNNERIYQVLKGPVFSEKAQVLGDTAGVQVFKVDINATKLEIKKAVEKLFGVEVVKVNTTITKGKTKRFGRTLGRRSDVKKAYVTLKAGQDVEMADLGDTAESAAE

SEQ ID NO: 44506 - protein, 274 aa, Acinetobacter baumannii
MPIQKCKPTSPGRRFVEKVVHDHLHKGAPYAPLVEAKKRTGGRNNNGHITTRHVGGGHKQHYRIVDFKRNKDGVPAVVERIEYDPNRTAHIALLKYADGERRYIIAPKGLRAGDKVQSGNDAPIRPGNCLPLRNMPIGSTLHNVELKIGKGAQLARSAGASVQLLGRDGSYAIIRLRSGEMRKVHVECRAVIGEVSNQENNLRSLGKAGAARWRGVRPTVRGMAMNPIDHPHGGGEGRNKGIQPVSPWGQKAKGYKTRTNKRTTKMIIRDRRVK

SEQ ID NO: 44507 - protein, 91 aa, Acinetobacter baumannii
MPRSLKKGPFVDAHLFAKVEAAVASNSRKPIKTWSRRSMILPDFVGLTISVHNGRNHVPVIVTEHMVGHKLGEFAPTRTYRGHGVDKKSKR

SEQ ID NO: 44508 - protein, 110 aa, Acinetobacter baumannii
MMEVTAKLRGAAISAQKARLVADLIRGKSVAHALNILNFSNKKAAVLVKKALESAIANAEHNNSLDVDDLKVSTIYVDEGMSLKRIMPRAKGRADRITKRTCHITVKVGV

SEQ ID NO: 44509 - protein, 231 aa, Acinetobacter baumannii
MGQKVHPIGIRLGVVKRHNANWYANPKQYAEYLLKDLQVREFLTKKLKNAMVSNILIERPSGAAKVTISTARPGIVIGKKGEDIEKLQRELTHIMGVPAQVSINEIDRPDLDARLVAEAIASQLEKRVMFRRAMKRAVQNTMRAGAKGIKVEVSGRLGGAEIARTEWYREGRVPLHTLRADIDYATMRAETTYGTIGVKVWIFRGEILGGMKQVMNPAPAEERPAKRGRGR

SEQ ID NO: 44510 - protein, 119 aa, Acinetobacter baumannii
MLQPKRTKFRKVHKGRNTGLAHRGSTVSFGSIAIKATERGRMTARQIEAARRTISRRIKRGGKIFIRVFPDKPITEKPLEVRMGNGKGNVEYWVCEIKPGKILYEIEGVNEDLAREASF

SEQ ID NO: 44511 - protein, 228 aa, Acinetobacter baumannii
MTVQIITIDGPSGSGKGTLAAKLAAYYQFHLLDSGALYRLLGLSLHKHDLLEKLDSHLDECVNYARQLNIKFETSAEGTLVFLDGEDVTQTIRTERVGEYASKVAAIPELRQALFERQRAFAQTPGLVADGRDMATSIFPEANAKIYLTASAESRAERRVKQLQGMGLDAKINDILANIQARDKRDMEREVAPLKPAADAYIIDSSELTIDQVFKLMVDYVNSRTVSN

SEQ ID NO: 44512 - protein, 198 aa, Acinetobacter baumannii
MLIRKLFKFENAHVVRNCTSDRCKRSIHGHSYKVELLLKASKLDHGQMVYDFGLLKGVIKDLFDSFDHAICFWEKDDPQYIDACKTFSARWISLPVSPSAEQFSRIFFYLAQQVLQSTVTQNGEGDVEVYSVIVHETDTGYAQSFLEDIQNEQMGLLNLEGIIFSEQVQSEWADPDMYENLKQGIKFHNPHVNLQVEV

SEQ ID NO: 44513 - protein, 467 aa, Acinetobacter baumannii
LYNSEQRKKVEFVPRKEGHIDMYVCGMTVYDYCHIGHARVMVAFDYIIRFLRSQGWKVRYIRNITDIDDKIIKRANENGETIQQLTTRFIDAMNEDAANLGCLAPDEAPKATEYIDQMQNMIGNLVNKGAAYPASNGDVYFEVTKFEKYGRLSGRKLEDMQAGASERVDVEVEKKHPFDFVLWKHAKENEPSWASPWGNGRPGWHIECSAMSTCCLGNHFDIHGGGSDLMFPHHENEIAQSEASTGEQYVNYWMHVGFINVDGEKMSKSLGNFFTIRDVMEKFHPEVIRYFIVSSHYRSPVNFSDVALKEAKTSLTRFYHSFKAYQQVYGQTTTEALDQSFIERFNNAMCDDFNTAEAMAVLFELNKELNRAVKEEQADQATVLYSTLRHLTNILGLVQHNVDDFLKSDMDKMHLLVDAEIEDFIQQRVMRKKAKDLLKADSIRQSLLEQGVVLEDTRQGTVGVVAD

SEQ ID NO: 44514 - protein, 79 aa, Acinetobacter baumannii
  MISC_FEATURE (77)..(77): X=any amino acid
VSLYITDECINCDVCEPVCPNEAIFMGEVIYEINPDLCTECVGHHDQPQCQLFCPVDCIPKDPQHEETEEQLLDILXKI

SEQ ID NO: 44515 - protein, 158 aa, Acinetobacter baumannii
MAKATVVKKHNGGTIAQNKRARHDYFIEEKFEAGMSLLGWEVKSLRAGRMSLTESYVIFKNGEAFLFGAQIQPLLSASTHIVPEATRTRKLLLSRRELEKLMGAVNQKGYSCVPLACYWKGHLVKLEIALVKGKQLHDKRATEKERDWQRDKARIFHK

SEQ ID NO: 44516 - protein, 38 aa, Acinetobacter baumannii
MKVQASVKKICGSCKVIRRNGVIRVICSAEPRHKQRQG

SEQ ID NO: 44517 - protein, 452 aa, Acinetobacter baumannii
MSMSPSSSGHVNMMKGQPFHVKYREIIRRMSFLIGALLVFRLGAHIPVPGINNAALENLFHANQGTILGLFNMFSGGALERMSILALGIMPYISASIIVQLMSTVIPSLEALKKEGEQGKRKINQYTRQGTLLLAVVQAVGMCAGLIGQGITLSSGLAFYIPAVTSLVAGTMFLMWLGEQITERGIGNGISMIIFAGIVAGLPKLIMQSVSSVDNGQTSLIGLVIFGLLSLGVLAAIVFIEKAQRRIPVNYAQKQQGRRIFTAQQTHLPLKINMAGVIPAIFASSLLLFPASLGQWVGSADPNAGLIKRSLQDLALVLSPGQPLYLVLFGALIIFFCYFYTALVFSPKEVSENLKRSGAYVPGIRPGEQTARYLDHILNRLTFIGAIYITVICLMPMILQSSFGIPFYLGGTSLLIVVVVVMDFMAQLQAHLTSHQYDNQTLMRKTTAHPKG

SEQ ID NO: 44518 - protein, 146 aa, Acinetobacter baumannii
MTLRLNELAPAEGAKREHRRLGRGIGSGVGKTGGRGIKGQKSRKSGGVRPGFEGGQTAIYRRLPKFGFTSQIALKTAEVRLSELSKVEGDIVSLETLKAANVVRRDQIRARIVLSGEITRAFTVQGVALTKGAKAAIEAAGGKVEE

SEQ ID NO: 44519 - protein, 153 aa, Acinetobacter baumannii
MEIPRITKITLNMGVGAAATDKKLLDGAVADMQLIAGQKPVVTLARKSIAGFKIRDGWPIGCKVTLRGDQMYEFLDRLISIAIPRIRDFRGFSAKSFDGRGNYSMGLKEQIVFPEIDFDKIDRIRGMDITITTTARTDDEGRALMRAFGFPFK

SEQ ID NO: 44520 - protein, 58 aa, Acinetobacter baumannii
MKTIKVTQTKSSSHRLKNHKLCLQGLGLRRIGHTVEVQDTPSNRGMINKVYYMVSVEE

SEQ ID NO: 44521 - protein, 165 aa, Acinetobacter baumannii
MAKVEQNEGLVEKLVAVDRVAKVVKGGRIFSFTALTVVGDGNGRVGFGRGKAREVPAAISKALEAARRNMITVDLAGTTLQHPVNARHGASRVYMQPASEGTGVIAGGAMRAVLEAAGVHNVLAKCYGSTNAANVVNATFKGLRDMTSPEKVAAKRGKSVEEIQG

SEQ ID NO: 44522 - protein, 116 aa, Acinetobacter baumannii
MNEKKQSRLRRAKSTRLHIRALGATRLCVNRTPRHIYAQVISADGGKVLAQASTLDASLRSGTTGNIEAATKVGALIAERAKAAGVTKVAFDRSGFKYHGRIKALADAAREGGLEF

SEQ ID NO: 44523 - protein, 177 aa, Acinetobacter baumannii
MSRVAKAPVTVPNGVTVTQNGRQVEVKGSKGTLSFNLHALVELKQEEGKLQLAPAKESKDAWMQAGTARAVLNNLVKGVSEGFERKLQLVGVGYKAAVKGTVVNLNLGYSHPIDYALPEGVTAETPTATEIILKSANKQLLGQVAAEIRAYRSPEPYKGKGVRYSDEVILRKEAKKK

SEQ ID NO: 44524 - protein, 131 aa, Acinetobacter baumannii
MSMQDTVADMLTRVRNAQMAKKQTVSMPSSKLKVAIANVLQQEGYISNVEVAQEETKSTLTITLKYFEGKPVIEMVKRVSRPGLRQYRGKDKLPSVKQGLGIAIVSTSKGIMTDRAARAAGIGGEVIAFVS

SEQ ID NO: 44525 - protein, 101 aa, Acinetobacter baumannii
MAKKGMINRELKREKTVAKYAAKRAELKATIANVNASDEERFEAMLKLQALPRNASPVRLRNRCGLTGRPHGYFRKFGLSRNKLRDTVMQGDVPGVVKASW

SEQ ID NO: 44526 - protein, 379 aa, Acinetobacter baumannii
MLAQGFQPVGKDFPVFLHPETKEEYALARTERKSGQGYHGFQFFTDTTVSLEDDLIRRDLTINAIAMDQDGKIYDPYGGQNDLENKILRHVSEAFAEDPLRVLRVARFAARYFPYGFQIAPETLQLMQTMADSGELDALTPERVWKETSRALMENHADIYFQTLRDCGALKHLFPEIDALFGVPQRPEYHPEVDCGIHTLMSLQQACKSNYSLDVRFAVLVHDLGKALTPAEELPRHIMHEERGIKPVTQLCERLRVPTQTKQLALSVCKEHLKCHQIMSLKPGTLWRLLQRLDVLRRPERVEAFVQACECDAKGRLGLEDRPYPQAQYMREAMQIVRSIKVQDLPENIKGAEIGEMLIQYRIEALAEFKNQHQSLSHS

SEQ ID NO: 44527 - protein, 257 aa, Acinetobacter baumannii
  MISC_FEATURE (7)..(7): X=any amino acid
LDAAHGXSAMLPAAAMGADQIGIALQTPLVLSKNRAFISLSQKLIYQLAIQESDNAQTTAQKVIQYIEQDHTLSLAHVFKHSIHHYCLREWLALADSRIAQTLKLKALPPPYMVEALDNHVIDGFCVGEPWNTQGELLGLSKIVCSSQDIIPNVADKVLAVTQEWAEQHPQTLVALTTAIMKAQKELSNLKDFAPILKLLVEFGIVRFHCSEEVHVDKYYMIQNIVKYLVKENAAPQPEDFHWLFQQMQKWGKTSIS

SEQ ID NO: 44528 - protein, 139 aa, Acinetobacter baumannii
MDIRKIKKLIDLMIESDLQAIEVKEGDQSIALTRRNPVVAAAGVALPAAPVAEAPVAKTPRGAVETSPMVGVFYAAPSPGEAPFVKVGQTVSAGETLGIIEAMKIMNPIEATQSGVIEEILVKNGEVIQFGQPLFRYRA

SEQ ID NO: 44529 - protein, 456 aa, Acinetobacter baumannii
MLQKVLIANRGEIALRITRACKTLGIKTVGIYSDADKDLMHLRFVDEAVCIGPGASSDSYLNIPAIITAAEITGADAIHPGYGFLSENAEFAEIVESSGFTFIGPRPEHIRLMGNKVSAIVAMKKAGVPTVPGCDHAVTIHNALAEAKEIGFPLIVKAAAGGGGRGMRIVERVDTLLESVQAAQRDAEMWFGDDTVYMERFLQKPRHVEVQVLGDGNGHAIHLYDRDCSLQRRHQKVLEEAPAPNLPEQARADILQACVHACQLMQYRGAGTFEFLFEDGEFFFIEMNTRVQVEHPVTEMVTGVDIIEQQLRIAAGLGLELQQEDIEVRGHAIECRINAEDPTTFLPSPGKIESFYAPGGAGIRLDSHIYPGYSIPPYYDSMIAKLIAHGKDRETSLARMRQALDEMILTGIKTNIPLHKDLILQDKNFCSQAMDIHYLEKHLLKQVEEEKKAETA

SEQ ID NO: 44530 - protein, 213 aa, Acinetobacter baumannii
MKTRPSKIVCVGRSYADHVKELNNAMPGRPVLFIKPPSSLIGLDEGISWNPAWGSCHFECEFVLRIDQPLKGETDPQKVLQAIGAVTLGLDLTLRDLQNELKDKGQPWERAKAFDGSCVLADWVDVSEITDWEETRFTFHINDELRQDGNTALLMFNIAYLLVDINQVFSLEPGDVIMTGTPAGVGPLNAGDQLKMTLKGATQDLFWETFVKA

SEQ ID NO: 44531 - protein, 119 aa, Acinetobacter baumannii
MMPRIAGVNIPDNKHAVISLTYIFGIGRHTAKNILAAVGITETTKIRELDDAQLDAIRAEVAKVPTEGDLRREISMNIKRLMDLGCYRGLRHRRSLPVRGQRTKTNARTRKGPRKPIKK

SEQ ID NO: 44532 - protein, 128 aa, Acinetobacter baumannii
MAKDTRTRKKVTRTVSEGVAHIHASFNNTIVTITDRQGNALAWATSGGQGFRGSRKSTPFAAQVAAEVAGKAALDYGLKNLDVLVKGPGPGRESAVRALGAVGYKINSITDVTPIPHNGCRPPKKRRV

SEQ ID NO: 44533 - protein, 208 aa, Acinetobacter baumannii
MARYIGPKCKLSRREGTDLQLKSGVKPFDVKTKKANKAPGQHGQARGGKQSEYSLQLREKQKVRRIYGVLERQFSNYYKEAARVKGATGENLLKLLESRLDNVVYRMGFGSTRAEARQLVSHRSITLNGRRVNIASIQVKAGDVIAVHEGAKQQLRIKNAIELAAQRGIPAWIEVDHSKLEGTFKAAPDRSDLPAEINESLIVELYSK

SEQ ID NO: 44534 - protein, 335 aa, Acinetobacter baumannii
MTRTANEFLTPQAIKVEAVSGTSAKVILEPLERGFGHTLGNALRRILLSSLPGAAVVEVEIEGVEHEYSTLEGLQQDIVELLLNLKGLSIKLFDQNEAYLTLEKQGPGDITAADLRLPHNVEVVNPEHLIGTLSATGSLKMRLKVSQGRGYETSDSRFPEGETRPVGRLQLDASYSPIKRVSYTVENARVEQRTDLDKLVIDLETNGTVDPEEAIRKAATILQQQIAIFVDLQKDQTPVAQEPREEVDPILLRPVDDLELTVRSANCLKAENIYYIGDLVQRTEVELLKTPNLGKKSLTEIKDVLASKGLQLGMRLENWPPASLRMDDRFAYRSR

SEQ ID NO: 44535 - protein, 125 aa, Acinetobacter baumannii
MRHRNSGVKLGRTSSHRKAMFQNLANSLFEHELIKTTLPKAKELRRVAEPLITLAKNDTVANRRLAFARTRNAATVGKLFTVLGPRYKERNGGYLRVLKAGFRAGDAAPMAYVELVDREVNTSAE

SEQ ID NO: 44536 - protein, 255 aa, Acinetobacter baumannii
MTIQNEQEFLASYDRRDYDAPLLTVDMAIFSVLNGQLQVLLIKRPNFPAKNQWALPGGFADLTHDQDLMATAYRKLVEKTGIASPYLEQVASVGNSKRDPRGWAVTILYFALIDFNAYQHQALAEYSEWVPVAKAQDLALAFDHNELLNLALERLTNKTRYTALPASLMPELFTLTELQNIYEIILGQSLDKKAFRRRMIEAGAVEETNHSKIVGKRPAQLYRYALDSFDFIFPRSLELPRNKEGEGKQNNELSD

SEQ ID NO: 44537 - protein, 621 aa, Acinetobacter baumannii
MAIPQHTIDQILDRTDIVDLIGQRVKLKKTGRTYSGCCPFHQEKTPSFHVYRDKQYYHCFGCQANGNAIRFLMDIDNRNFIDVMKELSSNTGVELPKDNTDNKKLSYTRQVTKPSTPPKTVAEPTTQAPIEDQYNTFEPVYFDDPFAQFEQPFSFDEPVQEGNLYDLLENVAQFYEHQLPTSQKAKNYFKQRGLSDQTIQFWRLGYAPEDWQHLEKAFPYDIEGLKQLGLIRSSDSGRDFDLLRDRVIFPIRDPKGRVVGFGGRALNDEIKPKYINSPDSEVFHKNQLLYGLYEGRKLKANDWLMVEGYMDVIALQQYGITGAVATLGTASNTEHLNILFKQNNRITIAFDGDAAGQKAARRTLEIALPLLNDGRELKFFVLPNDHDPDSLIRREGVENFQKLLQQAPLLSDFVFAHLTGQHDISTPEGKSLVMGELRELTELLPKQGSFRYLLTQSFREKLGLGKRFTPQISHDASLSFNIQTKDEDFAIAILMHHPFLYIHFEGLRAYIPQDELLAKILAILNRIFDELPDDQELATYYVLGACSSYCHEIADIMQRTNIQALTQAPEVADKLAKEYALGLQERYLRQKLKSKISLVESRNLRQQLNELTKQISLRLLS

SEQ ID NO: 44538 - protein, 427 aa, Acinetobacter baumannii
MSFFALGVNHQTASVELREQIAFNAERLSNLLAEQRHHESLKDLVVVSTCNRTEVYAMAEDAESLLKWLADANNIDVKQLIHHVYRYENAQAITHLMRVASGLDSLMLGEPQILGQVKSALALSKEAQTVSPELNSVFEYAFYAAKRVRSETAVGSHAVSMGYAVAQLALQVFSKPEKLTVMVVAAGEMNSLVAKHLAEMGVAKMIICNRSRERADQLAQEIAHQVEVEIIDFSDLAENLYRADVVSSCTGSLHQVIAYADVKTALKKRRYQQMLMVDLAVPRDIDPKVESLDGVYLYGVDDLQSVIDENLAQRRQAAVEAEVMVNQLATQLITHQKVKEAGSTIHAYRQHSEEISQRELTQALEALHHGGNPEQVLQQFAHRLTQKLIHPTSMLLREAAKAESPDYFEWLQQHLQDVFDHERKPKR

SEQ ID NO: 44539 - protein, 571 aa, Acinetobacter baumannii
MSEVVTIAADAVNAVLSQPSTKVKLIVQKALSYQVDGAETMAVFKQHKWDGRSSFFVYKNCSFPAGFLHFVAANLRREGYKVNIVRKPFPAPLGPERPQVDAFGYDSKYDYQPEVMDRLVKHGQIIAQIATGGGKSRIARLCFARIARPTLFLTTRSILMYQMKDAFEKDMGIPCSVFGDGQFGNVNAQGQTTIKMMSVGTVQTFMSKLEVTTIQEEFNVLFNAVQEKFKKEIVALKGKLAKAKKSTAEITAATNDLISKQQAWLKANNQDMANKAKAKFDEKNIERQKTIKLLSMFEFVILEEAHEASGNSYYEILRYCKNAHYRLALTGTPFMRESEESNMRLMACSGPIAIKVTEEMLIQRGVLAKPYFKYIELRKKPDHLLRTTGWQSAYRLGVTENEERNLAIVSEIIRAKAYGLTSMILVQHTSHGEHLNELLTQYGLRAEFIKGENNQAERKLALNKLASGSVDALIGTTILDVGVDVPAVGMIILAGGGKAEIALRQRIGRGLRAKKIGPNVAFIVDFTDHWNTHTKKHATQRREIVLHTKGFGENIVNDFNFEQLGFTRLSA

SEQ ID NO: 44540 - protein, 49 aa, Acinetobacter baumannii
MDDLGADSLDLVELVMSFENDFDITIPDEDSNEITTVQSAIDYVTKKLG

SEQ ID NO: 44541 - protein, 157 aa, Acinetobacter baumannii
MGLFDFVKGIGKKNTAPAEPQAAPATPAEPSAQEIANKLLGLIKSLGLGVEGLSVTYNGSTDTAIIKGQVQSQADKEKIILIVGNVDHVAQVDDQMTVATPEPESKFYTVKSGDNLSKIAKEFYGDANQYQKIFEANKPMLKDPDEIFPGQVLRIPQ

SEQ ID NO: 44542 - protein, 98 aa, Acinetobacter baumannii
MANFVLNAQARAEDKQGKGASRRLRRESLVPAIIYGGNAEPVAVTLELRELVKALESNAFFEEVVEIKVGDKVENVKIQALQRHPAKNTPMHADFKRA

SEQ ID NO: 44543 - protein, 311 aa, Acinetobacter baumannii
RILSGNAHPQFAQKVVSHLHIPLGAASVASSYSDGEISVEITENVRGKDVFIVQPTCAPTNDNLMEILVMADACRRASAGRITAVIPYLVYARQDRRPRSARVPITAKVVADMLTTVVLTRVVMIDLHADQIQGFFDIPVDNIYGTPALLADLRQQQHDNLMVVSPDVGGVVRARAVAKQMGDIDLAIIDKRRQKANESQVMHLIGDVKDRDCVIVDDMVDTAGTLCKAADALKQFGARRVVAYATHPVLSGKAIENLRNSVIDELVVTDTIPLSEEALNLGKIRQVSVASMVAETIRRINNEESISAMFD

SEQ ID NO: 44544 - protein, 291 aa, Acinetobacter baumannii
MIKKAVLPVAGLGTRFLPASKSIPKEMVTVVDRPAIEYVVREAVEAGIEQIILVTHSSKASIENYFDRNFELETTLEQKKKFDLLAEITQIVPEHVSVISVRQPQPLGLGHAVLCAKSVVGEDDFAVLLPDVLVKDGSGQNDLSRMISRYNSSQAAQIMVEAVPDHLVDQYGIVDVKHSPNVGESIAMQGIVEKPAVGAAPSNLSVVGRYVLPAKIMQLLENTPKGAGNEIQLTDAIAMLQDTDTVEAYRMQGQTFDCGSKLGYLKAVLHYGLEHPKLGMEFKQLIQELKL

SEQ ID NO: 44545 - protein, 206 aa, Acinetobacter baumannii
MMKRIVDIVISLTALIILSPIFIWVAYKVRKNLGSPVFFYQERPGKDGKLFKMIKFRSMKDAFDAQGNPLPDEERITPFGHKLRSTTLDEMPQLINVLKGDMSIVGPRPQLADFLEHYTSRQMRRHEVRPGMTGLAQVSGRNNLSWEEKFELDIEYVETHNLSLDFKIMMKTVLVMLKKEGINAPDQLVGASRFSGSARDEDKASL

SEQ ID NO: 44546 - protein, 336 aa, Acinetobacter baumannii
MNVIISFIILFLISFVLTFSVRKYALRKNIIDLPNFRSSHVKPTPRGGGVAIVISILVALLYSYISQFISLNDFFIIGGSCLLIALLGFCDDHAHINSMLRLSIHFITATFIVFSLNGFAQVSVFNNLNLGFFTNILAILFLVWMLNLYNFMDGINGIASIEAISVGLSLALLYSWYDINNFILLAITSIVCGFLVWNFPKAKIFMGDVGSSFLGFLFAVLALYALKIDFKLFLAWIICLGVFIVDATFTIIRRILRGEKIYQAHRSHAYQYAARYFDSHTPVTLAVLIINLIWLLPCAFFVLNKAISPLVGLIIAYFPLIILAIYFNAGQLEHKT

SEQ ID NO: 44547 - protein, 395 aa, Acinetobacter baumannii
MKKKVYLITEYYHPYQNTTGYLLGKLYDTLNVQSDIDLVLIAKEDMNCPQHANAHFIKAKKPNKASLFKRFLYELIIAFSFLMKTLKVVKKDSIVFTGTTPILLLFVLFIIKKFLNFKWILLVHDVFPENLAAAKILKKDHFLFKILKSLFDRIYASADEVIVIGKDMKELVHQKTHQSNNITVVQNWIDSSDIGTEPKTNNRILQELNWLDSETTIFQFFGNIGRVQGVENILHAIQKMKYAHLAKFIFIGDGAYVARLKEQIQSLGSQNILYYGSLDQKEKTTGLNACDVALITLADGMLGLGVPSKSYFSMAADKPLLAIMDSESEVADMINTHHIGWVVPPNNEEALAKQLDEIVLAKHCYAFNSSREVLNEFYSEKVAMSKILNIIRKFT

SEQ ID NO: 44548 - protein, 376 aa, Acinetobacter baumannii
MKKLKLMTVVGTRPEIIRLSRVMAACDEYFDHILVHTGQNYDYELNEIFFTDLGIRKPDHFLNAAGATGAETIGNVIIAVDKILEEVQPEALLVLGDTNSCMAVLPAKRRKIPTFHMEAGNRCFDMRVPEEINRRIVDHTADINLTYSTIARDYLLAEGLPADLVIKTGSPMFEVLHHYKAKIEASDVLERLNLKEHEYFIVSAHREENINSDQNFLDLVEMLNAVADKYKYPVIVSTHPRTRKRIEELNVEFHPLIQLLKPLGFSDYNKLQLSAKAALSDSGTINEESSILNFPALNLRQAHERPEGMEEAAVMMVGLKAERILQGLAILEGQTRGENRLLRLVEDYSMPNVSEKVVRIIMSYTDYVNRVIWKKY

SEQ ID NO: 44549 - protein, 343 aa, Acinetobacter baumannii
MFKDKVLLITGGTGSFGNAVLKRFLETDIKEIRIFSRDEKKQDDMRKQYHSAKLKFYIGDVRDYNSILNATRGVDYIYHAAALKQVPSCEFHPMEAVKTNVLGTENVLEAAIQNHVKRVVCLSTDKAVYPINAMGISKAMMEKVMVAKSRNLEGLDTVICGTRYGNVMASRGSVIPLFVDQIRQGKPLTITDPNMTRFMMTLEDAVDLVLYAFEHGENGDIFVQKAPAATIAVLAEALKQLLNVEDHPISIMGTRHGEKAFEALLSREEMVHAFDQGDYFRVPADQRDLNYEKYVEDGDLKITEFEDYNSHNTTRLDVEGMKQLLLKLDFVRALTRGEYISPE

SEQ ID NO: 44550 - protein, 304 aa, Acinetobacter baumannii
MGKSLNNVPQAPLDVQFDSNDVKCSAYLYRPTTEVATPMIVMAHGLGGTRRMRLTAFAERFVAEGYACLVFDYRYFGDSEGQPRQLLDIKSQLEDWKAAIAYARSLDKIDPNRVVIWGTSFGGGHVLATAANDNRLAAVISQCPFTDGFSSSMAMNPITTLKLMGLALKDKIGSILGAKPVMVPLAAPSGHTALMNAPDAYSGYLALMPSGSNIPNYVAARFVLDIIRYYPGRKTSRIQAPVLFCVCDTDSVAPSKTTLRHASHTPNHEIKHYADGHFEIYVGEAFERVVRDQIDFLKRIVPVK

SEQ ID NO: 44551 - protein, 391 aa, Acinetobacter baumannii
MKSVLCHQATLQVVDQPNLTPAKGQVLLEVVRCGICGSDLHMQHHCDHMHDLAARVGFNGLAKSTDPFVLGHEFCGKVLDYGPKTRHKFKADTLVCAMPLLNVDQHGYLSTGLSPNASGGYAEQVLAQSSLMFEVPNGLDADSAAMTEPMAVALHAVRRSRVKTSEPAIVIGCGPVGLGVILMLKAAGVKTVVASDFSPNRRKLAEQCGADIVVDPKETSPFANWKEFGLLGNVSDAINMGMGLFDKLQATRLPWWHGWRMIDKLGALPKRPVIFECVGVPGVLQQIIEGAPLFSRIVGVGVCMQSDKIEPALAINKELEIQFVLGYTPLEFRDALHMIAEGKVNCSPLITGVVGLEGVTNAFEALRDPEQHAKILIDPKRSGSDIQLMSH

SEQ ID NO: 44552 - protein, 440 aa, Acinetobacter baumannii
MNNDVQVISKELRNTFPSNLGTYERIGPHTWKWALLFAYFAMVVDGIDIMLLSYSLTSLKAEFGLTTFQAGALGSASLAGMGIGGILGGWACDKFGRVRTIANSVTFFSVATCLLGFTQSFEQFMALRFIGALGIGALYMACNTLMAEYVPTTYRTTVLGTLQTGQTVGYIAATLLAGAIIPDYGWRVLFFLTVVPAFVNIFLQRFVPEPKSWQLTKIESLQGNRQPKERVVAEKPKSSSIYKQIFNNFKHRKMFLLWMTTAFFLQFGYYGINNWMPSYLETEVHMNFKNLTSYMVGSYTAMILGKILAGYLADKFNRRAVFVFGTIASAVFLPIIIFFNTPDNILYLLITFGFLYGIPYGVNATYMAESFSTDVRGTAIGGAYNIGRVGAAIAPAIIGFLASGGTFTMAFIVMGAAYFVAGVLPGLFIKDRQYDPQRQS

SEQ ID NO: 44553 - protein, 85 aa, Acinetobacter baumannii
MSEEMTLEERKVIYRARRGLKEIDVYFDPYVKNYYLKADPAEKALFAELVEQEDPDLLDWFMEVSEPPRTELRDFIYKLKHYVHG

SEQ ID NO: 44554 - protein, 39 aa, Acinetobacter baumannii
MLILTRRVGETLMIGDQVSVTVLGVKGNQVRIGVNAPKE

SEQ ID NO: 44555 - protein, 561 aa, Acinetobacter baumannii
MKLKRVSQLTLGLFFASQLFYTAQAASPKNQQPPNIMIILADDLGFSDISAYGSEIKTPHIDSLLKQGKMLFNFHASSMCSPTRAQLMTGADNHLVGLGAMYETSKRQEKLVGADSPRALLKIDGYSGHLTQNAYTLAEILKTKDYYTFMVGKWHLGYAPDQNPKARGFDQSFALLDGFDLHFKDQPKNYPRNTQYTENGQKVTLPDNYYSTDFFTQKAFEYLDKNKAQKPFFAYLAYTAPHWPLQAPAHYRDLYKGKYDQGYDAIRKQRFLRQKQLGLIPANAEYPVERGNQALGTKSWNELTPQERKYEARKMEVYAGMVTQLDDRVGDVIQYLKKHHLYDNTLIVFMSDNGAEGGDHNFPMGDADNRYENIGNASSYVYMGPRWAEVSSTPFTHWKSAASEGGVRVPFIVKSPVQISKQRGINNNFATVRDIFPTVMELAGIQNNQIYPASSTKIKPSGFSLIPAFKDNTARIRPVNYYDFKELHGSRYAKTDEWKLIENSPSKFKSHGWELYNLKTDFNEQHNVYAEHPEIVKVLNDKYLRYADENGVVDFEQYNKK

SEQ ID NO: 44556 - protein, 370 aa, Acinetobacter baumannii
MHSNSSSGSRLGLSSLFSSLPLKVLALSTMFFPFHSINAGKTLQYNTVVNTNTLTVVAVESPTTVFKEDQFLHGFGYDLARNYAQSLNVKLDFKIVTDNATALKWVQQGKANLAMTTASLSSIENKGLMSFSASCGDIVNLQKNGLNPNLSWVFKQADDPLTQTASGFVCQSKQNGLTQQLASFYNRNVVKPEAWSTIQRDLSARIPIYKASFKQSAAQYDLDWHLLAAIGYQESYLKPESVSPTGVRGLMMLTNSTARAMGVSNRNDPAQSIQGGAKYYDLMLSEYDDIPFPDRNWYALVAYNMGPGAVNQIQKRLQAQGKDPNQWVNLYNYLQSNKTRNGRYKQAVQYVTRIRAYLEHIKTAQTRINI

SEQ ID NO: 44557 - protein, 484 aa, Acinetobacter baumannii
MLTNLREQWFSNVRADILSGLVVGLALIPEAIAFSIIAGVDPQIGLYASFCIAVIISFVGGRPAMISAATGAMALVMTTLVKEHGLQYLFAATILTGVIQIIVGYLKLAKLMRFVSKSVVIGFVNALAILIFMAQLPELVNVSWYVYLLVAIGLAIIYLFPYVPKLGKIFPSPLICIVIITLLAFFLGLDVRTVGDMGALPNTLPIFLIPDIPLNLDTLLIILPYSLALAAVGLLESMMTATIVDEMTDSPSNKFKECKGQGIANIASGFMGGMAGCAMIGQSMINVKSGGRTRLSTLCAGIFLLILVVFLSDWLKVIPMAALVAVMIMVSISTFEWRSLTQFKTNPKSSNTVMIATVVVVVATHNLALGVLTGVLLSALFLANKLENDIQVISSLEGNARLYDLRGQIFFSSSDRFMQSFNFKEEVKEVIIDLTHSHIWDVTSVAMLDSAVEKFQKNGIQVTVRGLNEASSIMIDKYGTHAKI

SEQ ID NO: 44558 - protein, 1565 aa, Acinetobacter baumannii
MAKENTQQKEIKKQPAVELAVFNLNSVTDVADLQMVASQVQRYLQVCGNTSLEQIKSKANITTVANIFALTGSVLDLMLYATDKKTGDAAVQRGALLAANLIGLFSEPNNEAHARMALRPMFGLMAECLYRENGKIKETDIKRLGLHLNAMIAGDLENFLKETQAKLSSLLTSATTLGVTILQSMATPATGINAGITTAAGASAEKRDPKLKFTNWAVPLIDLLGKPSQANLTPKIQPNITSRLQQEATQAIAALSQTLQQQANAGQKYTLAWLLQETLKAIQALENKGNASVPVNQTGEYERHTKGDTLEFVSLQADALNAPPCEGADSQSGKSISYSIGAERVQHADFYLPKIGFSFTRQYNSQMDEFDQSMVGARWMMPFSNMIQQNAKGYLFIDSKGRKHQLPASITFETYEVPYEGITIQPLKNGDLVLNFGGDWTFQFHQFSVGQPYQLIQQFNEKTQEKIDLSYLIFEKVAYLQYVVFQLEHAKHQLKFAFNEQVKIMAVFLDDKAEPLARYEYDIQGNLIKAIDQNGYTRTYEYNNFHQLTRYTDRTGRGQNIRYESTDAKAKAVEEWADDGSFHTKLKWHPRLRQVAVYNAYDVPTYYYFDLNGFTYRTRLADGRESWYSRDGKKRITRQIDFEGRETQQEYNDQDQLVKIVQPNGGVIRFAYDEQDNLVEIKDPEGSIWKREYDENGNLNKEINPLGHITQYKYNNDNQLVEVIDAKGGVKKIQYNELGQMISYTDCSGKSSTWEYDEDGVLTAEQTANNKVVQYFYSIKGRDKGQLQSIIYPDGLKEYFEHDEEGRLLKHTDTKGLVTEYKYNQVGLLEQRIDANRHSVAYQWDKQGRIQKLINQNQAEYLFGYNPYGYLIREQAFDGEEKHYSYNENGRIFQIRQPNILTQFDYYADGQIASKSFTHLHTGQKQTEQFDYNLNSQLSRASNEVSQIDFYRNALGQLVREHQHYKIPELKPLTAVLHYEYDELGNLIKTIRPDGHTLNHLVYGSGHIYAIGLNNQEVVSFQRDDLHRETTRLLANGLMQTKQYNDVGLLSSQFIQPEQETQDYLQYQAHRKYHYDKNYLLSQVEDSRLGKLNYQYDPIGRLIAAQSLHKTESFNFDPAGNLIDSDSVLSPAQIKNNLIKSYKGKHYQYDVQGNVTEIIQAGKNLKLTWDNQNRLIRSDNNGLVTEYGYDVFGRRLYKKTAKELTLFGWDGDLMIWESFKSAQTNYTKHYIYEPDSFVPLLQTGYKDFIQLIETPDYQEYQTKPYSIYKDPVWNSTTRKKRADLEQITFYHCDQVGTPQTMTNIRGECVWEILQDTWGAVSQIKALNQDNPFEQNNLRFQGQYYDQETELHYNRYRYYEPHSARYVSKDPIGLSGGINTSAYVSDPTQWIDPRGLASTNSIGSYGSVKSASDTYEKYATSKSLKDVAERYAAGKSVGGSATAGVGVGIYANYKGNGESTLTMERKVGLGYEYGVFERNYHYGERQVNRGYIEGCAATGESKYCAGSHTDKISPYIYKDEYKSKSKARGITISQGKEMVGNPNGPSIIHGPGHSWDLGAHGFPSTY

SEQ ID NO: 44559 - protein, 1010 aa, Acinetobacter baumannii
MTAVSSVYAQRLLMTLFLVSFGIYMFLATVTYTPFDPGWMHISSDTQQVSNASGIAGAWIADLLFGFLGWASLLIPIFLFVEAIQVWWPHSFLNRPFRYAAQFFLILVVSSLLYLHWNVPADTLDNAAGGIIGYELGQSLSQLLTIYGATLFLLVFGVVLFTLAFGVQWSKTWVTLKAMPGYLQDLFYKNVSPNESAYDLTTQPANKAATVKVAEMPKAEEVTDEVELNAQPEKAQSKASSTRHDEIAERLFADVLAKEQSQPETIEEKPTPQPENFERTLEQAQQLKKDSERLVATGEVWRALQRDDVSHKQEIDALLRAADDSSEQPSTHEQFQQTVYQAKQNQPSDTHQGLDWNDDEIFDELLAAVPNSKTATDVHTPFVQDHHVEPEVTPQASQTLVESSVPVTNLNQSPKNLSNEEVFDDFDDLLIDEDIPPATQPIKASSYAQSSAFVKAPIQTTIGAEKLSKEEFIEAWQETAGKPQDDLEDEFDFDAPLTDASGRPMSRAMQVAKKRLDLPTLPGFELLDKVDPNKKVNFTEEQLSRLSELLEIKLQEFNVKAQVVEAQPGPVVTRFELDLAPGVKASKVTNISRDLARSMSMASVRVVEVIPGKPYIGIEVPNSAREMVRLIELLETPAYRDPSALISMAMGKDISGNPVLTDLAKAPHMLVAGTTGSGKSVAVNSMILSMLLKYTPDQLRLILIDPKQLELANYNDIPHLLTPVVTDMKDAVSALNWCVNEMERRYKLMSFLKIRKLSDYNRKVEEALANGEDLIDPTWKPSDSATQERAPRLTPLPSIVIVADEFADMIMQVGKKAEEMITRLAQKSRAAGIHLLLATQRPSVDVITGLIKANIPTRVALRVNSKIDSRTILDAGGAEDLLGHGDMLFLGPGKIEPERVHGAFISDDEVNRICDAWRERGEPDYVDEILTPFDEEPASRGFEEGDGGSDRDALYDQCVSFVLETRKASTSSLQRKFSLGYNRAARIIDQMEENGIVSAMGANGKRDILV

SEQ ID NO: 44560 - protein, 134 aa, Acinetobacter baumannii
MFRKLLDEGRAGENCGILLRGTKREEVQRGQVLAKPGTIKPHTKFDAEVYVLSKEEGGRHTPFLNGYRPQFYFRTTDVTGAIQLKEGVEMVMPGDNVEMSVELIHPIAMDPGLRFAIREGGRTVGAGVVAKVTA

SEQ ID NO: 44561 - protein, 285 aa, Acinetobacter baumannii
MNYRHHFHAGNFADVMKHVLLLQLLNRLNAKDKPYRYIDTHGGAGKYDLSQAPAQKSGEFLTGIHRLVQLSDMEKRQAPEAIQQYLKLVEELRAQEGKGSYPGSPWFALQGMREIDKATIFEMQRDVFQQLRHNIHDKRAGLHERDAYEGLLAVIPPKEKRGLVMIDPPYELERKDFPQLVELLQSAYKKWPTGVFAVWYPIKDRAMIERFEKKMFKTGIRRQLICEICVWPDDTPVGLNGCGLLVINPPWQFSEQADQALQWLFPHLRMQETGGHAAVRWLVGE

SEQ ID NO: 44562 - protein, 308 aa, Acinetobacter baumannii
MNLADRDGFIWQDGQLIDWRDAKIHVLTHTLHYSMGVFEGVRAYETPKGTAIFRLQDHTKRLLNSAKIYQMKVPYDQAALEQAQIDVVRENKLASCYLRPLIWIGSEKLGIAATNNTIHAAVAAWAWGAYLGDEAMAKGIRVKTSSFTHHHPNVTMCKAKASGNYTLSILAHQEVAHSGYDEAMLMDPQGYVCQGSGENVFLIKDGVLHTPDIAGGALDGITRQTVMTIAKDLGYEVVERRITRDEFYIADEAFFTGTAAEVTPIREYDDRQIGAGCRGPITTEIQKTFFDAVQGKNPKYEHWLTYVK

SEQ ID NO: 44563 - protein, 324 aa, Acinetobacter baumannii
MSLSYQPTCSIDALKARAKLYTQIRQFFAEREVMEVETPIVSQAGVTDVHLASVQALRHINGKLQTQYLQTSPEFAMKRLLASGSGPIYQICKVFRDDEHGRKHNSEFTMLEWYRPGLDLKALMHETADLLQTCLQHRFGEVRPFILSYKHAFQDRLDINPLQATLKQLKDTANRVGLNLDLGDDRLAYMDLLFSHFVEPSLGFDAPVFLTDFPPEMASLAKVKLDEDGEEVAARFEVYIEGLELANAYDELLDSDVLRSRFEADNAERAKQGLHIMPLDEHLLAALSHMPECSGIALGIDRLLMVATDQLKIEKVIAFPAEIA

SEQ ID NO: 44564 - protein, 358 aa, Acinetobacter baumannii
MQTMKIVADENLAFTDYFFSEFGDIQYKAGRTLTHTDVQDAEALLVRSVTAVNESLIQNTALKYVGSATIGTDHLDIQALEKQGITWANAAGCNAQAVAEYVITALLHLDASLLEQQEKFTLGIVGLGNVGKRLAYMAQLLGWKVIGFDPYVQLDSIENVSFQTLLQQANAVSIHVPLTKKGEHATYHLFDEKAFAALQPNTILINSARGPVVKEAALIEDIQRTQRKVVLDVFEHEPVISEELLNMLALATPHIAGYSLEGKARGTQMIYEAFCQKFGYDINKRFETQLPACEDYFSGHDLKAVLKQKLSQIYDIAQDDANIRACVKEGKVEQKAFDLLRKNYPLRREWAAHGGPQA

SEQ ID NO: 44565 - protein, 212 aa, Acinetobacter baumannii
MGFDVNHNQCIIMTSKVNKSERTNMKVSKTQVKENRDKIVEKATQLFRSKGYDGVGIAELMSSAGFTHGGFYKHFSSKTDLVTITAKHGLEQVLKRIEGLNLPQFIQMYVSRTHRDNRDQGCTLTALSCDAARQPDEVKVEFEEGIEQLIEFIMNERAKQVSLETEELRKQAINILAQSVGAIALSRACPDQSNLSDEILESCRESLLKLTD

SEQ ID NO: 44566 - protein, 1308 aa, Acinetobacter baumannii
  MISC_FEATURE (482)..(482): X=any amino acid
  MISC_FEATURE (491)..(491): X=any amino acid
  MISC_FEATURE (542)..(542): X=any amino acid
  MISC_FEATURE (599)..(599): X=any amino acid
  MISC_FEATURE (606)..(606): X=any amino acid
  MISC_FEATURE (668)..(668): X=any amino acid
  MISC_FEATURE (1129)..(1129): X=any amino acid
DGSWSVPNPGNLVDGDTVTATATDPAGNTSLPGTGTVSADITAPVVALDDVLTNDSTPALTGTVNDPTATVVVNVDGVDYPAVNNGDGTWTLADNTLPTLADGPHTITVTATDAAGNVGNDTAVVTIDTVAPNAPVLDPINATDPVSGQAEPGSTVTVTYPDGTTATVVAGTDGSWSVPNPGNLVDGDTVTATATDPAGNTSLPGTGTVSADITAPVVALDDVLTNDSTPALTGTVNDPTATVVVNVDGVDYPAVNNGDGTWTLADNTLPTLADGPHTITVTATDAAGNVGNDTAVVTIDTVAPNAPVLDPINATDPVSGQAEPGSTVTVTYPDGTTATVVAGTDGSWSVPNPGNLVDGDTVTATATDPAGNTSLPGTGTVSADITAPVVALDDVLTNDSTPALTGTVNDPTATVVVNVDGVDYPAVNNGDGTWTLADNTLPTLADGPHTITVTATDAAGNVGYDTAVVTIDTVAPKCTGAXSDQCNRLQXAVRLEPGSTVTVTYPDGTTATVVADTDGSWSVPNPGNLVDGDTCDLSQSYXSLSGNTSLPGTGTVSADITAPVVALDDVLTNDSTPALTGTVNDPTATVVVNVDGVDXYATAKYXTAPRISYRQYYLATLSGRDTTSQFQSATNAAGNVGNDTAVVTIDTVAPNAPVLDPINAQTQXAGQAEPGSTVTVTYPDGTTATVVAGTDGSWSVPNPGNLVDGDTVTATATDPAGNTSLPGTGTVSADITAPVVALDDVLTNDSTPALTGTVNDPTATVVVNVDGVDYPAVNNGDGTWTLADNTLPTLADGPHTITVTATDAAGNVGNDTAVVTIDTVAPNAPVLDPINATDPVSGQAEPGSTVTVTYPDGTTATVVAGTDGSWSVPNPGNLVDGDTVTATATDPAGNTSLPGTGTVSADITAPVVALDDVLTNDSTPALTGTVNDPTATVVVNVDGVDYPAVNNGDGTWTLADNTLPVLADGPHTVSVTATDAAGNVGNDTAVVTIDTVAPNAPVLDPINATDPVSGQAEPGSTVTVTYPDGTTATVVAGTDGSWSVPNPGNLVDGDTVTATATDPAGNTSLPGTGTVSADITAPVVALDDVLTNDSTPALTGTVNDPTATVVVNVDGFAISWSVQWCTVPXCLLTLLCLLLSGGPIPSVTVFVQRDAAGNVGNDTAVVTIDTVAPNAPVLDPINATDPVSGQAEPGSTVTVTYPDGTTATVVAGTDGSWSVPNPGNLVDGDTVTATATDPAGNTSLPGTGTVSADITAPVVALDDVLTNDSTPALTGTVNDPTATVVVNVDGVDYPAVNNGDGTWTLADN

SEQ ID NO: 44567 - protein, 1439 aa, Acinetobacter baumannii
  MISC_FEATURE (322)..(322): X=any amino acid
  MISC_FEATURE (471)..(471): X=any amino acid
  MISC_FEATURE (477)..(477): X=any amino acid
  MISC_FEATURE (490)..(490): X=any amino acid
  MISC_FEATURE (570)..(570): X=any amino acid
  MISC_FEATURE (298)..(298): X=any amino acid
PVVALDDVLTNDSTPALTGTVNDPTATVVVNVDGVDYPAVNNGDGTWTLADNTLPVLADGPHTVSVTATDAAGNVGNDTAVVTIDTVAPNAPVLDPINATDPVSGQAEPGSTVTVTYPDGTTATVVAGTDGSWSVPNPGNLVDGDTVTATATDPAGNTSLPGTGTVSADITAPVVALDDVLTNDSTPALTGTVNDPTATVVVNVDGVDYPAVNNGDGTWTLADNTLPTLADGPHTITVTATDAAGNVGNDTAVVTIDTVAPNAPVLDPINATDPVSGQAEPGSTVTVTYPDGIDRLNXYRGQQMSSGLVPNPDKPDRRDMQXSPQRLDTAGNTSLPGTGTVSADITAPVVALDDVLTNDSTPALTGTVNDPTATVVVNVDGVDYPAVNNGDGTWTLADNTLPTLADGPHTITVTATDAAGNVGNDTAVVTIDTVAPNAPVLDPINATDPVSGQAEPGSTVTVYSILMGSFXLLEFLXRVMLRLVCILIPXWSMVYSAKPCPAKKQLTLQATLHCQVTGTFPADITAPVVALDDVLTNDSTPALTGTVNDPTATVVVNVDGVDYFGHQQCXTDTGTSTDNPLPTVTPAPHTSSPPASEAAGNVGNDTAVVTIDTVAPNAPVLDPINATDPVSGQAEPGSTVTVTYPDGTTATVVAGTDGSWSVPNPGNLVDGDTVTATATDPAGNTSLPGTGTVSADITAPVVALDDVLTNDSTPALTGTVNDPTATVVVNVDGVDYPAVNNGDGTWTLADNTLPTLADGPHTITVTATDAAGNVGNDTAVVTIDTVAPNAPVLDPINATDPVSGQAEPGSTVTVTYPDGTTATVVAGTDGSWSVPNPGNLVDGDTVTATATDPAGNTSLPGTGTVSADITAPVVALDDVLTNDSTPALTGTVNDPTATVVVNVDGVDYPAVNNGDGTWTLADNTLPALTDGPHTITVTATDAAGNVGNDTAVVTIDTVAPNAPVLDPINATDPVSGQAEPGSTVTVTYPDGTTATVVAGPDGSWSVPNPGNLVDGDTVTATATDPAGNTSLPGTGTVSADITAPVVALDDVLTNDSTPALTGTVNDPTATVVVNVDGVDYPAVNNGDGTWTLADNTLPTFADGPHTITVTATDAAGNVGNDTAVVTIDTVAPNAPVLDPINATDPVSGQAEPGSTVTVTYPDGTTATVVAGTDGSWSVPNPGNLVDGDTVTATATDPAGNTSLPGTGTVSADITAPVVALDDVLTNDSTPALTGTVNDPTATVVVNVDGVDYPAVNNGDGTWTLADNTLPALTDGPHTITVTATDAAGNVGNDTAVVTIDTVAPNAPVLDPINATDPVSGQAEPGSTVTVTYPDGTTATVVAGTDGSWSVPNPGNLVDGDTVTATATDPAGNTSLPGTGTVSADITAPVVALDDVLTNDSTPALTGTVNDPTATVVVNVDGVDYPAVNNGDGTWTLADN

SEQ ID NO: 44568 - protein, 690 aa, Acinetobacter baumannii
MRSVRKILVTNALPYANGPIHMGHLLGYIQADIWVRAMRAMGHDVTYVCADDAHGTAIMLRAEANGISPEEQIANVQKEHIRDFDGFGVHFDHYDSTHSDANKARSTDIYIKNREAGNIAVRPVTQLFDPEKGMFLSDRFIKGTCPKCKSEDQYGDSCEVCGTTYNATELLNPRSTLSGATPVEKSSDHYFFKLPNFAEYLQKWTRDEGRLPLSIANKLDEWFEAGLADWDISRDAPYFGFEIPDAPNKYFYVWVDAPIGYMSSFENYIKTKRPDLNFDDFWKKDSQNEVYHFIGKDIVYFHALFWPAMLEGANYRTPTGLFVNGFLTVNGQKMSKSRGTFIKAETYLQHLNPEYLRYYFASKLSDKVEDSDLNLDDFVQKVNSDLVGKVVNIASRCAKFINSSFNNTLSSTCAESDLVQSFIDAGDSIAAAYEAREFSTAIREIMALADRANQYIDEKKPWALAKQEGQEQQVLDVCSVGINLFRQLAVYLAPVLPTLAQQVQDFLKLESFDFESRKQILVSHEIAQFQPLMQRVDPKAVAAMVDASKESLGAPAPQATKSAKKEKSAEKKAAPTPAVGEAEIIGIEDFLKVDLRVAQVVEAGTVEGSDKLLQLTLDVGEAEPRNVFSGIRSQYAPEDLKGKLVVMVANLAPRKMRFGISNGMVLAAGNGEGIFIISPDSGAKPGDKVS

SEQ ID NO: 44569 - protein, 290 aa, Acinetobacter baumannii
MQFKYSLGVISLCSALFLVGCNDDNSSVSQTPTVQEQKQKLQPIIIQGALPVESERMASKLENKTVEKIGGWTFWKGTYNGYPMIISKTRMGMSNSAAATALAIERYKPIAIINQGTAGGHDPDLHVYDIVLGKYATNIGAFRTPKQPLGGGSNSLTWVEAFDVLPTDESDPEPIAIRKFEGDQELLMAAHKVRYDKGEVVEGTIGSADVWNNELDRIQFFHERYGTSVEEMEAASVAQIASQFNVPFLGIRILSNNITNNGAYDPGTGEACQDYVLNVAEEYMKSKLPK

SEQ ID NO: 44570 - protein, 419 aa, Acinetobacter baumannii
MNEITTKKANPILLGVLGVFVSNISHASALEQSGQSILPFLENGNYAEANLFAVDSSVSGVVNDRADLVRDHQSRDTGDIAESTQFYTAAIKLKLTDRLGFGVLYDQPFSADIKYPARSNNSYFDNDISYEGTSVKADTQNLSLLFGYSPYQLFQIYGGPVYQTVKANVALRGNAYTQAFNGYNAKFKQQGEVGWLLGGSYQLPDIALKAAITYRSKIKYKFQVEEDIFGEPLKLVENEKTKLETPASLNIDFQTGISEKSLVYMNLRWVNWKEFETRPPQYGALSEIIMKEVTGGAYTQGFKLDSYQNDQYSATVGLAHQFKEKWGASTDVSWDSGTGDPASTMGPIKGSWSLGLGVQFNPAKNYFITGSLKYFWLGDTKTEDGTYYLPIEGIKPYAEQANFKNNHAIAYGLKFGYWF

SEQ ID NO: 44571 - protein, 435 aa, Acinetobacter baumannii
MKKYDYDIAVIGAGCAGVVAARDLSNAGHKVVLLEARDRIGGRTYTGEAFGRQVEFGGGYSHWTQPYIWRELQRYGIGLNPPTEVDKTVWFADGKLHTGTQAEYAAIAEPLLTAFFNDARQWFPLPYDVNAIDTSDIEKQTLRDRLDTLNLSTYERDVLDGLLSTLVHSWDEQGVAQLLFWAATYFGNWGAFFEVAGSWPIAGGTQKLVRAIYNDSGAELRLTTSVAAIDDQGEQVVITTQSGEKIVTKKALVAVPLNVLSDIKITPEVNKPARDMIVAKHPMRTAKLWARVRGKIEPFIGFAPVEQNPINTVRVEYEHEDDSILVCFISDESTIDVNDIEAVQKALQMFKPDIEVLDIASHNWAKDPYAQGTWVHYRPGHLSDAAPLMRKPHGNIYFAGGDIATMSMGGIEGALESGIETAASITHALAQKLAG

SEQ ID NO: 44572 - protein, 1036 aa, Acinetobacter baumannii
MMSQFFIRRPVFAWVIAIFIIIFGLLSIPKLPIARFPSVAPPQVNISATYPGATAKTINDSVVTLIERELSGVKNLLYYSATTDTSGTAEITATFKPGTDVEMAQVDVQNKIKAVEARLPQVVRQQGLQVEASSSGFLMLVGINSPNNQYSEVDLSDYLVRNVVEELKRVEGVGKVQSFGAEKAMRIWVDPNKLVSYGLSISDVNNAIRENNVEIAPGRLGDLPAEKGQLITIPLSAQGQLSSLEQFKNISLKSKTNGSVIKLSDVANVEIGSQAYNFAILENGKPATTAAIQLSPGANAVKTAEVVRAKIEELKLNLPEGMEFSIPYDTALFVKISIEKVIHTLLEAMVLVFIVMYLFLHNVRYTLIPAIVAPIALLGTFTVMLLAGFSINVLTMFGMVLAIGIIVDDAIVVVENVERIMATEGLSPKDATSKAMKEITSPIIGITLVLAAVFLPMAFASGSVGVIYKQFTLTMSVSILFSALLALILTPALCATILKPIDGHHQKKGFFAWFDRSFDKVTKKYELMLLKIIKHTVPMMVIFLVITGITFTGMKYWPTAFMPEEDQGWFMTSFQLPSDATAERTRNVVNQFENNLKDNPDVKSNTTILGWGFSGAGQNVAVAFTTLKDFKERTSSASKMTSDVNSSMANSTEGETMAVLPPAIDELGTFSGFSLRLQDRANLGMPALLAAQDELMAMAAKNKKFYMVWNEGLPQGDNISLKIDREKLSAFGVKFSDVSDIISTSMGSMYINDFPNQGRMQQVIVQVEAKSRMQLKDILNLKVMGSSGQLVSLSEVVTPQWNKAPQQYNRYNGRPSLSIAGIPNFDTSSGEAMREMEQLIAKLPKGIGYEWTGISLQEKQSESQMAFLLGLSMLVVFLVLAALYESWAIPLSVMLVVPLGIFGAIIAIMSRGLMNDVFFKIGLITIIGLSAKNAILIVEFAKMLKEEGMSLIEATVAAAKLRLRPILMTSLAFTCGVIPLVIASGASSETQHALGTGVFGGMISATILAIFFVPVFFIFILGAVEKLFSSKKKISS

SEQ ID NO: 44573 - protein, 335 aa, Acinetobacter baumannii
MPQTATALASWVKAIQKALEKAGVDSQPLLEQAGLDIQALSNPDARYSLKQTANLWKLAVQKTQDSCFGLKVASQVNQNTFHVLGHSLITSTTLKEMFLRIIRYFRVVTDIPELEFYGQGNNHYFVIHVPDEVQPESIDAFISVFIRSSRALQGSVFSPLRIELRRSEPEDLETFQNILKAPIVFNAPKDMIVFDTATIEQPLEGANPTLTQEYDEIINRYLARFDKENILARVKVKLIEKLSTGDFQQQEIAKSLGLSIRSLQRKLSAENTSYSELLDDTRHELALSYIKNTGHSVTEIAYILGFTDVSSFTRAFRRWTDLSPIHYREKYLACS

SEQ ID NO: 44574 - protein, 418 aa, Acinetobacter baumannii
MNLTELKKKPIGELIKIAEFMGLEGMARNRKQDIIFAILKRHAMNGEEIFGDGVLEILSDGFGFLRSAAGSYLAGPDDIYVSPSQIRRFNLRTGDTITGTIRPPKEGERYFALLKVNQINYDTPENSRNKILFENLTPLFPTEQLVMELGNGTTEDLTARVVDLVAPIGKGQRSIIVAPPKAGKTMLLQNIAQSIVRNNPEVFLIVLLIDERPEEVTEMERTVRGEVVASTFDEAPARHVQVAEMVIEKAKRLVEHKKDVVILLDSITRLARAYNTVIPSSGKVLTGGVDAHALERPKRFFGAARNIEEGGSLTIISTALIETGSKMDDVIYEEFKGTGNQEITLDRRIAEKRVFPAMNIKKSGTRREERLMDEDKLRKVWILRKLLHPMDELAAMEFLLDRMKETKTNDDFFDQMKR

SEQ ID NO: 44575 - protein, 273 aa, Acinetobacter baumannii
MKKATQSKAWTTVQIARHPERPQFLDYVGEIFTEFDALHGDRLFGDDGAMVGGLARFDGQPVMVIGQHRGRSTREKLKHNFGMCNPEGYRKSQRLLDMAERFNLPVFTFIDTMGAYPGVGAEERGQAEAIATSLAQLSSLKVPVIATVLGEGGSGGALGIGVADRVIMLSHSIYSVISPEGCASILWKTAEKAAQASEALGLTADKLQSLGIVEYVVDEGEGAHLDPERVMQNLKVVLKQALDELLPMDANERCEARYQRLMKFGSENLGVAS

SEQ ID NO: 44576 - protein, 427 aa, Acinetobacter baumannii
MDSMLLLHLMAQIFPQKIRAIYIDHQLQDQSAEWAEVVATQATILNIPYIIQKVQIANGNLEAQARQARYQAYQQHLQENEILLLAHHQQDQAETVILRLLSGAGVDGLAAMQAIDYRKDMTIWRPFLDLTREQIALWTAQLEVKYIDDPMNYDTHYDRVWCREALWPFLTSRFPKMQQALSRTSYLMQDASEVLEEVLKDDWQYSGSADYLDLTKLSELSFARQRQLLSAWMKGQGQYRPAFEMVERLRTEVIESKSDAQAALHWNQFYYVRYQNILYRLSKQIYFAETLNPVDAELEHSFKLEERWQGAAGLFHVECKKIGLSHSLLNKKLKIIRRQGGEKIHLYGRVGQWPLKKAIQEAHILPWLRHTIQILVLDNVMLGVFTPKGFWLAQSPYCEEGGWQPDLISHSCNLVNGEYSYGNSSEL

SEQ ID NO: 44577 - protein, 923 aa, Acinetobacter baumannii
MPPFVLVDGSYFLFRAYHALPPLTTSTGLHTNAIRGAISAIQKLMRRMQPTHMAVIFDTPEPTFRHKLSPIYKGDRPTMPEELSQQIPYLHALIKAQGIPLYSLPGAEADDIIGTLAKRAVKEGHHVLISTGDKDMAQLVNDYVKLEDSFKDRVLDTDGVFEKFGVWPNQIIDYLTLMGDASDGIMGVPGVGAKTAAKLLTEYGTLDNIIANVDQLKGKLSQNIKDNLDNIKLDHQLASIVCDLPLELDWHELKLTDPNVDALRNLYTELEFRNQLQSLDHPNNPNSSSYKQQASQTIVQNEVKPAQTIETEDQASLTSQDDQLGTANYHTVLTQEAWDQLWQRMQNADHFAIDTETTSLDYRIAEMVGFSIAFDAKDAYYVPLAHNYENAPQQLDREQVLAQIKPILENEAVKKIGHHLKYDAHIFANHGIELKGWYFDSMLASYVLNAAATRHGMDDVARVYLSHLTTTFEQIAGKGAKQKTFNQIEIEVAAHYAAEDAHVTYRLYEVLSNKLKAHPELENILYNIEMPVARILSGMEEDGIRLDHAFLDKLSVEFAKTMEDLENQAMEIAGETFNIASPKQVGEILFDKLGIKGGKKTATGQYSTSESVLEKIEHPLTEIILEHRGLAKLKSTYTDRLIEQSHNDTHRVHTSYHQALTATGRLSSSDPNLQNIPIRRQIGRQIRKAFIAPEGRVLLAADYSQIELRLMAHFSQDDALVHAFQHGQDVHRRTAAEVLGIAIEDVTNDQRRQAKAVNFGLLYGMSEFGLIRQLGFTREESQNYIKQYFQRYPGIYEYMQRTRQVASEQGFVETILGRRLYTPDIDARNVMVRKAAERAAINAPLQGSAADIIKLAMIEVDKILPKDQAKLLLQVHDELVFEVDSNIADELSKQIADVMQSVLEISVPLVVEVGQGKNWDDAH

SEQ ID NO: 44578 - protein, 299 aa, Acinetobacter baumannii
MNYSNLLLSSLLTVGLYTSAHAQENLTEESAASSEDVTSTQTQHSRPHLQIIKDLKGIKVKDLKINANAAQPDTVKDPLQSLNRPIYSFNDMLDRHVLRPVAVEYREKTPEDVRGSYRQFRKNLGEPWNAVNQLIQGRPGRAAKTLGRFTINTLTTLGLADPASRLGLPPEEESFGVTLGYYGVPSGPFLMLPFFGPSTLRDGVGLAVDAQARPQKYIMDDQDGLYWSTNLLQAVDTRAQYLDLDQTIQGDQYAMIRDLYLQRKAFQIAEKKGDSADVSFIDDDESEDVPEDNTDKTEK

SEQ ID NO: 44579 - protein, 305 aa, Acinetobacter baumannii
MADSSIPKDIADSLKSIFTNINTERISEILVGVVLCFIGFVLARIISNTFIRTVGSRFNAHQRLVWRRGIFYFIFLLFIMTSLKEAGFKLSVFLGAAGILTVALGFASQTSASNLISGLFLIGEGSFEVGDTIQITLIRGNTIEGEVISIDLLSVKLLTLDNVYIRLPNEQLIRAPVHNLSKYPIRRIPITLAINFHEDIIKVREVLLNVAANYPLVLDDPKPAVTVTAFRESSIELLFAMWCRQENSLKVRDEMQERIRNGFLDNQIEIPVPKMGLIDRPSTAFAEDDIDQYSNQKELKREPKA

SEQ ID NO: 44580 - protein, 409 aa, Acinetobacter baumannii
MKRVVITGMGINSCIGNSLEEVTHSLKNGISGTRFNPTYAELNFKSHVSAAAEQDFDNIDRKLKRFMGVCAMYAYNSAVAAVEHAGLKAEDLADNPRYGIAGGSGGGSTASVVEMTELLETKGARKVGPFFVPRNMTNTITANVGVAFKLQGIAHSIASACATSADAIGYAYNLIALGKQDLMLAGGGEEDHWSQSLLFDAMGALCSKYNDTPETASRPYSKDRDGFVIAGGGGFVVLESLEHAQARGANILAEVVAYAANSDGADMVAPSGEGATRCILMALEEAKQHGVDKIDYVNTHGTSTPAGDVTELKAMERAFGEGKVPPLSSTKSMTGHSLGAAGVHEAIYSVLMLQNDFIAPNINVTELDEGTEGFDIVLEKRDTKLNTVMSNSFGFGGVNACLIFKKWDA

SEQ ID NO: 44581 - protein, 541 aa, Acinetobacter baumannii
MKSFKVALAQFSPHIGNIDSNTQKMIEQANQAKKQDADLIIFPELSVIGYPAEDLLLRPNLNKRMQKAFAQLSEVKDIVMVFGFVNQTEDGQRYNSAAVMKDGQVLGVFNKHNLPNYGVFDEKRYFQKGHQHLVFEYLGHKFGVLICEDIWSINTVKQLSQLNVDTVLVLNSSPYEVGKPQHRKQTLSELAKQLHLNIVYVNQVGGQDDLIFDGTSFVSNQNGEIALQAPSFKEDLYIAEFDRDTKLYKVVESAPALETFAEIYQGLVMATRDYVERSGFPGVILGLSGGIDSALTLAIAVDAIGAERVQAVMMPYTYTSQISVEDAAEQARRMGVTFGIAEIHSIVNSFMQTLYPFFGNSPADATEENLQARARGTLLMGLSNKFGNLVLSTGNKSELSVGYCTLYGDMVGGFAVLKDVYKTIVFELAKYRNSLSETPVIPERVITRPPSAELRPDQKDQDSLPAYDVLDAILYAYIEEDLGQADIIAKGFDKEVVEKVIRLVDRNEYKRRQGAIGPRITSRAFSRERRYPIVNGWTAND

SEQ ID NO: 44582 - protein, 452 aa, Acinetobacter baumannii
MYEPYPVPEQVREQKLSRYSSLWTFAKQDLRLLLFFLIIAGLVGLGIGYFWSCIFIAFVVFFTLQLRSLYLVNDWIANNPYDVPPNLNGIWGALLFNVYRAQRQERIVQAEMVGLIDRAQSSLVALAEAVVLIDDQHQIEWWNPAAERLLGISPLDRGRNLLTILRQPTFIEYFNNIDQAPDGIKLHSNLDDDRYVQVKLTRFGGESRLLVAYDVTRMHNLEQMRKDFVDNISHELRTPLTVLSGYIETFTDQEDINPRWKRAFDQMQSQTKRMNALVNDLLLLSNLENNKKIAKNQIIEMPSLMNQLFDDAQAYNADYGHTLNLHIDSHCDLIGSDMEIASAFSNLITNAIKYTPKGGTITIGWHDDGEHAYFSVQDTGIGINPKHLPRLTERFYRVDSDRSRQTGGTGLGLAIVKHVLMQHGAYLDVQSKENEGSTFTAVFPKERLYNMT

SEQ ID NO: 44583 - protein, 493 aa, Acinetobacter baumannii
MNNTQSAAMPLVENEEVNLLDSIVEQSRIARNEEEHSRAKSLIGELAKEVMAGTITVSENMTLSIDKRIAEIDALISKQLSQIMHNEQFQKIESTWRGLYYFCQETPSNPLIKIRMLNTTKKELVKDFQGATDFDQSTLFKKIYEEEYGSFGGAPYSALIGDFEFDRTPSDMYLLEQISHVAAAAHAPFISAASPSILGLESFTDIDRPRDVSKIFETAEYVQWRSFRDSEDSRYVALTLPHVLGRLPYHPKEGTATEGFNFIEDVSGENHNEYLWMNAAYAFGTRLTNAFDMHGWCAAIRGVEGGGLVEGLPVHTFKTQDGEVVFKCPTEIAITDRREKELSDLGFIPLVHCKNTDYAAFFGAQSTQKPKKYDNDTANANSALSSQIQYIMAVSRIAHYLKAMMRDKVGSFASAGNVEAFLNEWLSQYVLLDDGASQEAKAQYPLREASVKVVEDPAQPGHYKSVVFLRPHFQLDELSVSLRLVTELPQSSN

SEQ ID NO: 44584 - protein, 298 aa, Acinetobacter baumannii
MHAYTVEPLYVPCDQEMIAADFYIPKTNNKSAVIIMAHGFAGLRQFKLIQYAQRFAQAGYAVILFDYRYWGGSTGKPREMISINSQLEDWKTMIQYASTCKFIDNRRIVLWGTSLSGGYALSLASELKNIQAIMVQIPYVDGAETAKLYPLQRYPQALKLSSQDYMGSKMGLNPKRLPVVDQYKLCFMPTADSYYGYLSIVNPDYYWSGEVPARVFFNLMRYRPIQLVRQINIPVLFIAAQHDSLIPIESSREAATNIAPFVSYHEWDMKHFDIYHGSWFEKAVTTQLEFLHQHIGVM

SEQ ID NO: 44585 - protein, 283 aa, Acinetobacter baumannii
MQGIDLHTHSNISDGTLSPELLVQAAVDVKLHTLALTDHDTMDGLQRAKNAAQPHDLQIISGVEISSQWSRPSTKKSYGVHIVALNMQDEAPILEALEQQKRIRAQRAEVICELLKKCIGFDIYQDVLDKVENQPDRITRTHIAKALVEKNVVSRPQQAFDRFLKEGKRAFVKFEGLGLKETIEVIHNSKGFAVLAHPTRYDLSATNTRYLIEIFASYGGDAVELPPPVDPLSTRQMIDRMIEQHHLAISIGSDFHGENMPWIKLGNTPKPASNQQGIWERFI

SEQ ID NO: 44586 - protein, 140 aa, Acinetobacter baumannii
MSEAYTKPEGILSLQTIAMPADTNWSGDVFGGWIVSQMDLAGAIHAERFSRGRCATISINQMTFLVPVKVGFVISCYTKILKVGNTSIQMQIEVWDSHDDSRAPIRITEGVFTFVAVDVKGNKRQIPEEAKQKFLASQES

SEQ ID NO: 44587 - protein, 303 aa, Acinetobacter baumannii
MIVREQPSIFKVLFSWRGTILPKILPSLGVVMLISAIIGGVEYINLYRFPEIPLVGFTLIGVVLSIFLGFKNTACYDRWWEARKLWGVLIATSRHFDRDCRILTQARRERVIQHVIVFANVLRDRLRRQTANPTELIQTSGMSQQALTQLYQQNNAPQYTLSLIQWELLQALKEGEISDIIYAQMNKNVADLSVVQTGCDRIANTPIPFAYSVLLNRTVYFFCFMLPFSLGSLLGLATPLLVGILAYTFLGLDALSTEIEEPFGTQSNDLPLDAMVRSIEIELLGTLGKPTPPPIQAQDNNLL

SEQ ID NO: 44588 - protein, 235 aa, Acinetobacter baumannii
MNTSIKNWPEQERPRERLLQQGPQSLSDSELLAIFLRSGSRQHSAVELARLLIQQFGSLNAVFDASYNELAQFNGIGATKYSQLLAVKELGRRYLDYHFSQTELSLHSSHLVLDYLRYELKGEKQEVFAVLCLDAELRKLHFKKLFFGSVQHCAVSVNQTLRYALQQHACQLVIAHNHPFGSAQPSLEDIKLTQQLEQACQLVEIRLLDHFIISPEGSFSFAEQQLLNPTSIAVQ

SEQ ID NO: 44589 - protein, 204 aa, Acinetobacter baumannii
MKALLDFVPLIIFFYLYKTVDPADTQHPLLKLIGSAGGVDNNNILVATTGLIISMLVVYGALFIMQKFRLDKQQWIVLFMTVIFGGITLMLSDDFYIRLKAAILNLVFAGAFLVSPWFGKDRKPLIQRLFDPILALSEKGWKNLNFAWAAMFVVMSGLHVFFAFLFHGGKYWGEFTAFGDMIVMFSFIIIQFIILRKHFKSPDA

SEQ ID NO: 44590 - protein, 377 aa, Acinetobacter baumannii
MKFEKLGQSGRARRGRLTLEHGVVETPVFMPVGTYGTVKGMLPRDIEDIQAQIILGNTFHLYLRPGLEVIKQHGGLHDFIKWNKPILTDSGGFQVFSLGAMRKIKEEGVTFRSPIDGSKVFLSPEISMEIQHVLNSDIVMIFDECTPYPATHEEAQKSLQLSLRWAKRCKTHHHDELKNKNALFGIIQGGMYEDLRDESLNGLLEIGFDGYAIGGLSVGEPKEEMIKVLDYLPNKMPHDKPRYLMGVGKPEDIVEAVRRGVDMFDCVMPTRNARNGHYFVTDGLVRIRNSKYRHDQGPLDPHCDCYTCKNFTRAYLFHLEKCGEMLASMLGTIHNLRYYQRLTEGMRDALDNGTFDEFVQDFYARRGLEVPPCPVDE

SEQ ID NO: 44591 - protein, 345 aa, Acinetobacter baumannii
MQLSDFSFELPDELIARYPLETRSASRLLHLDAKGQYHDHMFTDIIDLFEEGDLLVLNDTKVMKARLKGKRATGGAIEILVERMLNHTTAYCHIKASNSPKAGAELFVGEDNIPVIVRGRHENLFVVEFSQPILPVLEQYGQLPIPPYFNREAEEIDTERYQTVFHNPEKIASVAAPTASLHFDEELLAKLDQKGVKKTFVTLHVGAGTFMPVRTDDITNHVMHSEWCDVPQETIDLILATKARGNKVIAVGTTATRALESAAQAHGGKIAAWTGDTQIFIYPGYEFCIVDRLITNFHLPESTLLMLVSALSNRENILAAYEHAVKDRYRFFSYGDAMLIDKLEV

SEQ ID NO: 44592 - protein, 196 aa, Acinetobacter baumannii
MHLKTLSFGLAVALASTVTLAAPVDYKIDPTHTATVFSWNHFGFSTPSANFSDIQGVIKVDNAKPANSSVNVTIPLSSVNTNVPALDKEFQEEAWFNAAKYPNITFKSTKVETKDKKHFKITGDLTVKGITKPVVLDAVLNKQGEHPMAKVPAIGFNATTSFNRSDFGLGNYVPNVGDKITVNITTEATAASAAKK

SEQ ID NO: 44593 - protein, 662 aa, Acinetobacter baumannii
MTTPLNERRIANAIRVLAMDAVQQANSGHPGAPMGMADIADVVWREFLNHNPNNPQWANRDRFVLSNGHGSMLQYALLHLTGYDLSIEDLKQFRQLHSKTPGHPEYGYAPGIETTTGPLGQGIANAVGFALAEKTLAAQFNKDDLKVVDHFTYCFLGDGCLMEGISHEVCSLAGTLQLGKLIAYYDDNGISIDGEVEGWFSDDTEERFKSYGWQVLRVDGHDADAIRQATVEAKAETQKPTIIICKTIIGLGSPNKQGKEDCHGAPLGKDEITLTREALGWTEEAFVIPADVYAAWDAKAKGNEAEAAWNEVFAQYQAKYPTEAAELLRRISGDLPTEFSAQADAFIRETNAKAETVATRKASQNTLQAFGPLLPELLGGSADLAGSNLTLWKGCQGVQENPAGNYVYYGVREFGMTAIANGVALHGGFIPYVATFLMFMEYARNAVRMSALMKQRVIHVYTHDSIGLGEDGPTHQPIEQIASLRGTPNLNTWRPADTVETAIAWKSALERKDGPTALIFSRQNLPFQTRTEEQIQNAAKGGYVLAQEKGELKAIIIATGSEVSLAMEAYAQLEGVRVVSMPCAEEFMKQDAAYREAVLPAHIRARVAVEAAHVDYWWKFVGLDGKVIGMTTYGESAPAKDLFQFFGITTEAVVAAVKELTA

SEQ ID NO: 44594 - protein, 388 aa, Acinetobacter baumannii
MREYAVFTSESVSEGHPDKMADQISDAILDAILKEDPYARVACETLVKTGAVVLAGEITTTANIDVELLVRQTVNGIGYHHSDLGFDGSTCAVINMIGKQSPEIAQGVDRQKPEDQGAGDQGLMFGYASRETDVLMPAPISYAHRLMERQAELRRSGALPWLRPDAKSQVTFAYENGKPVRLDAVVLSTQHDPEITQTQLKEAVIEEIIKPIIPAEMFHAATKFHINPTGMFVIGGPVGDCGLTGRKIIVDTYGGMARHGGGAFSGKDPSKVDRSAAYAGRYVAKNIVAAGLADKCEIQVSYAIGVAEPTSISINTFGTAKVSDELIIQLVREHFDLRPFGITRMLNLIQPMYKQTAAYGHFGREGSDTAFTWEKTDKVEALKDAAGL

SEQ ID NO: 44595 - protein, 329 aa, Acinetobacter baumannii
MTLRNDWTREEIQALYEQPFLDLVFKAQQVHREHFTANTIQVSTLLSIKTGKCPEDCKYCSQSAHYDSKLEAEKRIAVEKVISEAKAAKDSGSSRFCMGAAWRNPHERDMPYVLEMVREVKALGMETCMTLGMLNQSQAERLKDAGLDYYNHNLDTSREYYSHIISTRTFDDRLNTLDYVRQAGMKVCSGGIVGLGESREDRIGLLHELATLPIHPESVPINMLVPIEGTPLADVEKLDVIEWIRTIAVARIIMPHSYIRLSAGRESLSDSDQALAFMAGANSLFSGDKLLTTPNAGEGKDQALFNKLGLTAEKPKPTVSDLSVDAMSA

SEQ ID NO: 44596 - protein, 246 aa, Acinetobacter baumannii
MLFRGRKFFWGMACLQALIATTGHAEIVLHGTRVIYPSDAREVNLQLSNNGTAPSLVQAWIDDGNAKSTPDEANVPFIITPPISRVEPSKGQTLRITALPNASQLNQNKESVFWLNVLDIPPRPEGKKQENNEVLTNNFLQLAIRSRIKFFYRPVSLKENINTLSEKIQWVKNGENLLIKNPTPFYITISSIFQEINHQKTDLLKQGLMLSPFSEDQIKLKNSNITNMSFVYINDYGGRIEQVIRF

SEQ ID NO: 44597 - protein, 818 aa, Acinetobacter baumannii
LTVYASDNMNRENILKADFDTNFLVGNAQKIDIGRFKYGNPILPGEYSLDVYINGQWLGKRKFVFKSTRSNENAKTCFTPDMLLEYGVKPEILHHEVSSTFTCNDLDKWVNDAFYQFDTSRLRLDISIPQVALQKNAQGYVDPRLWDRGINAAFFAYNASAYRIVNNNHETNHAFMGTNVGLNLYDWQLRHTGQWKWQDHNEIQEKVSSYTSNNTYAQKAFPKLNSVVTLGDYFTNNNFFDALPYRGINISSDDRMLPNSMLGYAPQIRGYAKTNAKVEVRQQGNLIYQTTVTPRNVVEMNDLYPTGFGGELQVSIYETNGEIHKFSIPYASVVEMLRPKMSRYSFTLGQFRDANINLKPWLVQGKYQRGINNYLTSYTGFQATENYQSFLIGSAFATPIGAISFDATQSSAEFEQKPTLKGRSYRLSFNRLFTPTNTNLTLATYRYSTENYLKIRDSIFNRDLQQQDIDSFSVGKQKSEFQITLNQGLPNQWGNFYLVGSWINYWNQPNRNQQFQFGYSNQFKDLTYSISAITHEFDQENQNSGHETQYLLSLSFPLQFKKNTVNFNSSISEDSRTLGMSGYIGNRFDYGSSISYQDQGQTSLNINGTYRTNYTTIGASFGQSDTYQQEMINLNGSLVAHSQGILFGPDQVQTMVLVYAPQATGARVGNISGLSINKQGYAVIPYVTPYRLNDISLDPQGMPSTVELTETSHRIAPYAGSITKVNFSTKTGYAVFISTQTPNGGHLPFAAQVFNQNNEIVGMVAQGSRIYLRTPLTQDHLYVKWGQSNSEECQLDYDIQSKILQEKQLIIMTEAVCK

SEQ ID NO: 44598 - protein, 146 aa, Acinetobacter baumannii
MTATQSKSIMAFDFGTQKMGMAIGQSAIESANPLPLFVMKDGIPNWDQLLKIVKEWQPDLFIVGLPLNMDDSESELSTRARKFARRLRHQTNIETWMVDERLTTREAREELGFYQEQGRAKKLSADSFAAALLIQSWYRNPVGLTP

SEQ ID NO: 44599 - protein, 333 aa, Acinetobacter baumannii
MNQLELKKVIRPVILIVALMIAVYTIVHLWNYYNAAPWTRDGRVRGDVIQVSSDVAGLVTEVLVQDNQTVKKGQVLFKIDVSRRALDVEQAKSDLAKAKAAYAQAQAGLAQAKANLIKSSTNIKLAEKNANRYSNLMDGAISKQEQDQVFATRDQSHAEHEQLQAAIQQAEATIKQQQALVEAATSNLHLAELNMHRAAVVAPADGTLSNFDLRPGNYVQVGQAVAALLDRKQLYVVGYFEETKLDRIHIGDEATVQLMGDRQKIKGHVQGIASGIEDRERSSSSKLLANVNPTFSWVRLAQRVPVKIVLDEAPKNELAFVSGRTATVHIIEK

SEQ ID NO: 44600 - protein, 699 aa, Acinetobacter baumannii
MLLKQILAFRPSKLDLIFAIKTFIAGMLALFVSFELDLINPMWSIGTVLIIANPYSGMVSSKCVYRLLGTVGGAIIALTITPHLINTPWIFTVVLSLWVGFALYVSLLDRTPRSYAFMLAGYSTAMIVYNAITYIDQYNIFDIALARVLEISIGVISSAVVSATILPMHIGSAIKQRVTKTLKDTENLFANLLNADQQQNNTQLLAAITRDTTDIHALAVHLSYEKGELHGMTKPLQEMLHQMSMVVANLVALSERIKQLQELNFIESHSDKLKQLSGHVIHFLEQKDQMTDENILQLPDEFENDFLNLNDSASEHQQVLLAAMKMDVRHFISNVLAVKVLWQRIKQGNKEIPDNITPMTTTYPSLHRDHGVAVRGGISAVLITFIVTGVWILSGWKAGFMMAQIGAVTACILTALDNPVPVLRIFIWGSVASAVLVFIYAFGIFPYVTTFWELGLVLLPMFLFAVSMMANQALMPVGMVLGINTMMGLNLHNAYSMDAVSYLDSSFGMVMGVLVSLVVIDVVRAMSPDTSANRILALHYRAMRQAIYIPYGIEFKVHLRGMLDRVGVLNTKMVQSEEIKKSIQQALVESSAIIDLSRLQELANQVPTSSELAHHIGRLQQDLDELFRAKENEKGESDVLVQHIHQTLFELKQLASNIEDMTLRQRLFISLNNIAYSMCHVSSNQMNADRTLTGATAHG

SEQ ID NO: 44601 - protein, 195 aa, Acinetobacter baumannii
MTTGRILNIPNILTLARIALIPVFLVIAYWPPAIGIGEHVGSMTRHIILTAIFVLAAVTDWFDGYLARTLNQTSAFGRFLDPVADKLMVAAALIVLVQWKPTIAMAFAAIVIISREITVSALREWMAELGARTSVAVSTVGKYKTAFQMIAISVFLLNWQPLEVLAYALLYTAVILTLWSMFIYLKAAWPYLKQP

SEQ ID NO: 44602 - protein, 471 aa, Acinetobacter baumannii
MSMANKVLQLIQESGAKWVDFRFTDTKGKEQHVTYPADSIDEDTFEDGKMFDGSSIAGWKGIEASDMILRPDAETGFIDPFFAEPTVVVTCDVIEPSTGQGYERDPRSIARRAEEYLKSTGIGDTAFFGPEPEFFVFDEVKWDIDMSGARHTLIAEEAAWSTGKDYESGNSGHRPRVKGGYFPVPPVDSAQDMRAEMCAKIEDIMGPGRVEVHHHEVASCQLEIGVSFNTLVRKADEVQQFKYAVWNVAHQYAKTATFMPKPMVGDNGSGMHVHMSISKDGKNLFAGDEYAGLSEMALYFIGGIIKHARALNAITNPSTNSYKRLVPHFEAPIMLAYSARNRSASIRIPYVSNPKGKRIEARFPDPMMNPYLGFAALLMAGIDGIQNKIHPGEAADKNLYDLPPEEEAKIPTVAHSLDMALEALQADHEFLLKGGVFTKEMLDAYIELKTEDVRRLNTTTHPVEFDMYYSL

SEQ ID NO: 44603 - protein, 234 aa, Acinetobacter baumannii
MLLEKILQSQGFGSRKYCQQLIKNGSVSIDGEVVSDLKKQFAPENFEFSVFGQNYQYREKIYIALRKPQGFECSHHPQHHQSVFSLLPETMIHRGVQAVGRLDQDTTGLLLLTDDGKYLQALTHPRKHVPKVYHVTTYDPVTPEQIEMLIQGVNLHQEKGVFAATDVALLETHQLTMTIHQGVYHQVKRMIAAVGNKVEKLHRHQIGQLVLPEIEDGDWVYLSEQEKQLAQNII

SEQ ID NO: 44604 - protein, 211 aa, Acinetobacter baumannii
MRHYTGIDQLINSFDQALRSLVPGATAAQRQNPAETVEAKLGVEDARHVAGLMRVNHSGEVCAQALYHGQALTAKLPNVRREMQQAAIEEQDHLAWCEDRLKELNSHTSLLNPIWYGLSYGMGALAGIAGDKYSLGFVAETERQVSLHLQDHLNQLPAQDERSRKILEQMNEDELHHRHTALEAGGVELPYAVKITMTAISKLMTKTSYYL

SEQ ID NO: 44605 - protein, 650 aa, Acinetobacter baumannii
MTDEKLTQRRIHTLDAALANQIAAGEVIERPSSVVKELLENSIDAGATELIVRIAQGGSTLIEIIDNGHGIHPDDLPLAVMRHATSKIKTAEDLHAIVSLGFRGEALASIAAVSRLTLTSSQDESGIGHQVEVNGTAFDHQQVQAVAAQKGTHIRVQDLFFNVPARRKFLKKPTTEFGHIEEIVRRLALTHFDIRFVLEHNDNIRINLPIADSGELRFQRVQQLLGQQFVQNAYWIDAESINMRLSGWLGHPSDARAQADLQYVYVNGRIVKDKTISHALRMAYDGILHGHQHSSYLLFLEVDPENIDVNVHPTKHEIRFLNQREVHEFVRHYAKETLAQFQTASADLAQAMKVDDTQNLSVQPQPKYQEQFTLHRTAQAADTAVDKPNGYQPSTELLTDFNNSRPQSVHYAEQTPKYNGSAQLNNALKTYLAPLRDQPANFSVDESIEPVAKVDEFPLGIAIAQLHGIYILAQNTEGLIIVDMHAAHERILLQQMKNAWDKPEFWTSQQLLIPKVISISRMQAVRVEDLKPQLERLGLEIDLYGDEQVIVRGVPAILQKADFENLIPELLNDLDPNDEAQGLLQKRDELLAGMACHGAVRAHRQLSLSEMNALLRQMEQTEFASQCNHGRPTWRAFPLSQLDKLFARGE

SEQ ID NO: 44606 - protein, 327 aa, Acinetobacter baumannii
MRILAWKTVRRFFYNNLHNHDYETTVSRCINYFLVFLIIGNVVAVLLETVNDLYYSYRIWFDYFENVSIAIFSVEYLLRLWSIVERDSTQAAWKQRFAWMKSGEALIDLMAILPAYLNFFVRIDLRMLRILRLLRLLKLTRYFISLQILLCVIKREKGSFQAVIFILIIMIIMTASGIYVVENKAQPEAFSSIPKAMWWAVVTLTTVGYGDVTPVTSLGKLLGALITILGVGIAALPAGILASGLANELNQRNQRLEQEFRELLQVRGIDIMHDEVEIERIRQKVGLPKEQAHNLIIQIMREKVLEEKEAVREKKCYCPHCGEKLTD

SEQ ID NO: 44607 - protein, 879 aa, Acinetobacter baumannii
MLEAYRQHVAERAALGVPPKPLDDAQTAQLVELLKNPPAGEEAFLVDLLENRVPAGVDQAAYVKAAFLAAIAKGEATSPLVSKERAVYLLGTMLGGYNVAPLVELLDDAELGSLAAEALKKTLLVFDAFHDVADKAKAGNANAKAVLQSWADAEWFTSRKDVPEEIKITVFKVTGETNTDDLSPAQDAWSRPDIPLHANAMLKNERDGINPEKPGEVGPLSQIKELIAKGNQVAYVGDVVGTGSSRKSATNSVLWFFGDEIAHIPNKKDGGVCLGGKIAPIFFNTMEDAGALPVEIDVSNMNMGDEVTLKIDHAAAKVTAFKNGEQIAESELKTPVLLDEVRAGGRINLIIGRGLTAKAREALGLAPSTLFRTPVQPADTGKGFTLAQKMVGRACGLPEGQGIRPGTYCEPKMTTVGSQDTTGPMTRDELKDLACLGFSADLVMQSFCHTAAYPKPVDVQMQHTLPDFIMNRGGVSLRPGDGIIHSWLNRMLLPDTVGTGGDSHTRFPIGISFPAGSGLVAFAAATGVMPLDMPESVLVKFKGKMQPGITLRDLVHAIPYYAIKEGDLTVEKKGKKNIFSGRILEIDLTEMETDLTVEQAFELSDASAERSAAGCAITLSEEKVAEYLRSNITMLKWMISQGYGDARTMARRVENMEKWLANPSLLKADADAEYTKVYEIDLSEIKEPILCCPNDPDDAKLLSDVQGDKIDEVFIGSCMTNIGHFRAAGQLLEKVPSGSLTTRLWLAPPTRMDEHQLMEEGFYNTYGRAGARTEMPGCSLCMGNQARVAPNTTVVSTSTRNFPNRLGQGSNVYLASAELASVAAVLGKLPTPEEYQQYAAQIDSMSADIYKYLNFDQMGEYTNAADKVDTKKIAAAQLT

SEQ ID NO: 44608 - protein, 1501 aa, Acinetobacter baumannii
MAEVEQQPTSAPSSPKKRRILRSFLLTILIILLLLVASIIIMMSTDRGSRFLLDRVLQAQQVIKYEYEGGNLLRGIILKNIIVQLKEVDVTLDRADVRLGWRSLILEKEVHLSNADVRNLVIINKAPPSDKPFEFKPIKLPFVLRVDVGDVDHLEIKNSGSVVNFHDVHLNDALWSETKLKFENSSMDMGYLSVHNATGNMDFSGKYPLNATADLRIPSLKSLNIQNIKVAARGSLDTLQAGVATTTPDLLTGWVVLHPVRHEVPMQGALLLKNYHLPLLVEQKLFAKNGVIKFQGDIKQLNLALETDLKGENLPEGQYNALMNTDLVHQLNITDFNGQVMKGAVNLKGLVNWKDHVTWDIKGRLDHVNPKDKAIPQVVQDFLPPSLDAAVSSTGSLEKGTEVFANVDFDRYESWKLKLNQAPEKNKKPQPMFMNVAWANIDRAMPYIGWLSSDSGQVDLTLRDGQQDIKVSTKVYQHEQTLLPAGQYLATLNVKDNILNVPSFSFAAQKGSLTGQAKVLLPSEKRQLAWNALLNAKDFNPQSIHTAAPVNLLNGSIKASGFAKPNQQIIQLEKIDLKGRLAQAGQEMVALAGKSTAALLFNDVKAGGGFKGFAVNYDGSLKALNQANGLLKFSIAGTPEFIRISQLQHDGVAGKIYATGALNLKDRIAWDINSSLVRFKPQYFASSVKGEISGNVKTQGIWSDKLKRIDIQQLNLAGYLNNKPVRGKGNLSILMDSNQKGFLPQQFEANNLFLVYAQNQLQATGNAQNLKIKLNAPALYELYPGLSGRAYGDLSVQSQPRLKATANIAVDNFAFNTLVSIKKLRIQGELPTSETTPTQLTAKLDNLRSGSRQIQSAEVNLTGTRKAHLLKVQGNNNVSKFYVQLAGGFNAKNDWLGQIQKGSFDSRRIRLAQNQNAPVVFSSARSELYVGQHCWQSTNSQLCLDQPVRVSKAQGNISFVTQNLDLGDFAAFMPEGLAMTGQLNGYAKASWVNGGHPKLDARLVTRKGELGLAAEDPQDPPTTLAYDELSVIAKSISEGLLFRVDVKTPDIGTGYANVIINPYQSSMPMHGEVAFNDVQLKVLKPFIQDVRSMSGTLALAGKVNGTLTQPQFTGEMRLKNGAISMISLPVNLTNVQVYSSIHQDMATIDGAFNSGQGVGLLKGSFDWKNAPRLQLNLKGDNLLVRQAPLITAIANPNLTLDMYPFDKRLSLKGSVDVPRARISMPETTAPVVNTSSDVRIVRQGQDPLAILRAAKPWDIRADISVNIGNQVIFQGFNSNIPLVGRLNLTQRGYETAMRAMGAIGVSQKVKIEAYGQSLDLNRAIARFNGPLADPTLDIDANKNVQGSMVGVRVTGTASSPNIQVYNDAGLSEQEALNALVTGRINEGASGLSNAEGFKSDVNNTIAAAGISMGLGGTRALTNQIGRTFGLSGLALDAQGTGDDTQVSLTGYITPDLFIRYGVGVFTPVNKLTLRYQMNRRLYLEASQSLERAIDLFYNWRF

SEQ ID NO: 44609 - protein, 182 aa, Acinetobacter baumannii
MTPTQNVPEDRIQIGQLRSAYGLNGWLWVYSNTEPMSNMFDYLPWYIETKAGWQIVDVKRWKPHGKGLVVALKGVSDRTGAESLVGANIWIAKSQLPKADVDEYYWSDLKGLTVLGLDDDEQEVNLGQIHELFETGANDVMVVRATPDSIDSEERMIPWHKDVVQRVDLEAGRIYVNWGVDY

SEQ ID NO: 44610 - protein, 245 aa, Acinetobacter baumannii
VFFAVITLFPEMFEAITAYGISGRAAKRDIVQVTCINPRDFAEGNYRRVDERPFGGGPGMVMMAEPLHKAINHAKQLASQAGCVHVPVVYMSPQGKTLNEQAVQQFVDYDGLIVLCGRYEGVDERLIQHYVDQEWSIGDYVLSGGELPAMVLLDSIIRRLPNVMSDEQSAIQDSFVDGLLDCPQYTKPDQFEGLDVPEILKSGHHANIEKWRFLQRYQRTLERRPELIEQVTLTKQQKKWLSDEQ

SEQ ID NO: 44611 - protein, 122 aa, Acinetobacter baumannii
MSGKHPLVQAIENSQLKTDLPEFAPGDTVVVQVKVKEGDRERLQAFEGVVIAKKNRGLNSAFTVRKISSGVGVERVFQTHSPVVAKIEVKRRGDVRRAKLYYLRDLSGKAARIREKLPARKA

SEQ ID NO: 44612 - protein, 324 aa, Acinetobacter baumannii
  MISC_FEATURE (319)..(319): X=any amino acid
MKRNLIFFCAAILSGLSVSATHATNAEQVKSSFVYSTYAQTKYPLVFNHGMAGFNRVGTDTLGLDYWYQILPDLARNGGNVWATRVSPFNSTEVRGEQLAQQVEEIIAITGKPKVNLIGHSHGGPTIRYVAGIMPEKVASLTTIGAPHKGSPMADVILNVEGTPLSGLATLVNWFSAAITWAGGLDPNSYPHDSLAGAHSLSTQGSAQFNSQFPMGVPTTSCGEGAYQEKGIYMYSFSGNKALTNPLDPFDIALTGSSLVVDPFGDNDGLVSRCSAKFGKTIRDDYNWNHLDEVNQVMGYVLFLQQTLSRFTVNMLTVXNFKDY

SEQ ID NO: 44613 - protein, 83 aa, Acinetobacter baumannii
MVVIRLARGGAKKRPFYQIVVTDSRNARDGRFIERIGFFNPTAQGQAEKLRLDADRFAHWVSQGAQPSERVASLAAQAKKATA

SEQ ID NO: 44614 - protein, 301 aa, Acinetobacter baumannii
MTTKNQKISRRHISGVFLLNKPLGLSSNAALQKVRWLYRAQKAGHTGALDPLATGLLPICLGEATKFSHYLLDSTKRYQTTVRLGQTTTTGDVEGDILQERPIPVLSKELIEQTLEKFRGDIQQVPPMYSALKKEGKPLYELARKGIEIERETRPVTIYALELIEFTENSITLDVTCSKGTYIRVLGEDIGEVLGCGGHLTMLHRIQTGHFELIPSYTIEYLESLMEEQREALLLPVYAPIDHFLKIQVPEGREKYFCNGLESNIDHSAEAEVLVFSGERCLGLAEITDKKRLVPKRILNL

SEQ ID NO: 44615 - protein, 294 aa, Acinetobacter baumannii
MSSPSQKSQLHALGFLILAMLSVQSSASLAKVLFQNFPVLTVSAMRLCIGAFILAFIFQIWKINFSQVRWKAILSYGFALAGMNALFYLSLERLPIGIAVAFEFIGPLSVALYHAKQKYDFVWVTFAIIGLILLFPFNQAHSLDWIGVLFAMSAGACWALYIIAGQKPSGISGNHTVCLGMTVGACILLPITFFSGSIGQVIELPYFFYFIGLAVLASALPFSLEMLALRNLTPLSFGTLMSLEPAVAALSGFIFLGEYLLWNQWLALATIITASVGCTITTQRARQQREKTVS

SEQ ID NO: 44616 - protein, 387 aa, Acinetobacter baumannii
MRALTYHGAEDVRVETVADPIIQEPDDIILRVTATAICGSDLHLYRGKIPKTEHGDIFGHEFMGIVEEVGPAVTAVKKGDRVIVPFVIACGDCFFCQLDLTAACETTNTGRGAIINKKQIPPGAALFGYSHLYGGVPGGQAEYVRVPKANKGPFKVPGSLSDEKVLFLTDILPTAWQAVTNAQVKRGSTVAIYGAGPVGLLSAACAKMLGAEKIFMVDHNEYRLNYAAATYDAIPVNFDEVDAAEFIIQNTDNYRGVDAVIDAIGFEAKGSVIETVLTNLKLEGSSGAALRQCIAAVRRGGVVSVPGVYAGPIHGFLFGDAFDKGLTFKMGQTHVHQYLPQLLELIERGELTPETIITHRMKLEDAAEGYRIFNEREEDCRKVILLP

SEQ ID NO: 44617 - protein, 932 aa, Acinetobacter baumannii
LSAYQYNEQDDLIKATNEFAASYEYQYQAHLLTRYTDLTHRGMNLKWDGVLPSSKAIEEWADDYSSATKLDWDENVRVTSVMDIDGNVTEYYYGITGYTYRIIYPDNLQEWFFRDQAKNITSHIATDGTETSYTYDERGNVLSMVQADGSTFYYEYDEKDNLIGFVDAEQGRWFKEYDASGNIIKEIDPLKRETVYAYNAMGLVTSITDAKGGKKTLKYDDRGNLISYTDCSGKETKWHYDDRGRVKFIENALKQKVEYFYTELTTELRQPIAKGLPLNAFGQLEKIKHADGAEEHFIHDAEGRLLVHIDPKGQQTRYEYDAAGLITKRTDPLNQTLKYQWDRLSRLKRLINENGASYEFVYDAAGRLVKEIDFDGKETVYAYDEYNGRLTTSIEVASTYGQDFKDRAAPKDRIQQFIFDSMGRLEQRTAGYGYQGQELEEKQTEEFSYDGLGNLVQAKNAETNLQWFYDAAGNLIKEHHQDVVTQKTAVWKHVYDELNNRTTTIRPDGQKIDWLSYGSGHVYGMALNGEDVVSFERDDLHRETLRHYANGLSQQQSYDEVGRLTQQLMLSGHDKGYQAQTQNNAIQHTNQLIERLYHYDKTGELTLIKDTRRGAIHYKYDPVGRLLEATSKLGKETFNFDPASNILERYNSTKEQSSQHISDEKGYGYNRLVNNIVQEYLDQQYQYDAFGQLIDKVITGDLNLEWDVFGRLVRSRNIQYTAEYRYDALGRRIQKRSKHHHTGQEQNISYGWDGDTLAYESSADLTKHYFYEKDSFVPLLQAAYHHPIELHQTQDWSDKTYSIYKDPLWNTVKQSQGFDDVWFYHCDHLGTPQEMSDQTGAIIWKAEYKAWGECKLEQTNSDFFEKSEIISNNIRFQGQYFDEETGLHYNRYRYYSPYVGRFISKDPIGLLGGFNVYAYTANPVQWVDPYGL

SEQ ID NO: 44618 - protein, 254 aa, Acinetobacter baumannii
MFVDLNSDLGESFGSWKMGNDDQILPVVTSANIACGFHAGDPLGILKTVRKAVELGVTIGAHVSYPDLVGFGRRNMDLSRDELIADVLYQISALDGLAKVAGSKVQYVKPHGALYNTIAHDQAQAAAVIDAIKMYNPELVLVALAGSNLVEQARAAGLKVVSEAFADRAYNSDGSLVSRRLEGAVLHDSAFVASRVVSMLKNGGVESIDGVFTPIQADTICLHGDTDGALEMSAAIKAELVKNNIEIRPFVNKA

SEQ ID NO: 44619 - protein, 553 aa, Acinetobacter baumannii
MAQYIYTMNRVSKMVPPKREILKDISLSFFPGAKIGVLGLNGAGKSTLLRIMAGVDKDFSGEARAQPGIKIGYLEQEPPLDPTKDVRGNVEDGVREALDALERLDQVFAEYADPDADFDALAKEQEKLESIIHAWDAHNLNNQLEIAADALNLPAWDADVTKLSGGERRRVALCRLLLSKPDMLLLDEPTNHLDAESVSWLERFLKDFPGTIVAITHDRYFLDNVAEWILELDRGHGIPYQGNYTSWLEQKNARLEQEQKQEESFAKALKKELEWVRQNAKGQQKKNKARMERFEELNSREFQQRNETSEIYIPPGPRLGNKVVEVENISKSFGDRLLYENLSFTVPPAAIVGIVGPNGAGKTTLFRMMTGEQKPDTGTVTLGDSVKVAYVGQIRDTLDDNKTVWEEVSGGLDILKVGDYEIASRAYIGRFNFKGQDQQKRVGELSGGERNRLQLAKILQQGANVILLDEPSNDLDVETLRALEDAILVFPGTVMVVSHDRWFLDRIATHILSFEDEQPEFYTGNYTEFEAYRRAKLGDDAQPHRKKYKKISG

SEQ ID NO: 44620 - protein, 485 aa, Acinetobacter baumannii
MSLEPIPPQTFTDYVAYSERKRTRWERFLDKIKPRSAAMRTTILVLLVVLFSLFMSLWFFWRTLYLPEIQQHARYLAVELELVNNPNIRIFHRDSEVDVDTWLRNRVGIEYVTNPKEYPSVRDKIIAEFFTNQVEQKLANEIGAKDVTVYFQFKPSPRIWIQTPEMHGNWVREPLKTYANYSPELLVGWVVGVPLVSAIIILILVRQMNRPLRRLQNAANEYSKSGTAPYLDTNHGPLEIRQVNQAFNRMVYTLEQTERERRIMLAGISHDLRTPLTRIRLTAEMLPDEFLREGLVYDVDDMDAILNQFISYMRDGSDEELKDTNINILLQELVVQFKPLDIRFNMQDVPIIPARSLSLKRLIANLINNAKRYGAEPIELSAKVENEHILITVADHGEGIPEDQIEELMQPFVRGNSARTIQGSGLGLAIVKRIVDIHQGEIQIHNREQGGLEVIISLPIPKPAPEENTTHNPLEKIKQTLSERF

SEQ ID NO: 44621 - protein, 782 aa, Acinetobacter baumannii
MTDLVQQLASELAVRPNQVEAAIRLIDEGASVPFIARYRKEVTQGLDDTQLRQLDTRLAYLRDLYERREKVIQSLQEQNKLNDDLLARVNAAETKNALEEIYAPYRPKRTSKSFKAKEAGLGPIAEKIISEQIDPTEALAGFSHEDYPDVESQLDAIQHILIDDWAQNIPLTTELKATFAKTAVLKSTVASEEKKEVGKKFRDYFEFSEGLNKLPSHRLLAMLRGRQENVLGLKVDGEDDAPLARIETEYNLDQVQPQTRQDFLKQTAKLFWLGKVRPQIEHSLLTEKRLAAEAEAMQVFAENLRHLLLSAPAGSRTTLGVDPGIRTGVKLAVVSEAGDVLAHSTIYPFAPKEDKEGSIAELARLCREYNVELIAIGNGTASRETEAVVAEMMAANTDLKLTRVTVSEAGASVYSASELAAAELPELDVSIRGAVSIARRLQDPLAELVKIDPKSIGVGQYQHDVNQTGLAKTLDAVVEDCVNAVGVDVNTASPAILAYIAGLNKAIAQQIVEYRKEHGRFDTRQALKNVPRLGERTFEQAAGFLRIQNGSEPLDASAVHPESYGLVEKIVAAKATTVKDIIGNTEIIRQVKAEEFVDDKFGLPTIQDVLAELEKPGRDPRPEFRTAKFREDITEVAQLTEGMQLEGVVTNVTNFGAFVDIGVHQDGLVHISELANEFVSDPHKVVKPGQIVQVRVMQVDVERNRVNLSMRAEGAAPVKAQRPPRREQNNEQRSERKPQGKRPQPRKDQVERPQRSKQEKPQEQKIGGFGALLLQAGIKGSK

SEQ ID NO: 44622 - protein, 713 aa, Acinetobacter baumannii
MMTKINYQPWLQAVLTIAKHYRIEPSEERIRLQLDWNQNQNLDNVLQLMTRQVGLNLRKAPFSLDLLNPWRLPVMVEFNDGQVGVIDKADTQGNVSIQFSGDQGLSQSLSLDALKTTLKNVYILRPETSIPDARIDEYIKPYEANWFWSIVLRDWKRYVDIMFASLIANVLALATIIFSMQVYDRVVPSQSIPTLWVLAGGVLIAALFEFTLRVSRVYLSDIIGKRADLRVSDRVFGHALRIKNKDRSKSTGSFISQIRELEGVRELVTSTTISAIADFPFFFLFLVIFAIIGGKLFWVMLLVVPLMILPGILVQKKLAQLAQEGMRESSIRNAILVEAVQGIEDIKLLRAESRFQNQWNHMNEVSADIGMRQRKIVGTLMAWTQMVQGLTYAIVVLVGCFAVMDGEMTTGALVACSILSSRMLGPIAQITGVLGRLQQAKVAKQSLDELMQRPIDQADRSHLVHKAVLNGDYELKNILFQYGEEDPRPSLAIRHLKIRAGEKIAILGRNGAGKSTLLQLLSGMQVPTQGAVHLDGLDLSLIDPSDVRRDMGLLNQNAHLFYGTIRENLTLGAPLATDEDILRALVVTGALSFVQEKKEGLDYLVLEGGVGFSGGQKQALLLARLLIRQPNILLLDEPTAAIDDVAEKQLIDHLKGWLAHRTLVVATHRRAVLELVDRIIVVNEGKIVMDGPRDQVLNQSTAQQKQVSQGGNS

SEQ ID NO: 44623 - protein, 881 aa, Acinetobacter baumannii
MNSAEIMADLSNHTPMMQQYLKVKKDYQHALLFYRMGDFYELFFEDAHLAAKLLGITLTHRGKANGNPIPMAGVPYHSAEGYLARLVKAGRTVAICEQVGEVTGKGPVERKVVRILTPGTLTDDALLTSYQSSNLVALCIHQNQIGFALLDLSAGIFKVQQQDYKPEQLPIELARLMPSEILIDEDLVDPNIIEQIKKHLDCPVTKRPNVDFNLNNAQKTLCDQFSVSTLSGFGLDPLPLAKAAAAALIHYAKETQKTALPHIRSILLEQSSDFIALDPITRRNLEIIEPLFEHGTSLFQLVNDCQTAMGGRLLSRTLMQPVRDTALLDARLDAIEQLIQGYHESPVRLVLKEIGDIERVLSRVALGSARPRDLVQLRHACAQIPFLRNALAPVVQAKKSKLLGQLDQELGDFKSLHQHLMAAIVENPPVLLRDGNVIAEGYDAELDELRQIRDHAGQFLIDLEIKERERTGISTLKIGYNRVSGYYIELTRAQAEQAPADYIRRQTLKNAERYITPELKSFEDKVLSSESRALAREKALFEALLENLRENIAHLQMMSSAIAQIDVIANFAHQARLNNWARPEFTPETGIKIQGGRHPVVEALSKAPFTPNDTFLDVQHRMAIITGPNMGGKSTFMRQTALISLLAYCGSYVPARAAKLGPIDRIFTRIGSADDLSTGKSTFMVEMTETSQILHHATNQSLVLMDEVGRGTSTYDGLSLAWACVVDLTKRVKCLCLFATHYFELTELGSEPGIDNYHVTAQELNGNLILLHKVQQGPASQSHGLQVAKLAGIPANVIKEAQKRLRILEKQQQQHLQTSVQSDLFATLDSEVTPSTQVIEKVIEVEVSSPALDLLKQIEVDNLTPRQALEQLYELKAALNS

SEQ ID NO: 44624 - protein, 310 aa, Acinetobacter baumannii
MTKPEAQYQSGQFQFSFLSLKYWGIWFTAFILMFLAYLPWAIQWRLAKLFSKIAWTLLGSRRKTTLRNLGACFPEKTPEQIEAKAKSVFTDTMIGIFEALNAWYCPAWFKKRVHIEGLEHLNDNRDRGILLLGTHSTLLDAGGAACTLFFDMDVVYRPQNNPFMDFLIHRSRARVYKNQIAKDNMRSLIEKLKNGHAIWYSPDQDFGLKQGVMASFFGIQAATVTAHRRLMDISNAVAIPLYFYRSGDIRDPQYNVLVEPKLENFPSECEVNDAERVNKIIENQIRIAPTQYMWFHRRFKTRPAGEAKFY

SEQ ID NO: 44625 - protein, 107 aa, Acinetobacter baumannii
MTFVVTENCIKCKYQDCVEVCPVDCFYEGPNFLVINPDECIDCALCEPECPANAIFSEDELPEGQEVFIELNAELSQKWPNITQIGEQPADREEWNGKPDKLQYLEK

SEQ ID NO: 44626 - protein, 103 aa, Acinetobacter baumannii
KVGELAKQTGLTVRALHHYDDIGLLQPSARSDAGYRLYTPKDITRLHQIQALRGLGMSLAEIYTVLEDPNLALLPIIDRQIQAIDQRLAEQKKLRNQLGQLKS

SEQ ID NO: 44627 - protein, 274 aa, Acinetobacter baumannii
MPELPEVETTKTSLFPLLNQKVLSVEVRNPSLRWPIPDNVQKLVGQRLIGLNRRSKYILAEFEQDQMLWHLGMSGSFRLCQPNDELRKHDHLIIQFEDQQLRYHDPRRFGCILWLNPETQGKLIDTLGPEPLSTDFHAEYLAFKLKNKSVGIKIALMDNHVVVGVGNIYATESLFNVGIHPAQPAGDLTMQQIEKLVVEIKRILKSAIDLGGSTLRDYSNAMGENGYFQQTLLAYGRAGEMCVNCETTLENLKLGQRASVFCPQCQPLKKLRKP

SEQ ID NO: 44628 - protein, 571 aa, Acinetobacter baumannii
MRASRFLFATLRETPNDAEVISHQLMLRAGMIRKLASGLYTWLPMGTRVLKKVDAIVREEMNRSGAMEVFMPVTQPASLWEESGRYEQYGPELLRFKDRHDNPFVLGPTHEEVITDLARNELKSYKQLPVNFYQIQTKFRDEIRPRFGVMRSREFIMKDAYSFHATQESLQETYDVMYDTYSRIFTRLGLDFRPVQADTGSIGGSASHEFHVLAASGEDDIAFSTESDYAANVEMAEAVLVGERAAPTQEFKLVETPNQKTIADVCQFLNADPKQSVKALLVQGVADEKGNVPVVALFLRGDHELNEIKAEKHPLVAAPLAFATEEQLQAFGLTAGFTGPQGLVEKGITVIVDRAASVLSDFVAGANEADKHAVGVNWERDAQITEVFDLRNVVEGDPSPDGKGTLQIKRGIEVGHIFQLGTKYSEALGCKVLGEDGKPFTVTMGCYGIGVTRVVAAAIEQNYDDKGIIWPQAIAPFEIAIVPMNAHKSPRTLEAAEALYAELQAQGFDVLLDDRNERPGVKFSDLELMGIPHRIVIGEKGLDAGTFEYKGRRDAEASNLTKEELLAKLAR

SEQ ID NO: 44629 - protein, 1032 aa, Acinetobacter baumannii
MWFTRISVKYPVFTIMMMLSLMVLGLASWKRMTVEEFPNIDFPFVVVTTQYAGASPEAVESDITKKLEDQINTISGIKQITSRSSEGLSMVIAEFNLDTSSAIAAQDVRDKIAPVIAQFRDEIDTPIVQRYDPSSSPIMSVVFESNSMSLAQLSSYVDKKIVPQLKTVSGVGNVNLLGDAKRQIRIKVHPEQLQSYGIGIDQVINTLKNENIEVPAGTLQQKNSELVVQIQSKVIHPLGFGDLVIANKNGSPIFLKQVATVEDTQAELQSSAFYNGRTAVSVDILKSSDANVIQVVDKTYQTLEKLKAQMPAALNYKVVADSSKGIRASIKDVVRTIIEGAVLAVLIVLLFLGSFRSTVITGLTLPITLLGTLTFIWAFGFSINMMTLLALSLSIGLLIDDAIVVRENIVRHTELGKDHVTAALDGTKEIGLAVLATTLTIVAVFLPVAFMGGLIGRFFYQFGVTVSTAVLISMFISFTLDPMLSAHWKDPVKKKESRLQRFFNYISNLLDGLTHIYEKLLKLALRFRFITVIIAIVSLVVALGLSKMIGTEFVPTPDKGEIRIQFETPVDSSLEYTQAKLHQVDQIIRQFPDVVSTYGVVNSEVDSGKNHAGLGVTLKPKQERSADLTTLNNEFRDRLQSVAGIRVTSVAAAQDSVSGGQKPIMISIKGSDLNELQKISDRFMAEMEKIDGVVDLESSLKEPKPTLGVHINRVLASDLGLSVSQIANAIRPLIAGDNVTTWEDRDGETYDVNIRLNENKRVLPQDVQNLYLNSNKTNANGQNILVPLSAVATTQEKLGASQINRRDLEREVLIEANTSGRPSGDIGQDIDKMQKAFKLPAGYTFDTQGANADMAESAGYALTAITLSIVFIYIVLGSQFNSFIHPAAIMASLPLSLIGVFLALFLFRSTLNLFSIIGIIMLMGLVTKNAILLIDFIKKAMEDGISRYDAILQAGKTRLRPILMTTSAMVMGMVPLALGLGEGGEQSAPMAHAVIGGVITSTLLTLVVVPVIFTYLDDLKNFMLRQTRRFMS

SEQ ID NO: 44630 - protein, 240 aa, Acinetobacter baumannii
MSLLAFSSYALNGVDAQKFLQGQVTVDTERLAENETRYTAICDLKGRIHFGLWLKKNNAESFEIIVTQDQAEEFAKHIKKYGAFSKMTLSEQGAVFPKVVNGHTEFSSTETDISEWQKQAIMTGQAWIAQATEHEFQPQELRLHQREGVNYDKGCYLGQEIVARLWFKAKPKHWLHLVQGTGDSPAPATQLHNDVEVVNSTQTTDGYIALVVAKPAALQELGLQVLDLPEALSGDVARPQ

SEQ ID NO: 44631 - protein, 178 aa, Acinetobacter baumannii
MAANGFIELLRLSKRGNKNYASVQNEAQRWSGIAFEMRGQYFVAPLGEVSEVIYPPKYTPVPNTQSWVKGLANIRGRLLSVSDLAHFISGQRSSFSSTQKVLCISHHDQYVGLVVDQVLGIQHFNKKSFFSESLDLEENLKEYCQGYFHQHNQHWHVFLFSRLLQNPHYMNASTKFIN

SEQ ID NO: 44632 - protein, 351 aa, Acinetobacter baumannii
MTMNIQQALNHITKNIHLTQPQMEEIMRSIMQGEATEAQIGALMMGLRMKGESIDEMTAAARVMREFAIKIDVSDIKHLVDIVGTGGDGQNLFNVSTASSFVIAAAGATIAKHGNRGVSSKSGSSDLLEQAGIHLDLDMQQTERCIREMGVGFLFAPNHHKAMKYAAGPRRELGIRSIFNLLGPLTNPAGVKRFVIGVFSDELCRPIAEVMKQLGAEHVMVVHSKDGLDEISLAAPTTIAELKDGEITEWTLNPEDVGIESQTLNGLVVADATASLKLIKDALSKNKSDIGEKAANMIALNAGAGIYVAGITKTYAQAVAFAQDIIYGGQALEKMSVLAEFTKTLKQSQAD

SEQ ID NO: 44633 - protein, 268 aa, Acinetobacter baumannii
MINIQNTILGKIVDRKHEELAARLKQRNLQDVEELAKAATPVRGFANALQHKRPGVIAEIKKASPSKGIIRADFNPAEIAEQYEQAGAACLSVLTDVDFFQGADENIAIARNHCALPALRKDFLVDPYNVVEARALHADCILLIVACLSDQQLEEMSKTAFEHQLDVLVEVHDEEELERALKLSEQCLLGVNNRNLKTFDVDLNTTIRLKKLLPASRLLITESGIATPDDVRMMQEHDIHSFLVGESFMKQPRPDQAFTALFGQPQTV

SEQ ID NO: 44634 - protein, 303 aa, Acinetobacter baumannii
MSKNLATLIGLSAILMWASMVGFVKHITTAIGPDVGITLIYSLSALLLLIIFRVPNFKLISKKYLILGAILFIAYELCFSFALAYSKTAQQAIEVSIVNYLWPSLTVLAFVIFRELKFNVFIILGLLISISGIIFIQTGNGDFSLGRVVDNFHSNPLSYILAFIGAIIWAFYCVLTKKMGKGQNPISIFFLGVALTLWLKLLFSGQVSLPSLDLNTILSLIVASAAIGLGYAAWNIGIIHGNITMLVVASYFTPIISSLLAMLVLQTELSISFWQGTAMVTAGSLICWLSTNWAVIRSYFRIN

SEQ ID NO: 44635 - protein, 791 aa, Acinetobacter baumannii
MNQTIDLNISKKSAKAGDSIPHESAHLHVTGQATYIDDLPELENTMHLAVGFSNCAKGKISKFDLDAVRQADGVHAVFSAKDIEVENNWGPIVKDDPIFAEEQVEFYGQALFVVVAESYQQARQAVRLAKIEYVPETPILTIQDAIKKESWVLPPVEFSHGEVEQAFQNAAHQLSGAIELGGQEHFYLEGQISYAIPQENQSLKVYCSTQHPTEMQLLICHALGMNMHQVSVESRRMGGGFGGKESQSAQWACIASLAAKKTGRPCKLRLDRDDDMSATGKRHGFAYEWSVAFDDTGILQGLKVQLASNCGFSADLSGPVNERAICHIGNAYYLNAVELRNLRCKTNTVSNTAYRGFGGPQGMFVIENIIDDIARYLGCDPVEIRQRNFFAEQPGGGRDRMHYGAEVRDNVAPKLVAELLQSSDYAKRRQTIHAFNQNNDIIKRGIALTPLMFGISFNAVHYNQAGALVYVYMDGTVAITHGGTEMGQGLYTKVRQVAAHELGLPIDSVRLIATDTSRVPNTSATAASSGADLNGKAVQNACIKIRERLAKLAAEISQSEADQVQFEDSMVSTANGHSWTFPDLVQRAYMARVQLWDSGFYKTPEIHYDQVNHLGRPFFYYAYGAAVSEVAIDTLTGEMKVLRADILHDVGQSINPAIDIGQIEGGFVQGMGWLTTEELYWQPQGPHAGRLFTHAPSTYKIPTSVDIPHIFNVKLFNNQNQADTIYRSKAVGEPPFMLALSVFSAIRQAVQAAIPENAPLVLNAPATPEEILRAIAIGRGQALAARPQAKM

SEQ ID NO: 44636 - protein, 244 aa, Acinetobacter baumannii
MTQERKVALVTGASRGIGAAIAQQLIQDGYFVVGTATSESGAQKLTDSFGEQGAGLALDVRNLDEIEAVVSHIEQNYGPVLVLVNNAGITKDNLLLRMSEDDWDDILNIHLKAVYRLSKRVLKGMTKARFGRIINISSVVAHFANPGQANYSAAKAGIEAFSRSLAKEMGSRQITVNSVAPGFIATEMTDALSEDIRKKMSDQVALNRLGEPQDIANAVSFLASDKAGYITGTVLHVNGGLYMA

SEQ ID NO: 44637 - protein, 328 aa, Acinetobacter baumannii
MSAKRLEQVALATKTAFVFPGQGSQKVGMLAELAEQFSGVGQTFAEASDALGFDLWHIAQSGEGLDQTENTQPVLLTASIALWRLWLDLGGLAPKYLAGHSLGEYSALVAAGSMSLADAVKLVNLRGKLMQNAVPQGEGAMAAILGLADDKVVELCQSVSALGQGSVEAANYNSQGQVVIAGSTASVQQVMALAKEQSAKAIALPVSVPSHCSLMKPAAEKFAEALEQTAIELPTIPVIQNVNAGIATDVAQLRQALTAQLYQSVQWTRTMQSLQDQGIQYIVECGPGTVLSNLAKRLPNIEKAFSIDSKSKMEDALNAVLVAEGKIA

SEQ ID NO: 44638 - protein, 385 aa, Acinetobacter baumannii
MSLLDHFATELDELKRQGNFRQFTQNVQHGRFITIQNKTMLNLASNDYLGLAADIDLRQEFLDYYPLERSYFSSSSSRLLTGNFDEYEQLENSLSQAFGGRAALLFNSGYHMNIGILPAVADSKTLILADKLVHASMIDGIRLSGAQYVRYRHNDFQHLEQLLQKYHDDDQIERIIVVTESIFSMDGDETDLTALVQLKKRFAKTMLYVDEAHSIGVRGQQGLGCAEQYNVIQEIDFLVGTLGKALAAVGGYIICHPIIKDYLINKMRPLIFSTAQPPIVMAWANFIFKKVLMAQSQREHLKNISQYLQQAVVQKGYVSPSTSHIIPVIVGESQATIDKAKQVQESGFYAMPVRPPTVPKNSSRLRISLTSMVEQHELEALVSFL

SEQ ID NO: 44639 - protein, 426 aa, Acinetobacter baumannii
MTDNFDLEHIWHPYTSMTQPLPTFKVKRAYGATIELDDGRTLIDGMSSWWCAIHGYNHPELNQAVTDQLQNMSHIMFGGLTHDPAIELGKILLKITPPSLDKIFYADSGSVAVEVALKMAVQFWTAQGQPQKTNFITTRSGYHGDTWNAMSVCDPVTGMHQIFGTSLPNRLFVAAPQTKFHEEWNQEDIAELEQAIQQNHENLAALIIEPIVQGAGGMRFYHPEYLRQAKALCEKYHLLLIFDEIATGFGRTGKLFAWEHAQVEPDIMCLGKGLTGGYMTLSATLTTKHVAETISRGEAGVFMHGPTFMANPLACAVALKSTQLLIEQDWQANIKRIEQQLSQYLMSLNQLDYVADVRVLGAIGVVELTFNVDMKTLQQQFVERGIWIRPFGKLVYVMPPYVITQQELSDLLEQLVEVVKTMQGAH

SEQ ID NO: 44640 - protein, 469 aa, Acinetobacter baumannii
MFDTLTERLTQSLRNVTGSGQLTEDNIKDTLREVRMALLEADVALPVTREFIAKVKEEALGQEVMTQLSPGQAFVKIVYDELTKMMGEANETLDLSAKPPVVVLLAGLQGAGKTTTAAKLARFLKERQKKKVMTVSADVYRPAAIKQLETVSAEVGAGFIPSDPSEKPIDIVNRAIEQAKIQFADVLIVDTAGRLHVDEDMMDEIKELHAAVKPTETLFVVDAMTGQDAANTAKAFNDALALTGVILTKTDGDARGGAALSVRAITGKPIKFLGMGEKLDALEPFHPDRVAQRILGMGDVLSLVEEVERKIDKEKAEKMAKKLQKGGSFNFEDMLMQFEQMKKMGGMMGFLDKLPGMSSAGIQQAIEQANPEKQVKKMEAIIQSMTIKERRNPDLMNPSRKKRIAAGCGMDVAEVNKLIKQQAQMAKMMKKFANPSGMSKMMRSLGNMQKQFGGGGGMGPLFGNNDQKK

SEQ ID NO: 44641 - protein, 269 aa, Acinetobacter baumannii
MISLPLVYTILALIAYTTSFWYLFIRLMSKREPNPWLFAFVTTLALLLHGTVLCHAMLTPSGINYDVFNLVSFTSGLMLLLSLVFSTFRPIVPLNLLGIPVAAIGLILGFAFSRPDQFIEQHSLGLDTHIILSLSAYAVLLMATIHAILIWFQNRELKKKQKKRIWVNLLPSIQAMESLLFDLIITGFILLTIALAFGFLTVDSFFAQHLAHKTVFSIISWFIYGSLLIGHYKLGWRGQKAIRFTLIGFALLAIGFIGSKFVLEMILGR

SEQ ID NO: 44642 - protein, 307 aa, Acinetobacter baumannii
MSEKLQKVLARIGLGSRRYMEEVIAAGRVSVNGRIAQVGERIEPGDELRIDGRKVQFQIEDEIRRRVLIYYKPEGEICSRNDPEKRPTVFDHLPQIANDRWVMVGRLDINSTGLLLFTNDGELANRLMHPSNEIEREYAVRVMGEVTPQLRQNMVNGVELEDGPAKFESFSEIGGEGINRWYQVVVKEGRNREVRRIFESQGLKVSRLLRTRYGTVILPRELRTGRWMELDKTDIDNLAKSVELKPRQGTGLFGMAKRRTERMTEKPMAARRGGYLRQQRRDDEKEAPANTGNQRKSTGFNRGFKKF

SEQ ID NO: 44643 - protein, 683 aa, Acinetobacter baumannii
MVNKIMAITSVIEQMRQLIQLIAKHNHAYYVMDQPTISDSEYDHLFHQLKALEEQYPELVQADSPTTKVGGQALSKFESVTHVVPMLSLGNVFNQEDLFAFARRVEERLPNQKVQYEVELKLDGLAISLWYENGVLVRGVTRGDGETGEDITQNVKTIRNLPKVLHSEKYEIPRLLEVRGEVLMPKSGFEKLNADQEAKGEKTFANPRNAAAGSLRQLDPNIAAARPLAFYAYGIAQCEPNHGLTTMHDSLQWLTELGFQIAERQYLCNSIQEVQQRYEQIQQERPNLQVEIDGMVVKVDDLKQQQQLGFLSREPRWATAYKFPAQAALTTVEQIDWQVGRTGTLTPVARLNPVFVGGVTVSNVTLHNIGEIHRLDVRIGDTVSVYRTGDVIPKVEKVWPEFRPAEAEVVHLPESCPVCASPVVMPEGEALARCSGGLYCAAQRIEAIRHFVSRKAMDIEGLGDRWVESLLRLDLLKDVADIYHLHEHRETLLGIEKMGEKSVQNLIDAIEASKKTTLARFIYALGIRGVGETTARMLANTFQTLEALKAANVEALKKTPDVGDITAEWIADFFLAPHNIEVLDRLIAAGIHWDAPTAPTRQPLNGESWVLTGTLEQMTRDQATQMLQALGARVSGSVSSKTKCVVAGEKAGSKLEKAAKLGIPVMNETDFLSLMAGYGQTLS

SEQ ID NO: 44644 - protein, 1149 aa, Acinetobacter baumannii
MRLSSLKLSGFKSFADSTTLNFKANRTAVVGPNGCGKSNVIDAIRWVMGESNARQLRGGSMQDVIFTGTSKRKPVGVASVELRFDNTYGKLGGAYNAYNELAVRRQVTREGKSEYFLNGTRCRRRDITDIFLGTGLGPRSYAVIEQGMINRLVDAKPEEMRIFIEEAAGVSRYQARRRETLQHLEHTEQNLSRLEDIALELKSQLKTLKRQSEAAVQYKTLESQIRTLKIEILSFQAEKSVRLQEEYTVQMNELGETFKLVRSELSTIEHDLESTSALFQRLIQQSSPLQQEWQQAEKKLSELKMTLEQKQSLFQQNSTTLVQLEQQKAQTKERLQLSELQLETLNSQLEEQTEALTAIEHTAAEAEQSFAGLQSQQRQAQQQFEQVKAQVEKQQQQKMQMSAQIEQLGKNVQRIEQQKETLQHQANQIQSQVHEDEQGELEQLQQQLCREISTLEAEIEQYVQRIEQAQQAHQVNKNQQQTLKTEIQVLLSEQKNLSQLVAKQSPKQNQDTLRLMQALELTEQGKPHAQIIEKFLAKWLQAHIVETEQAFQEGVARQLKPSEQSSKFKGNLICLNDWIASPQLSIFSNVAIAQDLSHALNEQKQLQYGQSILTLDGYHVGQDWVIALMYDDESQSAQGMLSHRIRLDEIEQVLQKQQPELQALDQIIVQQKDELGQLQVDLQQKQQVIKQKQKDLQQLDVQIAKQQTAAQAFLLQKQQLKDQLAQLDTQLEEDAMQKDDLEIDLHALAMKLETILPDYKTLQFQVEELTEQLEEQQQVLQQQQQEREILRRNSTQTTQQIELLEKDISFLQSQYQQITAQMEQAKKFVDPIQLELPNLESEFQQQFAQTEKLQKTWNEWQIELNSVQEKQQTLTDQRHQYQQQDEKLREQLEAKRLAWQAAKSDREHYQEQLKELNAELQTGLKIDLTEHQQKLEKVQKQFEKIGAVNLAASQEFEEVSQRFDELSHQIQDLENTVTQLKDAMKSIDQETRKLFMSTFDQINQELQNLFPKVFNGGEASLSLEDDWQSGVKLMARPPGKKNSSLALLSGGEKALTALALVFAIFRLNPAPFCVLDEVDAPLDDANVQRYCNLVKELSEHVQFIYITHNKLAMTMATDLLGVTMPEPGTSKLVTVNLEQAKEYGLVSES

SEQ ID NO: 44645 - protein, 391 aa, Acinetobacter baumannii
MANRKLKIGIVVGEVSGDTLGVKLMRSFREQGIDAEFEGIGGPQMIAEGFNSYYPMETLSVMGIVEVLKDLKKLFAVRDGLINQWTQHPVDIFIGIDAPDFNLRLSKSIKEKNLPIKTVQYVSPSVWAWRQGRVHGIKQSIDLVLCLFPFEKVFYEQYEVPAAFVGHPLAKQLPLENPIQIAKQELGVDENQKHIALLPGSRKGEVERLLPMLLGAANILHTKYPDIQFLIPAINDARKQQIEQGVEQLAPQLKAKIHILENTDSESKIGRMVMNASDIIALASGTATLEAMLMHRPMVTFYKLHWLTYLIAKFLVKIPYYSLPNIIAGKKVIEELIQADATPENLAAEIEKLMNVETAQIQVMQHLTMHKQLISGNTEDPVQAILQCLNS

SEQ ID NO: 44646 - protein, 199 aa, Acinetobacter baumannii
MAKFRIDLLRHGESQYSHTLRGHLDDELTAKGWQQMQATIEQVSNQPWDVIVSSSLKRCVCFAEQLAKTAELPLLVNHDLKEMYFGEWEGISTQQIYETSPELLANFWQKPSQYCPPRAETLDQFQTRVLKGFQDLLEHMQKQNLQHALVVTHGGVIKLLACLARQQPLDDLLKMPAELGKLYSLEFSETDGQLTFKLR

SEQ ID NO: 44647 - protein, 215 aa, Acinetobacter baumannii
MSRSRRSDGDLTKTKIIEAAGPLIAQYGFAKTANKTIAKVANVDLAAINYHFDGRDGLYQAVLMEAHAHYLDEQYLLELVESTYPPEEKLSLLLETLLHKLTEKDVWHGKVFIRELFSPSEHLLNFIELTGMRKFFLIRKLISQVANLDENDPAVLPCILSVMTPCMMLIIAGPNAQAPEPLKNIAQMPLHDLVEHFKKFSLAGLKAISQSNLKN

SEQ ID NO: 44648 - protein, 585 aa, Acinetobacter baumannii
MIDSKAVVQAHNLFMTFKAENKNSADISAIVDLNMQIKKGELAALVGPDGAGKTTLLRLIAGLYKASSGSLHVLGFDIEKHPQVVQDRISYMPQRFGLYEDLSVQENLNLYADLHGVPKNVRNQRFKRLLEITDLTQFTQRLAGQLSGGMKQKLGLACTLVRSPELLLLDEPSVGVDPLSRRDLWIIIEQLVQEENLSVIISTAYMDEAEKCAYVYIMHEGKILRQGSPEQLKALVHEQTWQIKPSEQIKTRIVQAQLLGNSGEIIDAVPRGEQVNFISRQKELSTNILPLGLVANRRPPELEDAFMMLLQQNQKQQISISQQAFRSEQNNNSQSDQAVIVVKDLVRTFGDFTAVANTSFTVQRGEIFGLLGPNGAGKTTTFRMLCGLLPASSGYLEVAGKNLRTARAEARAKVGYVSQKFALYSNLTVLENLKFFGGAYGLSGKKLNQQIDKALQQYDLKPQIKSGDLPGGYKQRLSMAAALLHEPEILFLDEPTSGIDPLARRLFWYSIGKLANQGITIIITTHFMEEAEYCDRIAILDAGKLLALGSPQQVRELASKDKHIVDMNEAFIAIVEQARALRHAG

SEQ ID NO: 44649 - protein, 718 aa, Acinetobacter baumannii
MQRTTKHFQINALALAIAMSTISAHAETDQQTSEYGTLPTIKVKAGSGQENEKSYIAGKTDTAVPLGLSVREVPQSVSVITQQRLQDQQLSTLVEVAENVTGVSVNRYETNRGGIYSRGFVVDNYIIDGIPTTYSLPWSSGEIFSSMALYDHIDVVRGATGLTFGAGNPSAAINMVRKRATSTEPTANVEVSAGSWDNYRVMGDIANSLNQSGTVRGRAVAQYEQGDSYTDLLSKEKLSLLLSAEADLSENTLLSGGVTYQEDDPRGPMWGGLPVWFSDGTKTNWSKNITTSADWTRWNVKYTNLFADLTHKFNDNWSAKLSYSHGKRDANSKLLYVSGSVDKNTGLGLSPYASAYDLEVEQDNASLQLNGSFDLWGLEQKVVLGYQYSNQDFTAYARSTDTKMEIGNFFEWNGSMPEPVWNAPTLNEKYNIEQNALFAATYLNPIEPLKFILGGRFTNYEKNIYGRSSSIKYDHEFVPYAGIIYDFNDVYTAYASYTSIFQPQDKKDFDGNYLDPVEGNSTEVGLKSAWFDGRLNGTLALYHIKQDNLAQEAGDVTRNGVKEIYYRAAKGATSEGFEVEVSGQITPDWNITAGYSQFSAKDTNDVDVNTQLPRKMIQTFTTYKLSGKLENITVGGGVNWQSSTYINAENPKEVIEKVEQGDYALVNLMARYQITKDFSAQLNINNVFDKKYYGVFPAYGQITLGAPRNAALTLQYKF

SEQ ID NO: 44650 - protein, 868 aa, Acinetobacter baumannii
MNIAAQPPVQADQTVYLKDYQKPAFLVESINLDIQVYDDKTIVDSTLVMKRQTAGDLVLLGRDLELQSIQLNGQDLTPAQYSLDSEQLVITDAPDEVILQTQVIIHPETNTQLEGLYKAGDLFVTQNEPEGFRKITFYPDRPDVLSVFTTRVEADKKYPVLLANGNLLETGEVGENRHFAIWQDPTKKPSYLFACVIGDLAVLKDRYTTSEGRDVALEIYAIEKDIPKCHIAMEALKHSMRWDEEHYGRAYDLDNYMIVAVSQFNMGAMENKGLNIFNTSCVLADEEYTTDAAIMRVQSVIAHEYFHNWTGNRITCRDWFQLCLKEGLTVFRDQSFSEDLQSAAVQRIDDVAVLKSHQFPEDAGPLSHPPRPDHFVEINNFYTATVYEKGAEINRMMSTLLGKEKFRQGTDEYFRRHDGQAVTVEDWVAALSAGSGVDLSAFLTWYNQPGTPKLEAKGEYDAAAQTYRLSFKQSLKAHPKYPNLKAVPIPVALALFNAKTGEQYTLQNESLFVNGVKDGVYLFDQDEATIEFTGVTEQPVVSLLRNFSAPVNLVFDYSDEELAFLIQHETNGFNQWQATQTLLERILLEDHSADTYIQAIQSTLPELVGRDPLLASRLFDVPTEGYLGSRIDQNYAPADIHVKREALLNRLAQELGSFWKDTYLTLDPDLQKEFSLAMGVRALKNIMLMMMARQGDQSAFELAYDQYQSTGNMSERLGALRVLVWQSAPQAQEALADFYNRFKDEALSLDQWFMIQAANPNATVETIEYLTQHPDYDLTTPNRIRAVSGGLSNNPENTWGFGVAHFINLAEYLDEKNPILGSRLLQVLSRWYTLAEPQRTQVQQALQALQPKVKSKNVSETLNSMLSV

SEQ ID NO: 44651 - protein, 665 aa, Acinetobacter baumannii
  MISC_FEATURE (140)..(140): X=any amino acid
  MISC_FEATURE (143)..(143): X=any amino acid
  MISC_FEATURE (155)..(155): X=any amino acid
  MISC_FEATURE (216)..(216): X=any amino acid
LDEKQIELLRNGSSGNIATVLAKAVPGLSDSSRTITDYGQTLRGRNALILVDGVPMNLTRDTSRGLSAIDPESIANIEVIRGSNAIYGGGASGGIISITTKAAGSEPTAKTVVGLQTPLTNFRSNALKWRYSSIFHRQLXRFXLCTRLWLSAYWXPYDASGDRVLQNQVRAIYMILTAIASAVSLVIILMTTNMSSLLQTTIMPSKIQIMHLTQVXRNAPAGTVPAKAIKGLKLKDQNKNENQIYNLTYNHKDFFGNKVDAQIYYRDFFTRFSPFDARKNPNRGGNVDQIYQENNILGSRLTVTTPLEFLGDTSLVWGGDFSREKSEMPLDTFNPDIYDQSGGLDFVKTGKLIYLPELTTQSVGGFVQLKHRFNDQWSAEAGTRYEDSYAQIDSFIPLSQFDPKTQSYKPNPYVYQGGKVKADAWLYNANVTFSPNDQHSIYASFNQGFQLPDVGVIIRNADNTDKEKNYELSSSFLEPVKVDNYELGWKGNFNNFSSSLAVFHSTSDLGAVQSFSNGLALTRTKEKVTGLEATFDYLDDANVWGTGGSVTWMKGREKPQNGAEQDMTGFRIPPLKLTGYISYSPTETWTNRLQATYFGSEDYRLNGKNSFGRYDVKSYTTADLISSFALNKKDTMTIGLENMFNRKYYPLYSQLLRTSDNTSHL

SEQ ID NO: 44652 - protein, 275 aa, Acinetobacter baumannii
MTSTSNLIEQVIEAWQNMQAKTPLVQCITNSVAANYTANVLLASGASPAMIDNPYEAESFTKISSALSINLGTPTSEQMQAMQISAKTAQLNNIPWVLDPVGYGPILAWRSQMTDELLQFKPSVIRGNASEISTLAGNQVQSKGVDSTLSSDQAYQQAYALLAHADCIAISGESDYILSNEIDAVIQVNGGSPLQPKITATGCALGALIAAYSAVATPTIAALSAHVHFAIAGKLAANQAQTMGSFSSIFMDYIHMLDDNLIEQYADIKLLNIQA

SEQ ID NO: 44653 - protein, 461 aa, Acinetobacter baumannii
MSYRNIVANQQYHFADLKTLMAKATPLRSGDELAGVAARDATEHVAAQMTLADVPLKTFLNEVVVDYDTDEITRLIIDEHDLAAFAPISHFTVGDFRNWLLGEDATPESLKALASGLTPEMVAAVSKIMRNQDLIYVASKCEVVTQFRNTIGLKGHLSTRLQPNHPTDDVLGISASILDGLMYGNGDAVIGINPATDNLHNLSELLKLLDHVIQEYQIPTQSCVLTHISSGIQLAEKNVPIDLMFQSIAGTQLANEGFGISLDLLQEGYEATLALKRGTIGQNVMYFETGQGSALSSNAHHGVDQQTLETRAYAVARKYNPLLVNTVVGFIGPEYLFNGKQIIRAGLEDHFCGKLLGVPMGCDICYTNHADADQNDMDVLLTLFGAAGINFIMGIPGSDDVMLNYQTTSFHDALYLRQLLGLKPAPEFSAWLEQQGIFKQQNSQICWADHMPDQFSRLLMN

SEQ ID NO: 44654 - protein, 283 aa, Acinetobacter baumannii
MAVYTQKLQLVCDYIQRHLDEDLDVDRLSQIAALSKFHFHRIFAIHVGLNVMKFIQLSRLKRASFQLAFEPDLKIIEIALQAGFDSPEAFTRAFKRSFDQTPRAFRDKPDWESWHQKFVFTIPKSELKMNVNIVERPAEKIAYLSHLGSPDKVLETAAQFIAWRKETGLSPVTKSKTYGIPFADPDQTPADEFRFDIAGSIEKAVPENSYGVQTGEIPAGRYATVRHFGSHDQIKDSVYYIFRNWLPEQPEEAGDYPVFFHYHNFVHEVNECDLITDIYLLLK

SEQ ID NO: 44655 - protein, 391 aa, Acinetobacter baumannii
MRNGELKEGEAVLRAKIDMASPNVHMRDPILYRVLHSEHHQTGDKWKIYPMYDYAHPLSDAIEGITHSLCTLEFQDHRPFYDWIVEKVKSKAVPHQYESSRLNVDYTITSKRKLRKLVEGGYVNGWDDPRMPTVVGMRRRGFTPEGLRDFCKRVGVSKTDGIVDVAMLEFCIRQSLENTAARGMAVLNPLKVTLTNLSEDLDLTHARHPNVDMGERVIPLTKEIYIDRKDFEEVPPKGFKRLIPDGEVRLRHAYVIKCDEVIKDANGEVVELKCSIDPDTLGKNPEGRKVKGVIHWVSATKGIPAEVRIYDRLFTEADPETGDDFLANLNPDSLKVVQAVIEPALAQAKPEDRFQFEREGYFVADQYDHTPEKPVFNRVLDLKDSFKPEKK

SEQ ID NO: 44656 - protein, 228 aa, Acinetobacter baumannii
MSDIILHQWEISPFCQKVARALKFKGIPYETINYNGILGAKVPLLSKVGKVPVIDHKGQRIQDSTRIARYLDETFPDTPRLYPEDANQKALAELWEDWADESLYFYEVYLRVNDSEALEEAIRISSIGRPAYEKPMVKGFILAELKTQLFFQGLGRMKAENVEEEFIRHLDRVEQVLSQSEWLVGENQTIADIAVVAQLGEVIRTSKKFGKEILDRPFMAEWYKKQTG

SEQ ID NO: 44657 - protein, 409 aa, Acinetobacter baumannii
MVRLTCNNKQWIYGKRNHSMAFKNIADQTNGFYIPCVSLFGPGCAKEIGTKAQNLGAKKALIVTDEGLFKFGVADLIASYLTEAGVASHIFPGAEPNPTDINVHNGVNAYNENGCDFIVSLGGGSSHDCAKGIGLVTAGGGHIRDYEGIDKSKVPMTPLIAVNTTAGTASEMTRFCIITNTDTHVKMAIVDWRCTPLIAIDDPKLMIAKPAGLTAATGMDALTHAVEAYVSTAANPITDACAEKAITMISQWLQPAVANGENIEARDAMSYAQYLAGMAFNNASLGYVHAMAHQLGGFYNLPHGVCNAILLPHVCEFNLIACPDRYAKIAELMGVNTHGLTVTEAAYAAIDAIRKLSSSIGIPSGLTELGVKTEDLAVMAENAQKDACMLTNPRKANHAQVVEIFKAAL

SEQ ID NO: 44658 - protein, 503 aa, Acinetobacter baumannii
MRYIDPNQPGSKVQFKSQYENFIGGEWVAPLKGEYFDNVSPVDGKAFTRIPRSSAEDIELALDAAHKAKASWNKSSPTTRSNILLKIADRLEANLEMLAVAETWDNGKAVRETLAADLPLAIDHFRYFAGCIRAQEGGISEIDEDTIAYHFHEPLGVVGQIIPWNFPILMAAWKLAPALAAGNCVVIKPAEQTPVGILLVAELIQDILPPGVLNIVNGFGAEVGRPLATNPRIAKIAFTGSTQTGQMVMQYATENIIPVTLELGGKSPNLFFEDIMDKEDDFLEKTLEGFAMFALNQGEVCTCPSRALVQESIADQFLELAVERVKRIKTGHPLDTETMIGAQASLQQQEKILRCINTGREEGAELLLGGSGRKEVGDGFYVDPTIFKGHNSMQVFQEEIFGPVLAVTTFKDFDDAIKIANDTMYGLGAGVWSRSAHISYRAGRAIEAGRVWTNCYNIYPAHAAFGGYKKSGIGRENHKMMLDHYQQTKNLLVSYSTKPMGFF

SEQ ID NO: 44659 - protein, 217 aa, Acinetobacter baumannii
MVKQRTLNRVVKASGIGLHSGQKVMINFIPHTVDGGIVFRRIDLDPPVDIPANALLIQEAFMCSNLVTGDIKVGTIEHVMSAIAGLGIDNLIVEVSASEVPIMDGSAGPFIYLLMQGGLREQDAPKKFIKILKPVEALIDDKKAIFSPHNGFQLNFTIDFDHPAFAKEYQSATIDFSTETFVYEVSEARTFGFMKDLDYLKANNLALGSSLDNALVV

SEQ ID NO: 44660 - protein, 391 aa, Acinetobacter baumannii
MASFEFIEDELNDGNGQARFTVFGVGGGGGNAVQHMVQSDIQGVKFVCANTDKQALDCMNAPFKIQLGEQSTRGLGAGANPEVGQVAAEESREIIRQHLEGTDMVFVTAGMGGGTGTGAAPVVAEVAKEMGILTVGVVTTPFNFEGRRRQKSAERGIEALEAHVDSLIIIPNQRLLSVYGDISMKDAYKKADDVLLNAVRSIFDLVVNRGHINLDFADLKTAMSTRGYAMMGAGLGRGEDRARQAAEQAIRSPLLDNVNIINAKGVLINITGGDDITLRETEIITDVVNQIVDLDEGEIFYGTVFDPDARDELRVTVIATGLTRNAADAEPRKRNTVSHTSTQSAQSVDEDDVPAINKRQNAENDVNNAPSSTPRSSPMSIQDYLKNQQRK

SEQ ID NO: 44661 - protein, 420 aa, Acinetobacter baumannii
MSEAVPSVVAIDIGTHKVSVLIGKIHAPDNIQVIGMATARNRGMNKGKIVSLDKVIAAIKNAVAEAENMAECRIHSAWVSIPSTELQSFYASGRTPVANPAHVITTNEVVRALELAKASHVTSDYYLASAVPLGFELGDSSEWVQNPINMTAHSMTGHYQLMMMPIATMQNLDRAMKGANIGVEKMVVSCLATAEASLLKDEKEYGVCLVDIGAGITNLAVYLDGRLALARTLQRGGEHVTRDIAAVLQTTTEEAERIKILHGCVDLSAVKPDHMIQVQGIDGPQTISRIELAEIIIARYEEIFSQIREELEQSGAIHGLYHGVVLTGDACQIEGMVSLARRMLGVSAHLGNPPLQVYADDQHQAALRRSMYATAAGLLMFSQSELQEAVEEPEEGNDRSVWERMVNGWNAFNSKLKAIF

SEQ ID NO: 44662 - protein, 284 aa, Acinetobacter baumannii
MAQLPASMRRKRAAITSIHEKPPTRKQKLANAGGWVLLVIAFLVLAVGIYGLYKVITDATVAKLEVVGSTTPVETQQVMRYVQPIVKDNYFTSDLEQIRDKALEISWVDRVVVSRAWPNGIRVRVMPRHAIARWGTGRLLSDGGDVFSEAEPRLHPELPLLHGPVSQSKMMMRRYNEINQLFHPVNLRLKELYLTERMTWFMQFDSGLRIIVDQDQTMNKLQRLSHLAQSDLKPVWPKISAIDLRYRNGLSIQWKNATPPKIVNGQFVVTSDDTSIAGGTKAKP

SEQ ID NO: 44663 - protein, 216 aa, Acinetobacter baumannii
MTTPVSFHPQAFIELALSRGVLKFGEFTLKSGRVSPYFFNAGLLNDGEALSLLAQGYADKLTQCENVDVIFGPAYKGIPFVAATAVALSQTHNKSVPWGFNRKEAKDHGEGGVLVGAAVEGKKVWIIDDVITAGTAIREVVTILKNAGATIAGVLVALDRQERGQGELSAIQEVQKELEIPVHALITMKDLMDYLEAKGEKEALANMQAYREKYGI

SEQ ID NO: 44664 - protein, 308 aa, Acinetobacter baumannii
MSNATKFGKVAVLLGGKSAERAVSLDSGQAVLDALLRSGVQAEAFDPQDRSVTELVNYDRAFIVLHGRGGEDGQIQGVLEWLNIPYTGTGVQGSAIGMDKVKTKQIWQGSDLPTAPYRIITKETDLDSVIAELGLPVIIKPVHEGSSVGMSKVEKAEDFAAAIEKATQHDAVVMAEKWITGREFTISFLNGQPLPVIRLQPPADVAFYDYEAKYQRNDVEYGIPCGLSETEEKKLQALCLRAFQAVGAEGWGRIDAMQDEQGNFWLLEVNTVPGMTSHSLVPKAAKAVGYSFDELCVAILEQTLEGTA

SEQ ID NO: 44665 - protein, 482 aa, Acinetobacter baumannii
MSPTTAANQAKKLIKVPEMRRIKHIHFVGIGGAGMCGIAEVLANQGYKISGSDIKASKTTQQLEENGIKVYIGHEAENIKNANVLVVSTAIDPENPEVKAAIEQRIPIVRRAEMLGELMRYRHGIAVAGTHGKTTTTSLLTTMLAEENLDPTYVIGGLLNSTGVNAALGESRFIVAEADESDASFLYLQPMAAIVTNIDADHMDTYEGSFDKLKDTFVQFLHNLPFYGLAVVCGDDANIREILPRVGRPVITYGFNEDNDIRAIDVEQDGMRSHFTVLRKGREPLRLTINQPGLHNVLNALAAIGVATDEGVSDEAISRALKGFSGVGRRFQVQGEFELGEGNVKLVDDYGHHPKEVEATIKAARQSHPDRRLVMLFQPHRYSRTRDCFDDFIEVLSQVDQLLLLEVYPAGEKPIVGADSRTLARSIRLRGQVEPILIDPVEGNLQNIMQNVLQPNDLLLTQGAGNVGAISVELAQHHLYVK

SEQ ID NO: 44666 - protein, 365 aa, Acinetobacter baumannii
MTDSQQSKPKHVMMMAAGTGGHVFPALAVAKQLQQQGCQVSWLATPTGMENRLLKDQNIPIYQIDIQGVRGNGVIRKLAAPFKILKATFSAMRYMKQLKVDAVAGFGGYVAGPGGLAARLLGIPVLIHEQNAVAGFTNAQLSRVAKVVCEAFPNTFPASEKVVTTGNPVRREITDILSPKWRYDEREQAGKLLNILIVGGSLGAKALNERLPPALKQLEVPLNIFHQCGQQQVEATQALYADAPANLTVQVLPFIEDMAKAYSEADLIICRAGALTVTEVATAGVAAVFVPLPIAVDDHQTANAKFLADVGAAKICQQSTMTPEVLNQLFTTLMNRQLLTEMAVKARQHAQPNATQHVVDLIQKM

SEQ ID NO: 44667 - protein, 255 aa, Acinetobacter baumannii
MVLFERKIVYSAFIPATIILAVCTYLSMTGVISYAPLFNFTAIRHAQTNPFWLGSMLFFIMPILVACFILFEILLTQWRQRETYIQRLSQIDPLTNVLNRRSLNTHLEALHEQQFDYAVILLDIDHFKKINDIYGHHQGDQVLIEIAQCLSENLRNEDIIGRFGGEEFILLLPHTDIIQAEKIAERCRQALQELTIFNNQNIQIHVSASFGISSSAFANDPYLVIRQADQALYAVKASGRNQVRTFHQLPQIKSI

SEQ ID NO: 44668 - protein, 465 aa, Acinetobacter baumannii
MNNDRTKKLGEGLSNRHITMISIGGVIGAGLFVGSSSAIAKAGPAVILAYLITSIMVFLVMRMLGEMAVLEPDTGSFSTYARKAIGPWAGFTIGWLYWWFWVLAIPVEAIAGAEILHSWFPSVSVSIYAFCFIVFLSLANFFSTKSFGEFEFWFSLVKVVAIIGFIIIGILAISGIWPLAKNVSGVANLYNNAGFMPHGMGGILAAILITAFSFFGVEIVSIAAAESSNPKQKIRRATNLVLYRIILFFVVSMFIAVSLVDWRSPDLQKYGTFQYVLMSLNVPGTKLIIDTVVFIAVASCMNAAIYTSSRMLFRLGTRNEAPQAVTKVNYAGVPAIAVFSSTFIGLVCCVINYVFPGKVFGLLLSSTGSIALLVYLVIAFSQLRLRHKLEAVGAEIPFKMWLFPWLTWFVIIIILSVLAYMFFSPAYSYETTLSLGVTLGVVVCGLFVTRKRKATRSVAINQSNL

SEQ ID NO: 44669 - protein, 93 aa, Acinetobacter baumannii
MIQVMQALEERLEDIRTPMDVSVIGCKVNGPGEAKEADIGVVGAAPRSLVYRNGEKSHLIDTNQLVDEIETMVRQRVQELEEAKSKEIIRSSS

SEQ ID NO: 44670 - protein, 217 aa, Acinetobacter baumannii
MSVENTSIQGITLYSHADDFRSHWIRFLLAEKQIKYQLIVTDHEDEDLASLNPYNQLPMLVEQNLKLFSAPIIAEYLDDRYRQNKLYADAPMARAEQRQYIWRLENDWFKLADHMLRHADTLNVEQKQKAQKELRDTLISLTPLFQHFPYFMSENFSILDCMLAPIFVRLNSMGIDLPKQQCRPIFLYCKRIFNRPSFVKSMTPQEKTRYNELLNME

SEQ ID NO: 44671 - protein, 128 aa, Acinetobacter baumannii
MATNYGTGRRKTATARVFLSAGTGKLVINNRTLEQYFGRETARMVVRQPLELLEATEKYDLYITVKGGGIGGQAGAIRHGITRALIAADETLKPVLRQAGFVTRDAREVERKKLGLRKARKRPQFSKR

SEQ ID NO: 44672 - protein, 142 aa, Acinetobacter baumannii
MKTLSAKPAEVQHDWFVVDATGKTLGRLATEIARRLRGKHKTSYTPHVDTGDYIIVINAEQVQVTGNKALDKKYYRHTEFPGGLKETNFEKLVAHKPEEIFERAVKGMLPKGPLGYAMIKKMKVYAGSEHPHAAQQPQVLDI

SEQ ID NO: 44673 - protein, 270 aa, Acinetobacter baumannii
MYQINALNPKDEGHKARKRFGQNFLHDQRVIAKIVRSVNPRTGDNIVEIGPGLAALTSPLIGECDALTVVELDRDLAAGLPERVPHPERLTIVEADALKYDFSQLVKDGRPLRVVGNLPYNISTPLLFHLLEFGSQVKDMHFMLQKEVVERITAEPNTKEYGRLSVMIQYYCQPTFLFEVPAGAFNPPPKVTSAVFRLVPYEQKPITAKDEKALARLVAHVFTQRRKTLRNSLKGMLAEDGFEKAGVDPMARPETLTLAEFVALADQMVA

SEQ ID NO: 44674 - protein, 469 aa, Acinetobacter baumannii
MKPVIALIGRPNVGKSTLFNQITKSRDALVADFAGLTRDRKYGDATYQNKSFIVVDTGGIGESEGGIDNYMAEQSKTAINEADIIIFVVDARAGLLASDEQIARELRTLGKKIYLVANKVDGVHAEAALVEFYKLGMGEPLQVAASHGRGVQQMLEDVLQDIPEDENPEEHDKDTGLRLAIIGRPNVGKSTLVNRLLGEDRVVAFDQPGTTRDSIYIPFEREGRKYTLIDTAGVRRKGKVDEMIEKFSIVKTLQAMKDAHVVVVVVDAREGIVEQDLHLIGYALEAGRAMVIAINKWDNMSEYDRKQCKLDVERRFDFIPWARIHLISALHGTGVGELYPSIHRAYESANLKVSPAKLTQILNDATDQHQPPTVQGRRIKMRYAHMGGQNPPTIVIHGNKVDKTPADYRRYLENVFRKVYKLEGTPVKIEFKTSENPFEGRKSQVDERTAARRRRYIQKFKKAEKKFKR

SEQ ID NO: 44675 - protein, 381 aa, Acinetobacter baumannii
MNQKFKLPLAIAIASAVLVGCSSNKVKEAKPNPLPKLTESNKSLVPVFSRSVSSTNKADPLRLQLDASEGVVFTLDPKGEVAAYRGKQRLWEKKVSKLGLSSGVEAAEGIVVVGNSKGQLFALDQATGEQKWTAQLSGALLSPSLVQSGRVITIANDGTVFAHDVSSGQQVWAYKLPNVQFSLRGQPSPVSLDPRTVLIASANAYVYAIDTISGIPRFQRRVAVSEGRSDIQRLIDIDGDPVVAGQLMVTTSFQGQVTVTDLASQRVVWSEDSSSTKRPEVYDNKVFVSSTDGKLTAYDLTTGEQLWQNDSLLNRHLSNPVVLGSDLIVGDLDGVLHLIDPTTGKLIGRSKTSGEVNTLRVIENQLYVSTRKGDLSIWQNR

SEQ ID NO: 44676 - protein, 430 aa, Acinetobacter baumannii
MSSIVAIKGFNDVLPTQTAAWRRLEQHLASLMDAYGYQQIRLPIVEQTGLFKRAIGDATDIVEKEMYTFFDKGNPPESLTLRPEGTAGCVRALVEHNLLRGATPRVWYMGPMFRYEKPQKGRYRQFHQFGVETFGVATPDIEAEVILMTARLWKRMGVAHMVQLELNTLGEKEERTEYRNALVAFLNEHKDALDEDSQRRLTTNPLRILDSKIESTQKILENAPKLYDFLKEDSLSHFQQLQDYLTAAGIKFVINQKLVRGLDYYNKTVFEWTTTALGSQGTVCGGGRYDGLVGQLKGKADQSVPAVGFGMGMERLLLLIEQVEQAEIVRDCEAFLVAEPAYQSKALVLAEQLRDQLEAANSNIRIKTGSQGSMKSQMKKADQAGAVYAIILGEREWEAQQLAVKELATAEQSQVALAELVPFLIEKFTK

SEQ ID NO: 44677 - protein, 230 aa, Acinetobacter baumannii
MNYLQDARQHVLQQIRTACELAQRAPETVQLLAVSKTHPSERLREMYAAGQRAFGENYLQEALDKIDALQDLDIEWHFIGHVQRNKTKHLAEKFDWVHGVDRLIIAERLSNQRGDDQAALNICLQVNIDGQESKDGCAPEDVAELVAQMSQLPKIKLRGLMVIPAPDNTGAFADAKKLFDAVKVQHAHPEDWDTLSMGMSSDLEAAIAAGSTMVRVGTALFGARDYSQKG

SEQ ID NO: 44678 - protein, 354 aa, Acinetobacter baumannii
MEYPPTYPSVIPNIEIVMTYTFNRPAFPATRMRRIRKNDQLRAMVSETQLTTNHLIYPVFVLPGQNQTQDIPSMPNIQRLSADLLLKKAERLLELGVSKLALFPVTPQEDKSLTAEAAWREDGLVQTTCRLLKKELPEMVLITDGALDPYTTHGQDGIIDETGYVLNDETVECLIKQALSHAEAGAEVIAPSDMMDGRIGAIRQALEANGHIYTNIMAYSAKYASSFYGPFRDAVGSASNLKGGNKYNYQMDFANRAEALHEIALDIQEGADMVIVKPGMPYLDVVREVKDTFGIPTFIYQVSGEYAMLAGAIQNGWLSDSVILESLMCCRRAGADGIWTYFAETAAEKLKEMN

SEQ ID NO: 44679 - protein, 370 aa, Acinetobacter baumannii
MLVSLGESRILFYKIMTYFDLLGEIMDITELLAFSVKNGASDLHLSAGMPPMIRVDGEVRRINLPALEHKDVHRLVYDIMNDKQRRDYEEKLETDFSFEVPNVARFRVNAFNQNRGAGAVFRTIPSKVLTMEDLGLGQIFKDICDYPRGIVLVTGPTGSGKSTTLAAMLDYINENRYDHILTVEDPIEFVHQSKKCLINQREVHRDTHGFNEALRSALREDPDIILVGEMRDLETIRLALTAAETGHLVFGTLHTTSAAKTIDRVIDVFPAEEKDMVRAMLSESLQAVISQTLLKKNGGGRVAAHEIMIGIPAIRNLIRENKVAQMYSAIQTGANHGMTTLDQSLKGLVARGVISPQTARTAAKQPESFL

SEQ ID NO: 44680 - protein, 679 aa, Acinetobacter baumannii
MSSASQLNNKQEEAMKYTQGPLLVLAGAGSGKTSVITRKIAYLVQHCRIPAHRITAMTFTNKAAREMKERVTKLLSREEAKGLSVSTFHTFGLNLLRLELKNLPLKANFSILDADDCKRILMDLMHRDNLSGAESKELIAKAMKKISDWKNDLILPEQAHSTCETPEDVQFAHLYQLYERNLRAYNAVDFDDLIVMPTRLLQENAEVRDKWQNRVRYLLVDEYQDTNTAQYILVKLLVGVMGQFTAVGDDDQSIYAWRGAKPENMALLKQDFPNLHIIKLEQNYRSTSRILKAANCVIQNNPHIFDKKLWSDKGHGEVIRIITCRNDDDEAERVVKDLLTHKLMNGKNWKDYAVLYRGNFQARVLETQLRQMQIPYKLSGGTSFFARAEIKDVMSYLRLIINPEDDSAFLRIINTPKRAIGPVTLEKLGLFAQENNLSLLGASSDQRLSMVLPKKAETQLHEFADFISTFTRELLEDDEPVPKVRQMMNEAGYIDYIREQSATPAQEKSKLDNIENLFSSIQNLINRAEDVDEKNIESVIRKLVLLDMLEQQQEEEDTDKVNLLTLHAAKGLEFPYVYIMGLEEELLPHKNSIAAETIEEERRLMYVGITRARQGLTLTLAEQRKNGGQMKQMTPSRFLDELPQDELEWLGRKKKIAANVDPKEQAQQYLANLKALLKR

SEQ ID NO: 44681 - protein, 295 aa, Acinetobacter baumannii
NVLITGASGFIGTHLIRFLLQKNYNVIAVTRQAGKKSDHPALQWVQKFEDISIRQIDYVVNLAGANIGEKRWTESRKKHLIKSRVNTTRKLYVWLKQSQIFPEVIVSGSAIGYYGIDAQEKWAEVCTEQSSPQPIFMSQLCQEWELAALADPQQNTKIIRLGVVFGQGGGILPKMLLPIRLNLVGQIGHGRQPVVWVHIEDVLNAIEFIFQHPQSAQIHNVVAPENVTQKVFVEQAAKVLNKKPMLSAPSTVFRCLLGEQSQLILNGQYVKPAALQAEGFEFAYPQLKMALENIL

SEQ ID NO: 44682 - protein, 418 aa, Acinetobacter baumannii
MSVHFLHTSDWHLGQFFYNHSRHYEHQQFLSWLLTQIQEKQPHALLIAGDIFDVINPGSQAQKQLYQFLADAHRIAPHMQTLMIAGNHDSGYRIEQVEPLLEKYNAKTVGVVRWNEDKTLDLDRLLLPIYNQNQDIVAWCLALPFLRSAEITGFNEHTTNSKNAIAYLHQQLIAEAKRRKTPDQALILMSHAHMQGGETSDSERPIIIGNEEALSTTLFEDAVDYVALGHLHKPQKVGQPHIRYSGSPIPLSFSEINYKHQVVEVKIDPSQDTDSRLQFEAVEIPRCIQLHRIRGELNEVLQQLKALPHGVIENIDHREYVDIEYYSLTPPQPNLRQQFEAALPPDRYRLVRISRQYVNKDTTNSNTTQHIALEPPTPEKLFQNIWEKQGYSADDAVLKDFLSLVQEAQKHLENDASH

SEQ ID NO: 44683 - protein, 151 aa, Acinetobacter baumannii
MKMKWASEYNTGIDVIDEQHKRILDYINEIDDVKDDEDRRRIKDVLDNIIDYTQSHFTFEESLQEEADYKYRVPHKRVHDLFIKKIELYRERFEMGHTIEAELQEILAKWLINHIQHDDADYVGAVKENMMGIIREKEKKKGKNWFARFFS

SEQ ID NO: 44684 - protein, 66 aa, Acinetobacter baumannii
MSNQRIRIRLKSFDHRLIDQSAQEIVETAKRTGAQVCGPIPMPTRIERFTVLTSPHVNKMRVSQYE

SEQ ID NO: 44685 - protein, 244 aa, Acinetobacter baumannii
MKLNSYNFLLGLAFASSVAAPAAQAEIVIHGTRVIYPSDAREVTLQVSNNGSKPALVQAWIDEGDPKSTPDQSKVPFMIAPPISRVEATKSQTLRITALPNASQFNQKQETVLWLNVLDIPPRPTSKNADTTPDNFLQLAIRSRIKFFYRPASIKEDANLAADKLQWVKSGQNLTVKNPTPFHITMTSVYQKVGDKKVDLLPQGLMVKPFSEASIQLKNSNLQDMSFINVNDYGGRVEHQIKLQ

SEQ ID NO: 44686 - protein, 796 aa, Acinetobacter baumannii
AAASAPVEAEFDSAFLIGDAQKVDISRFKYGNPVLPGEYNVDVYVNGQWFGKRRMIFKALDPNQNAVTCFTGMNLLEYGVKQEILTKHAPLQKENNSCYKIEEWVENAFYEFDTSRLRVDISIPQVALQKNAQGYVDPSVWDRGINAGFLSYSGSAYKTFNQSGDRSETTNAFMGVTAGLNLAGWQLRHNGQWQWQDTPAENQSKSDYQETSTYLQRAFPKYRGVLTLGDSFTNGEVFDSYGYRGIDFSSDDRMLPNSMLGYAPRIRGNAKTNAKVEVRQQGQLIYQTTVAPGNFEINDLYPTGFGGEIEVSVIEANGEIQKFSVPYASVVQMLRPGMNRYSLTVGQFRDQDIDLDPWIIQGKYQQGINNYLTGYTGIQASENYAAILLGAAVATPIGAIAFDVTHSEAEFEKQASQSGQSFRLSYSKLITPTNTNLTLAAYRYSTENFYKLRDALLIRDLEEKGVNTYAAGRQRSEFQITLNQGLPEGWGNFYVVGSWVDYWNRSESTKQYQIGYSNNYHGLTYGLSAINRKVEYGSNDASHDTEYLMTLSFPINFKKNSVNVNVTASEDSRTVGASGMVGDRFSYGASVSHQDYANPTFNANGRYRTNYATVGGSYSIADSYQQAMVSLSGSVVAHSDGILFGPEQGQTMVLVHAPDAAGAKVNNTVGLSVNKAGYAVVPYVTPYRLNDITLDPQEMSSEVELEETSQRIAPFAGAIAKVDFATKTGYAVYINSKTADGNSLPFAAQVFNQKDEVVGIVAQGSMIYLRTPLAQDRLYVKWGDESNERVSVEYNI

SEQ ID NO: 44687 - protein, 148 aa, Acinetobacter baumannii
MTTLKNQITDALKTSMRAKDMATVTVLRSLQAAIKQIEVDERIELDDAQVLAVIEKQIKQRKESIKAFEGAGRDDLASKEQAEAEVLSQFLPEAMTEEELDSLIEQTIAAQEATSMKDMGKVMNSLRPIIAGRADPAQVSAKIKAKLA

SEQ ID NO: 44688 - protein, 357 aa, Acinetobacter baumannii
MAEFKFTDLVEPVAVDKKTALRITVLGGGSFGTAMANLAARNGCDTMIWIRDAETAEEINKTHINKRYLPDFTLESSLRAVSDLEQAVCDRDIILVAIPSHSFRDVLKQIAPYITAQAVVSLTKGVEAKTFSFMSDIIREELPEVPYGVLSGPNLAKEIMAGMPSGTVIASDSELVRYAVQHALHSALFRVFGSDDVHGVELGGALKNIYAVAMGIGAAYKIGENTKSMILTRALAEMSRFAVKQGANPLTFLGLSGVGDLFATCNSPLSRNYQIGYALGSGKTLEQASKELGQTAEGINTIVQVRGKAQELDVYMPITNALYEVIFEGAPPLNIALSLMKNGHRSDVEFVLPHHEV

SEQ ID NO: 44689 - protein, 261 aa, Acinetobacter baumannii
MQDTPLIIGSRSFQSRLLVGTGKYKDLNETDLAIQASGAEIVTVAIRRVNIGQNPDQPNLLSVIPPEKYTILPNTAGCFDADSAVRTCMLARELLDGHNLVKLEVLGDEKTLYPNVTETLKAARTLIDDGFEIMVYTSDDPIIAQELESMGCVAIMPLGSLIGSGLGILNPHTISIIKENAKVPVLVDAGVGTASDAAIAMELGCDGVLMNTAIAAAQNPILMASAMKKAVEAGREAFLAGRMPRKRMANASSPETGYFFK

SEQ ID NO: 44690 - protein, 452 aa, Acinetobacter baumannii
MAKKPIYKSLYFQVIIAIIAGVLVGHFSPSTTQIVNGVEQHIPGLGEQLKPLGDAFIRLIKMIIAPVIFCTVVSGIAGMESMKSVGKTGGVALLYFEIVSTIALLIGLVVINIAKPGVGMNVDPATLDTSGIQKYVTSGESQSTIDFLMHIIPDTVVGAFANGEILQVLLFAILFGFALHKLGDAGRPVLKLIDQIAHVFFNIVNMIMKLAPIGAFGAMAFTIGKYGVGSLVQLGQLIICFYITCLLFIFLILGTISRISGFSILKMIRLIREELLIVLGTSSSESVLPRMLRKLEIAGCEKSVVGLVIPTGYSFNLDGTSIYLTMAAIFIAQATNTQLDIQHQITLLLVLLISSKGAAGVTGSGFIVMAATLSAVGHIPVAGLALILGIDRFMSEARALTNLVGNSLATIVVAKWVGALDKDKLNDALNNPDEVDRKMLAPKNPQVAEGLD

SEQ ID NO: 44691 - protein, 640 aa, Acinetobacter baumannii
MNERIHILRQAIVVVTQALTNSDIAVTQEGIEAGVHKDPKTGKPVRINLPYLPDNSPDSLIDAVQGFLDQEVAKYLFTDFSLKLKGSEEVKTLTSLLEEARVERCMAEKYRGSNINMKNASQFFIDELIDDKYQKLVKEKASDEEITQHLMLPMLRALSGQEVFEHYLKDKMKHIKPVWDMLTPFKPEIEKLKSTKDTMDLAQRIYKVLKDEPELPELPDSEHDEDSDSLPEPKSPGKSAGVGNSEDENEEDDDEGGSLGGAVGADEGEDEEGEGGSGGKAKQRPNAVKHSLESDDKKSAPPRSEFVAAILDSLKDTENNYSEQLSKKIAQRTAADVKKSKYAVFTNEGDVIEPLEVPKLHYDDKMFKRLEDKVASMVGPMQKDMERAIQARSKSVWENGLKQGKLNSSSLARLASTGDCRIFRKRVESKTKDVAVSLVVDMSGSMCGSKIHTAAAASYALSNVLDRLKIPHEVICFTTHTDSATYHKRLKQIREAEKKYGVSYSRYENLYMPVIKGYNERINTETKRRFGWLPHSGLMASNIDGECVEIAARRLMGRKEAGKIMMVLSDGSPAGGGNSRDLEYHLKEVVKKIEKSKVDVIGIGIEDDSVRRFYDKHVVIHDVEQLPSLVISRLRSMLLA

SEQ ID NO: 44692 - protein, 559 aa, Acinetobacter baumannii
  MISC_FEATURE (281)..(281): X=any amino acid
VTIAYDAVNAILHKPPVEAKLEVQSALSYLVDGAEETLAFRQHRWDGRSSFFDFAKCSFPAGFVVHVTDRLKKAGFEVKLARKPLPAPLGPARPVVDSYGYDPRYDYQPEVMDRLVRHGQIIAQVATGGGKSRIAMLCQARINRPTLFLTTRSILMYQMKDAFEANGVACSVIGDGSFGQVNEKGQLSIKKMTVGMVQTLAAKLEETTLEKEFQILYDNVVKKHEKEISDTKKQLIKVGKVESEIKKVLHNLALQHEKELQDRRQRCKLRQKQNSRKNHSXDSKPSSFWSFLSFVILEEAHEAGGNSYYEIMRHCKNAYYRLALTGTPFMRESQESNMRLMACSGPIAIKGTEKMLIDRGILAKPYFKIVELKKKPAKLHSITPWQAAYRLGIVQNEERNMPICMEILKAREYGMTAMVLVQHTSHGDTLLKLFDDIGIRARYIRGEDDQGERKSALTELANKDIDVLIGTTILDVGVDVPAVGLIILAGGGKAEVALRQRIGRGLRAKKFGPNVAFIVDFTDQHNSTLKSHARQRLQIIRETPGFGENIVANFEFEKL

SEQ ID NO: 44693 - protein, 2103 aa, Acinetobacter baumannii
MNAKIKKFGFPLPIAGASGGSKSPSVPREDPDNLQSSAYVNIIDLIGEGQIGGLVDNVDGDSLTEKEKSIFFDGTRLRHTNGELNFANVSWAERVGLQRQDYIEGFGEGVETPFYKNVQLKSGIPSAFTVSNPNADRVRIILAVNSLLSTDRSSGDTYGTSVEFQIKLSVNNGPYEILATKKITGKTTSRYQRSFSFDLPKKKADGTPITAWSFQITRTTPDSNSSYLQNTTFFESYSEVELTKFSYPNVALVATRFSSETFSSIPKREYLVDGLLIKVPSNRNKDGSYTGPWDGTFKLESSSNPAWILYDLLLSKRYGLGEYITPEMIDESRLYVIGQYCDQLVDDGFGNKEPRYTINCVINTRVEAYDLIVDICSAFNGMAYWAGHMVGFTIDAPGTPQMLFNNTNIVGDFSYQGTSNKDRHSVAVVTWNDPNDDYKQVPEVVEDPELIERYGIRKTEVMAFGCTSRGQAARYGRWLLYSEHQQSETITFNVGIDAALLLPGDLIYVQDRDRAGKRFGGRLLDCTAKQAVLDDLVDFGEFTDLTLVIRLEDGSLAERVIASHTKKTVTVSGHTKEVTVVEWAEALTVMPVKYALWIIKAAELQPVIARVVNVAQGEEKGTYNITAVPHNPNKYQSIENDLMLDVPPTSILNSRNQEPPASVEIKSEIITTQNVAKTRLVISWKEAKNAARYEVEWKRNDGNWVKLPQTTSLSIEVEDVYAGAYTARVVAYNLFGARSYPKYSTSTDVKGKVGKPTNVLSLTTTPLLFGMKLDWVYPAGNSDLSHVVIEVSDRADGSNPRLLGNVSYPTNTLTIQGLQGGLDQWYRTKTVDKSGNESDWSNFVKGTTGNDPDQVLDLISGQIGESDLATELQGKIENSVTVSEAAKIVADNAQTAATNAQTAATDAKTAASEAQKAASSAQTQASSAQQIASEASATAANAKNAADQAVTAANQAKTAADNAATTAATASSTASKAQTTANDAAAAASKVASDLTTSTNQLNKKIADETDARTVAISKLNDGLTIETSQRKTEDAALLSNIETYKSSTNGTLSSLQTQINTNATNTSANTSKISSLDSRLTTNEGKTADAINAAATAQQTASSAVDKANAVANSVTALKSELSSGKGINNIVAPFSDPQELPALGGASRTVALVDSALRRNGKAYKVSFTAAAHYVYFGTAQAALAPSQMAMQVEAGRAYTFSVWLKALSTAVPSFRFNILWFIRDPSTGNITTNAGIIFPQGQTDSYIAPNANGQRYSFRPVNSPANAIGATVYVVGNPSGPSAGEYLIDMLMLEESVGSEKPASTWTAGPADLNAIKNALDTNAVAINNLITRVSNNEGKITSQGNLITQLNNSINTINGTLSNKADATALNALTTRVSNAEGQISSQGSSIVSLQNDLASTNKAVSTKADSSALNSLDSKVSEIDGRVTSNANAVTSLQGSVSSIEKGLSTKADASALNNYYTKTEADSAASGAIDKFNSQLTIGGVNVVANSEAPRTSTAATNREYLLYERSAELKAFYDENLEKPITISFEMSVPVAGPVQVYSSNGSAHQFVTSVNAIIVNQFAKYSVTVSPKAHTASTTVSTIEFYGTYGTGRIPTIRKLQIEAGTKATAWSPSPRDTKAAIDANASAIQTTQTKVDNIDGRLTTATDSITSLNSRMSTAEGNINSTNTAVGGLSTRMATAEGKITNQSDSIASLQNSVTSINGTLANKADSSAVNNLTSRVETAEGKISSQSGQITSLSNSLDLTNSNLNDVNVLARLLSLGKPLRDDPTFKTTSAGGLSAYSFPAGTSWVKQTKSTDNPTGSTHEMLIKATQALGGGWYPTAPTLVLTANKTFLIKQIIKMPVGTKLQAIGNATGTGGYIRILGNDLGTGKFETYYSVVQGGADLSGSTIQGHFRVIAGTNPPVPTVDNPVFVILASYEVFDVTAVNDTIPKAYSDAIAANANAINTLSNTVSQQGNTITSHSNSITQLNNSISSINGALSSKADASALQSLDSKVTLIDGKVTSNSSALTALQSSFEGIPNQGVNLLGLKFPHPIEKPKWISGLPFEVIQSPDTVNVRAFQFTMPANTLAALTSTLVAASSATVAHRRYIHI

SEQ ID NO: 44694 - protein, 918 aa, Acinetobacter baumannii
MKFWQRLFTSFLQRFHLMRFFGRNRSFKELHQSSYAQEISKNLSKRLLNASRAQTNDLLKQFDTHLTGLTEEQAHTQQMTVGLNEVTHEKPLTWWQHLWYCYRNPFNILLSLLALIAFFTDDLTGSTIISVMVILSTLLRYWQEAKSNQAADALKVMVSNTATVLRHQVSAEDLELMHERYGIDTKNQTTHQFEIPIQYLVPGDVILLSAGDMIPADCRILSAKDLFVSQAAMTGESMPVEKFPLQKNLEETSALELDNIVFMGTNIVSGSAQAVVLSTGIQTYFGALAHRVTATDRSTTAFQMGVNKVSWLLIRFMLVMAPVVLFINGFTKGDWAEAFLFALSVAVGLTPEMLPMIVTSTLAKGAVFLSKKKVIVKRLDAIQNFGAMDVLCTDKTGTLTQDKIFLSQHIDVQGGKSDFVLMQAFLNSYYQTGLKNLLDVAVLEAVDDQIKIQKLRYKKLDEVPFDFDRRRMSVVVQTPQQKARMITKGAVEEMLKVCRYVEVNGKVEPLTKQCEVAIEALTQRYNRDGLRVVAVAYREFKNHQENYSVVDESDLILIGYITFLDPPKESAKEAVQSLHAHGVTVKVLTGDNEFVTQKVCREISLNYDQVLLGGVIETLTDQQLKRAVEQYHIFAKLSPVHKERIVEQLKANGHVVGFLGDGINDAAAIRAADIGISVDTAVDIAKESADLILLEKSLMVLEKGVIEGRRTFANMLKYIKMTASSNFGNVFSVLIASAFIPFLPMLPIHLLIQNLLYDVSQIVIPFDNVDEELIAKPQRWQPEEVGRFMVVFGPISSIFDMITFGLMWFVFSANTPEHQTLFQSGWFMVGLLTQTLIVHMIRTAQIPFIQSRAATPLLIMTAVIMCIGIFLPMGPLASYLKLQALPLSYFLYLPVILGAYMCVTQWVKKIYIRRYGWQ

SEQ ID NO: 44695 - protein, 353 aa, Acinetobacter baumannii
MFKNRFFNTMQIQNQVQLKPFNTLSLDVTASHYTKVKSIEDIEEALAFAKEHELNVLVLSGGSNMLLPQQINALVIHLDIQGIDVLSEDQDFIRVKVGAGQVWHDFVLYSTKQNWFGLQNLALIPGLVGASPVQNIGAYGVEVGEFIESVQVYDRLLKQTGSISAADCHFSYRHSIFKDDPARYIITHVTFKLLKQANLKLNYGDLKQAVGDNLTAENLQNQVIHIRQSKLPDPKEYPNVGSFFKNPIVNTQEFERLIAQFSTIPHYPQANGNVKIAAGWLIDQAGWKGKQLGVVGMFHKQALVLVNYANASLADVKKTYQAVQHDVEQRFQIMLEPEPVLYNNLGLIENHTE

SEQ ID NO: 44696 - protein, 329 aa, Acinetobacter baumannii
MTHTALDQLKTLTTVVADSSDLEAIRKFRPLDATTNPSLITAAAEQPESKELIEDAYYQAKEEGYKNDELIERTIDILTVKFGVEILKLIEGRVSTEVDAALSYDTEATIQKAHELCELYKGYGIDQSRILIKIASTWEGIQAAKVLEAEGIACNLTLLFGLHQAQACADAKVTLISPFVGRILDWYKKAEGVDSYPIEKDPGVVSVKKIYTYYKQQNIPTQVMGASFRSIDQVLGLAGCDLLTISPSLLTQLEQDTRTVDAALDANKAKQAEAIVRPAQDEQSFKDELNHDLMAFQLLQGGVDGFIKARDQLSLLLRQSFGIDAEIKS

SEQ ID NO: 44697 - protein, 492 aa, Acinetobacter baumannii
MQKKWLILTIIVLIYLPVTIDATVMHVATPSLSAALNLTANQLLWIIDIYSLIMAGLILPMGALGDRIGFKKLLFIGTAVFGVGSLAAAFSPTAYALIASRAVLGLGAAMLIPATLSGIRNAFTEEKQRNFALGLWSTVGGGGAAFGPLVGGFVLEHFHWGAVFLINIPIILVVLVMIVMIIPKQQEKTDQPINLGQALVLVVAILSLIYSIKSAMYNFSVLTVVMFVVGISTLIHFIRSQKRATTPMIDLELFKHPVISTSIVMAVVSMIALVGFELLLSQELQFVHGFSPLQAAMFIIPFMIAISLGGPLAGICLNKWGLRRVSSLGILVSALSLWGLAQLNFSTDHFLAWTCMVFLGFSIEIALLASTAAIMSSVPPQKASAAGAIEGMAYELGAGLGVAIFGLMLSWFYSRSIILPAELPSNLIEKASISIGETMQLASNLENPLGGQLVVVAQQAFSYAHSWVLTISAICFFLLTVFVWFSFPKKVN

SEQ ID NO: 44698 - protein, 362 aa, Acinetobacter baumannii
MQDQALPSFPQDLNEDQSITRPPISYSGIHHFKFHGNASEYFGIWIVNILLTIITLSLYAPWAKVRRLRYFYGNTEFFERRFDFTGIPTKILIGRLIALGIYVAFSISSQYSMIATVVGIVVLYMAVPWLIRATLRFTARNSKYGNARFYFGGTIKESYKIFLLSILVYIFTLGIFTPVAIWLYKKYYLNHLYAGQLNFKLNATWTAYMAAVYVPIFIALGIIAIFSIIYFSILGTLSGFSSNSVIFGIFMMYAIIGLFIYPLIAARLFITTWNNTTVGNSQFKTDCNQWRFAWIVASNWVVKILTLGLMSAWAAVRIHKYQVESMSLILLDDPDKMMNLAQQEQSALAEEISDIFDIDISL

SEQ ID NO: 44699 - protein, 420 aa, Acinetobacter baumannii
MANRGNVHQLLKSKEEIEYLVTLHTHRYANMPLPKQLEKKFWCLNLDRTRQNISKFLASGVLTYLIFILLALPTDYLVIGVPYITLDFIHCLLSAMNIALALLLFWVFAKFTKLSEHFYLAACGIVFLTIIINAMLLLSVGNMALKNQSMLLLSFLYMLGFILSGIKPLHMLCVGLLAAFLVFAFLILLDVNCDYIALGRALFGSCILGFSISSMLISRERSLFLNNQLAEINEQILRIEASELLHLSQQDALTQISNRRTFDEMFDFFYYRANQEKRPLAVLFIDIDFFKNYNDFYGHQMGDKVISSIAAAIKNSIRHVDFVARYGGEEFVVLLPETPAQGAYSVAANIYKAIERQAIPHAASLVSKYVTISLGFTVYTGGLKMGQDRLIHAADQALYRAKQLGRNQIYYQPLQVAEIA

SEQ ID NO: 44700 - protein, 344 aa, Acinetobacter baumannii
MNSITLLQPDDWHAHLRDGLALKRTVPDLAKQFARAICMPNLVPPVKTVEEALAYRERILAHVPEGNNFDPRMVLYFTDHTSPDEVRKIKESEHVNAIKLYPAGATTNSDNGVSDIRKVYAVIEQLEEHQVPLLLHGEVTHNHVDIFDREKRFLDEVLSPLLKQFPKLKVVLEHITTSDAAHFVLEQDRNVAATITPQHLLFNRNDMLVGGIKPHFYCLPILKRQTHQTTLLEVATSGNPKFFLGTDSAPHAQNAKENACGCAGCYSAPNAIELYAQAFDQVGKLERLEGFASHFGADFYGLPRNTSTITLVKEDNLVPESFDYLDNQKIIPLHAGKTLQWRKV

SEQ ID NO: 44701 - protein, 567 aa, Acinetobacter baumannii
MPYANPNAPKGGVLSQAAQGTFDNLNSMNGKGNATEGVNYLFDTLMTQSLDEVGVLYPLLAEKVSYDPIKTQSVTFYLNPKARFSNGLPVTAEDVKFSFDTYQTKSNFGLQMYLADLAKTEVINPHQVKFTFKSSHNPKMPFVVASLPIYSKVDWQKRDFTRISLQSIIGSGPYVVEKIDAGRSISYKRNPNYWAKDLPINKGRYNFDHLKYVYYRNWDIAFEGFKSGQYTLHEETNPKKWVTDYHFPAVKAGLITQYKFRHHNPIATESYVFNTRRKPFNDIRFRQALTYAYDFEWQNKALFYGQYQRLQSYFENSDLAATGRPSNNEMAILKPLLPKLSPIMQKAVLADWKYPASDASGFNRQNLLLARQLLIEAGYKIKEGQLYTPEGKPVQIEFLIQQDGKQRTLMPFVRNLKKLGININLRQVDAPQYLERTRRYDFDMTTMNLPQSLNPGNEQAQFWGSAAAVQNGNYNYAGIRNPVIDEVISKLVTAKDREQQITYTHVLDRLLRAGYYQIPTYGKGDYWYAYWNMYQQPKVKPVLSAGIEYWWSNANQAKKVAQYLHQQ

SEQ ID NO: 44702 - protein, 278 aa, Acinetobacter baumannii
MSAQLFVVATPIGHLDDMTFRAIDILKSVSVVAAEDTRQSAQLFKHYNISTPLTACHDHNESNKIEQLVQKLLAGENIALISDAGTPLISDPGFKLVRAAQEHGIRVVPVPGACAAIAALSAVGLPSDRFSFEGFLPSKASQRITQLEKLKNETQTLIFYEAPHRILECVKNMAEVFGENRPVGFAREITKTFETIKKMTLKDLVSFIENDHNQEKGEIVLVVGGAAEKTDLEQEKLDELLKRLLQDLSVKAASQLAADLTGIKKKVAYQRALELTQS

SEQ ID NO: 44703 - protein, 410 aa, Acinetobacter baumannii
MSEVLDVVIVGGGLVGGLTALLLAQGGVQPTVLDAAPVLDVEKTLSVMNPRVLALSQATIHLLKAVNVWDDLARQMPYTGMQVWNLNGYGEINFGHESVQRPMPEQALGSMVEPSVLNVAIQQKMLEQLTDYRTQVRVTRIEQGVGCWHIQLADGTALKTKLLIGADGANSFVREQAFIDLDVLDYKQAAISCAIKTSKPHHYVARQIFLPTGPLAYLPMASLEESENGYWQSIVWTLPDDYTDEYSALSDSEFMQLLTRESQHMLGEVLDVRSRAQFPLKARAAKQYVKAGLALIGDAAHVIHPLAGQGVNIGCLDAAILCDALLHDLGRGVWAHEQTLMRYEHRRKGQNDAMMHSMSAIGWLESSELFPLIWARNVGLKQVEQISFLKESFMQQANGLGALQNTQYSR

SEQ ID NO: 44704 - protein, 257 aa, Acinetobacter baumannii
MFVDTHCHLTMLDLTPYNGDLDLALAAARAEGVSKFMAISVDLDDHIALAEIAKRHEDVGYTVGVHPCEDVDTMARATTEYLTELAQSEKVWALGETGLDYYHSTDFINEQKDCFARHIQASKNVKKPVVVHTRSAKHDTVDIIRAEQSTHGILHCFTEDWETAKAVLDCGYYISFSGIVSFKNAQDLRDVAKQVPLDRLLIETDSPYLAPVPYRGKTNEPKYVPYVAKALSEVYDKPVEEIARITSQNFENLLKAI

SEQ ID NO: 44705 - protein, 260 aa, Acinetobacter baumannii
MAQIIAIANQKGGVGKTTTAVNLAASLAVLKKRVLLVDIDSQGNATMGSGIQKNDLLYSITDVLLGEVPIETAIQKAEVGYKVLGSNRELSGVELAIAEQEGREFILKNALNEIRDSFDYIIVDCAPSLSLITVNALAAVDGVIIPMQCEYYALEGLADLTQTIDRIQKALNPDLEIIGVLRTMYDARNALTRDVSAELEQYFGKKLYDTVIPRNVRLAEAPAHGLPVIYFEKSSKGAVAYLNLAAEMLKKSKVKKGSKV

SEQ ID NO: 44706 - protein, 210 aa, Acinetobacter baumannii
MHPFFQELQQGSQKLGLSLSDEALTLLLKYQDALVLWNKAYNLTAIRDPKEMLVKHLLDSLSILKDLPAGRLLDVGTGGGMPGMIIALCQPERSCVLLDSNGKKIRFLKQFIADLKLKNVIAVQTRVENQDTIDELGQFDVITSRAFASLTDFVEAARPYLHEQSIIAAMKGLIPVEEMEELKQEFSCKVIELHVPRLDEQRHLLLLQRI

SEQ ID NO: 44707 - protein, 575 aa, Acinetobacter baumannii
MNQDFKVYLRLISYLKPYWGVALLVLIGFGMNSATEVSVAKLIKFIIDAIQSASRADLDWFPLLIILLVFFRGLGLFMGGYYTAVISRSLVFSIRQEVYAKLLRLPAQYYLDNSSGHITAKIMYNVEQLTAASSESLKTIVRDGMITLGLLGYLFYTNWRLTICIMVFLPVIGILVRKASKRMRKLSMQVQDTMGDVNHVVQESINGNAVVKSFAGEESEQERFYKSSEENLKRGLKMVIVQNLNSPVVQVVMACAMALIVWLALRPQILGNTTAGEFVAYITAAGLLSKPVKNLTDVNEKLQRGLAAAHSVFELLDLPEEQNSGELKPQLQGAIRFDHVVLNYADGTQAIKDFSLDIRPGETVALVGRSGAGKTSLVNMLVRFQEVSSGQIYLDDLPIRDIELSSLRTQIAMVNQQVVLFNRTVRENIAYGQLHNASDEDVIAAAKAAYAHDFIMNLPNGYDTVLGAQGLNLSGGQRQRIAIARAILKNAPILILDEATSALDNESEHFIQQAFDEAMQDRTTIVIAHRLSTIENADRIVVMDRGQIVEQGTHQELLAKHGAYYQLHQRNFEDH

SEQ ID NO: 44708 - protein, 102 aa, Acinetobacter baumannii
MKDGLQIEEMKNAADSVVGTLKSLANTDRLLILCHLAHEELNVSQIEEKTQITQPTLSQQLMMLRKSDVVSTRRDGKQIFYSIKDDKMHSILNMLYQLYCIE

SEQ ID NO: 44709 - protein, 345 aa, Acinetobacter baumannii
MALISMRQLLDHAAEHNYGVPAFNVNNLEQMRAIMLAADATNSPVIVQASAGARKYAGAPFLRHLILAAIEEWPHIPVVMHQDHGTSPDVCQRSIQLGFSSVMMDGSLGADGKTPTTYDYNVDVTRQVVAMAHACGVSVEGEIGCLGSLETGMAGEEDGVGAEGVLDHSQLLTSVEEAKQFVADTNVDALAIAVGTSHGAYKFTRPPTGDILAIDRIKEIHAALPNTHLVMHGSSSVPQEWLKVINEFGGNIGETYGVPVEQLVEAIKHGVRKINIDTDLRLASTGAIRRFMAENPAEFDPRKYFAKTVDSMKQICIDRYEAFGTAGNADKIRPISLEKMVDRYK

SEQ ID NO: 44710 - protein, 395 aa, Acinetobacter baumannii
MNFQRMTDLNLAGKRVLIREDLNVPVKNGVITSDARLRAALPTIKAALEKGAAVMVFSHLGRPVEGEPKPEQSLAPVAAYLTEALGQEVKLFTDYLNGVEVEAGQVVLLENVRFNPGEKKNNPELAQKYAALCDVFVMDAFGTAHRAEASTEGVARFAPVAAAGPLLAAELDALGRAMQTPEKPMVAIVAGSKVSTKLDVLNSLSGICDQLIVGGGIANTFLAAAGYNVGKSLYEADLVETAKQIAAKVSVPLPTDVVVADASQINFEDFLGSLAAAQAVIKKVEDVTANDMILDVGPETAKAFANILTTSKTILWNGPVGVFEVDQFGEGTKALSLAVAQSDAFSIAGGGDTLAAIDKYNVADQIGYISTGGGAFLEFVEGKTLPAVAVLLERA

SEQ ID NO: 44711 - protein, 197 aa, Acinetobacter baumannii
MKQPKIILASSSQTRKDLMNRLGIEYICISPDIDESPCGETHADDLAKRLAFTKAQVIAQKNREAIVIGSDQVAWREHAPHDFIGKPLTIENAKAQLAANSGRIVFFSTALSVQCLEKSFEHTLVEHYQVKFRNLSAPEIERYVDLDLPLECAGSFKCESLGISLFEKMIGQDQTTLMGLPMIQLCQILRQLNLQIP

SEQ ID NO: 44712 - protein, 485 aa, Acinetobacter baumannii
MKVRTRIAPSPTGFPHVGTAYIALFNMCFAKQHGGEFILRIEDTDQLRSTPESEKMILDSLRWLGLNWSEGPDVGGPHAPYRQSERMGIYKQYALELVEKGHAFYCFATAEELDQMRAEQQARGETPKYDGRGLKLSQEEVARRLEAGEPHVIRMKVPEEGVCKFNDLLRGEVEIPWAQVDMQVLLKTDGLPTYHLANVVDDHLMEITHVLRGEEWLPSAPKHQLLYQYFGWEMPTLCHMPLLRNPDKSKLSKRKNPTSINYYRDIGVLPEALLNYLGRMGWSMPDEREVFTLQDMMDNFDIQRVSLGGPIFDVEKLNWLNGQWIKGLTPGQLLDRLLTWKSDRSTLEDIAAAIQPRINLLSEAVNWAGFYFNHMPQITAEMFESKKLTQEQVRQSLQFAIWRLESQFTWNNDTVSQTLMDLANQMGIKLRDFMPTFFIAIAGSTSSTPVMQSMVTLGPDLTFARLRHALEIVGAPSKKEVKNWE

SEQ ID NO: 44713 - protein, 307 aa, Acinetobacter baumannii
MSHISVLLFETVESLLADRTTGVYIDATFGRGGHTRLLLSKLDENARVYAFDKDPQALEVAAALAQEDPRFTIIHASFADIKEKMQEIGVQSVDGIMADLGVSSPQLDQAERGFSFMQDGPLDMRMDNSKGLTAAEWLLEVEEEDLANIIYQYGEERYSRRIARAIKQAGKLDTTAQLAEIVKTAHPKWEKHKHPATRTFQAIRIAINKELDDIEVFLPQAVDLLKPKGRLSVISFHSLEDRLIKQFIQKESTLAEDSGWGMPQQQVDTRRLKKISRVRASEEEVKANPRSRSAWLRVAERLEQKGA

SEQ ID NO: 44714 - protein, 499 aa, Acinetobacter baumannii
MTVSFQEIHPIEIDAQWPQQPFHGFSLDSRKVETGQIFIALTSYSQPEKTRTFAEAALANGALAVISETELGVANEWVCPDVRQRMGEWQKRYLQQADVVKPLRIIAVTGTNGKTTISRLIAELISSQQQRCAVMGTTGNGILPNLTPSTHTTLDALQLQNALHDYAKQGATFASLEASSHGLEQGRLNGCDIEIAVYSNLSRDHLDYHGTLEAYAEAKARLFQFNSLKVAVINLDDAHADLMIKSAQNNPAQPKILTYSLTQNTADYYITDLSYSLAGATFNLVSQQGSFAVESPLLGHFNVENLIAALIAAEQAGFDLQALVNFVPKLIGAPGRMQVIRDDERLFVVDYAHTPDALIQVLKTLKRHVSNQLWAVFGCGGDRDRGKRPLMTQAALDGANPVILTSDNPRTEDPEQIFADMKQGIDFSGHRMHEIHDRREAIKFVAEQAQAGDIVVIAGKGHENYQEINGVRHWFDDVVEVRSAIDAQHHTVDAAYPAQ

SEQ ID NO: 44715 - protein, 466 aa, Acinetobacter baumannii
MHTSTTSTVPLEPWTAQQLQQATQGYWHKDQIPQTEIKRILTDSRHAESGDAFLALKGERFDAHNFVGQVAANGCQVAIVERPIDAEIAQLVVADTRLALGQLGAYRREQNAQLKVIALTGSSGKTTTKEMLGSILSRLAPTLITRGNLNNDLGVPMMLLELRKEHQYAVMELGANHQGEIDYTSKLVQPHVAGILNIGTAHLGEFGGRDGICRAKSEIYRHILPQGVAIVPQQDDFTAEIREAAKSHQIMSFGAGGDVFATEIELLPQSVNFQLHTPQGSSFVRLPFAGEHNVQNATAAVAFALALGVSLEDIVKGLEQAQGAKGRLNFIQKAPHLFIDDTYNANPTSMRAAAQVLLQQNGIKVMVMGDIGELGDSSWQEHHDLGRDLAELPLDHIVAVGQFASAALEGAGLHSTKLKAFQTQAEALPFLINLIQTHQPQSMSFLFKGSRFTHMETLMADLMEKL

SEQ ID NO: 44716 - protein, 372 aa, Acinetobacter baumannii
MLLWLFEQLAGYHSSFQVVRYLTLRSLLSVLTSLTIGLVLGPIMIRKLQALKYGQAVSSFAPENHAKKMGTPTMGGILILLSIGISTLLWADLSNPYVWIVLGVMVVFGAVGWADDWIKIRYKDNAGLPARKKFFWTSVASLGAGIALYLIATQQSNAEYTANMLDLLIPFFKNLSIPLSIVPLGLAFIVFTYLVINGASNAVNLTDGLDGLAIMPVVMVATGLGVFAYLSGDIRFANYLHIPYVKYTSELVVICSAMIGAGLAFLWYNAHPAQVFMGDVGALALGAMLGTIAVMVRQEIVFAIMGGVFVMEAVSVFLQIGSLRMRNKRVFLMAPLHHHYEKQGWKETQVVIRFWIITIMLVVLGLMTLKLR
